(19) United States
(12) Patent Application Publication
(10) Pub. No.: US 2022/0056532 A1
(43) Pub. Date: Feb. 24, 2022

(54) MICROBIOTA COMPOSITION, AS A MARKER OF RESPONSIVENESS TO ANTI-PD1/PD-L1/PD-L2

(71) Applicant: INSTITUT GUSTAVE ROUSSY, Vilejuif (FR)

(72) Inventors: Laurence ZITVOGEL, Paris (FR); Valerio IEBBA, Rome (IT)

(21) Appl. No.: 17/279,565

(22) PCT Filed: Sep. 27, 2019
(86) PCT No.: PCT/EP2019/076158

§ 371 Date: Mar. 24, 2021

(30) Foreign Application Priority Data
Sep. 28, 2018 (EP) 18306282.7

(51) Int. Cl. C12Q 1/6886; C12Q 1/689; G06F 17/18

(52) U.S. Cl. CPC C12Q 1/6886; C12Q 2600/106; G06F 17/18; C12Q 1/689

(57) ABSTRACT

The present invention relates to a method for in vitro determining if an individual having a renal cell cancer (RCC) is likely to respond to a treatment with an anti-PD1/PD-L1/PD-L2 Ab-based therapy, based on the analysis of the microbiota present in a stool sample from said individual. Twelve models useful to perform the above method are disclosed, as well as tools designed to easily perform this method.

### FIELD OF THE INVENTION

[0001] The present invention relates to the field of anticancer treatment. In particular, the present invention concerns the role of the gut microbiota in the efficacy of treatments comprising administration of immune checkpoint inhibitors (ICI), in the treatment of renal cell cancer (RCC). The present invention provides “metagenomics-based gut oncomicrobiome signatures” (GOMS) at diagnosis prior to PD-1/PDL-1/PDL-2 blockade as novel predictors of response or resistance for the best clinical outcome and at 6 months of therapy of a renal cell cancer. The present invention also provides theranostic methods to identify patients in need of a bacterial compensation treatment before receiving an ICI and/or during the therapy with an ICI.

### BACKGROUND AND PRIOR ART

[0002] Major conceptual advances in cancer biology have been made over the past decade. The understanding that immune responses are routinely generated against tumor-specific neoantigens expressed by cancer-associated mutations and commonly dampened by the immunosuppressive tumor microenvironment (TME) has been seminal to the development of effective immunotherapies aimed at provoking immune control against tumor progression (Sharma and Allison, 2015a, 2015b). Progress in cancer immunotherapy has resulted in remarkable success in the treatment of a variety of hematological and solid metastatic malignancies such as melanoma, lung, bladder, kidney, Hodgkin's lymphoma, acute B cell leukemia, liver, Merkel-cell carcinoma and head and neck tumors, amongst others (Borghaei et al., 2015; Nghiem et al., 2016; Robert et al., 2011; Rosenberg et al., 2016). To date, therapies that block inhibitory signaling pathways expressed by T lymphocytes (so called “immune checkpoints”) during the initial priming phase (in draining lymph nodes) or the effector phases (in tumor beds) of adaptive anticancer immune responses have demonstrated the greatest clinical benefit in overall survival (Ribas et al., 2016; Topalian et al., 2012). The prototypic example for this success has been the use of monoclonal antibodies (mAbs) targeting PD-1 (expressed by activated/exhausted T cells) or its ligand PD-L1 (commonly expressed by cancer cells or cells of the TME) (Pardoll, 2015). By releasing these molecular brakes, such mAbs reinstate the anticancer adaptive arm of the immune response.

[0003] While PD-1 blockade represents the most effective first line therapy in B-RAF wild type melanoma and the best option in second line unresectable lung carcinomas, approximately 60-70% of tumors exhibit primary resistance to this therapeutic strategy. Primary resistance has been attributed to low tumor mutational burden and poor intrinsic antigenicity of tumor cells (Riaz et al., 2016; Rizvi et l., 2015), defective antigen presentation and priming phase (Spranger et al., 2015), limited intratumoral infiltration related to exhausted T cell functions (Smyth et al., 2016), and metabolic immunosuppressive pathways related to adenosine and indoleamine, 2, 3-dioxygenase (Koyama et al., 2016; Smyth et al., 2016). Similarly, primary resistance mechanisms to CTLA-4 blockade have also been elucidated. For example, melanoma presenting with loss of IFN-γ signaling lack response to ipilimumab (Gao et al., 2016).

[0004] More recently, secondary resistance mechanisms to chronic inhibition of PD-1 receptors have been reported in approximately 25% of melanoma patients (Koyama et al., 2016; Ribas et al., 2016; Zaretsky et al., 2016). Four out of 74 melanoma patients who progressed for a median follow up of 1.8 years despite continuous therapy with pembrolizumab developed lesions presenting with loss-of-function mutations in janus kinases JAK1 or JAK2, thus leading to decreased STAT1 phosphorylation and reduced sensitivity to the antiproliferative effects of IFNs or alternatively, a mutation within the gene encoding β-2 microglobulin, preventing folding and transport of MHC class I molecules to the cell surface for T cell recognition of tumor cells (Zaretsky et al., 2016). In addition to these darwinian natural selection of genetic (or epigenetic) heritable traits, other acquired resistance mechanisms have been reported in mice. Predominately, adaptive immune resistance resulting from the IFN-γ-inducible expression of PD-L1 (Pardoll, 2012; Taube et al., 2012), a primary ligand of PD-1, TNF-induced loss of antigenic variants (Landsberg et al., 2012) as well as TCR-dependent upregulation of additional exhaustion markers on activated T lymphocytes such as Tim3/HAVCR2 (Koyama et al., 2016; Restifo et al., 2012; Smyth et al., 2016), lymphocyte activation gene 3 (Lag3), T cell immunoreceptor with Ig and ITIM domains (TIGIT), B and T cell lymphocyte attenuator (BTLA), and V-domain Ig suppressor of T cell activation (VISTA).

[0005] The inventors' team just reported in Routy et al. Science Jan. 5, 2018, in conjunction with two other reports (Gopalakrishnan V et al and Matson V et al), that primary resistance to PD-1/PDL-1-based immune checkpoint inhibitors (ICI) can be due to an abnormal gut microbiota. Antibiotics (ATB) inhibited the clinical benefit of ICI in advanced lung, kidney and bladder cancer patients. Fecal microbiota transplantation (FMT) from cancer patients who responded to ICI (but not from non-responding patients) into germ-free or ATB-treated mice ameliorated the antitumor effects of PD-1 blockade. Metagenomics of patient stools at diagnosis revealed correlations between clinical responses to ICI and dedicated microbial patterns, with relative increase of Akkermansia muciniphila when examining both lung and kidney cancer patients altogether. The diagnosis of a gut dysbiosis is important since it is amenable to a therapy that restores efficacy of ICI. Indeed, oral supplementation with A. muciniphila or Alistipes indistinctus post-FMT with non-responder feces restored the efficacy of PD-1 blockade in an IL-12-dependent manner, by increasing the recruitment of CCR9+CXCR3+CD4+T lymphocytes into tumor beds.

[0006] The results disclosed in the present application show the predictive value of metagenomics-based gut oncomicrobiome signatures (GOMS), calculated at diagnosis from data of a larger cohort of 69 renal cell cancer patients (RCC) patients who received a second line therapy with nivolumab or pembrolizumab for a tyrosine kinase inhibitor or mTOR inhibitor-resistant advanced or metastatic RCC, for the clinical benefit of such a treatment. This study was performed using three RECIST criteria (best outcome, time to progression (TTP) at 3 months, TTP at 6 months), including or excluding 11 RCC patients who took antibiotics during or the 2 months preceeding the first administration of anti-PD1 Abs.

### SUMMARY OF THE INVENTION

[0007] According to a first aspect, the present invention pertains to a method for in vitro determining if an individual having a renal cell cancer patients (RCC) is likely to respond to a treatment with an anti-PD1/PD-L1/PD-L2 Ab-based therapy, comprising the following steps:
[0008] (i) from a fecal sample (or ileal or colonic mucosal specimen) of said individual, obtaining an abundances pattern based on the relative abundances of a set of bacterial species comprising at least 8 bacterial species selected from the group of species disclosed in Table 1 below.
[0009] (ii) using one or several pre-defined equations each corresponding to a model obtained for at least 8 bacterial species from said set of bacterial species, calculating the probability that said individual responds to the treatment (P_{R}) or the probability that said individual resists to the treatment (P_{NR}) with an anti-PD1/PD-L1/PD-L2 Ab-based therapy.

[0010] The invention also pertains to 12 models useful to perform the above method, 6 of which were obtained from data of patients who did not take any antibiotics during the last two months, whereas the 6 others can be used in patients whom recent antibiotics uptake is unknown. These models rely on (partly) different subsets of the microbiota (listed in Tables 3, 6, 9 and 12 below) and can be used either alone or combined.

[0011] Tools designed to easily perform the above method are also part of the present invention, such as a nucleic acid microarray comprising nucleic acid probes specific for each of the microorganism species to be detected in step (i) of the method, and such as a set of primers comprising primer pairs for amplifying sequences specific for each of the microorganism species to be detected in step (i) of said method.

[0012] Theranostic methods for determining whether an individual needs a bacterial compensation with a bacterial composition and/or by FMT before receiving an anti-PD1/PD-L1 Ab-based therapy are also part of the invention.

### BRIEF DESCRIPTION OF THE DRAWINGS

[0013] FIG. 1. Commensal species associated with best outcome.

[0014] The RECIST 1.1 criterium taken into account as predictive for clinical benefit was “best clinical outcome”.

[0015] A. Volcano plots (left) and Linear discriminant analysis effect size (LEfSe) (right) analysis to assess putative bacterial biomarkers for building metagenomics-based GOMS in RCC patients' stools regardless antibiotic usage. Volcano plots were generated computing for each bacterial species: i) the log 2 of fold ratio (FR) among the mean relative abundances of R versus NR (x axis); ii) the co-log 10 of P values deriving from Mann-Whitney U test calculated on relative abundances in absolute values (y axis). LEfSe plots were generated with Python 2.7 on output files derived from LEISe pipeline, and all species with LDA score≥2 were considered for subsequent analysis.

[0016] B. ROC curves to assess predictability of metagenomic-based GOMS in RCC patients' stools regardless antibiotic usage. Patients were divided into NR and R according to their «resistant» or «responding» clinical phenotype upon ICI treatment. Combinations of selected bacterial species in panel A were performed with Python 2.7 and underwent ROC analysis. Upon 5-fold cross-validation (no noise added), the ROC curve corresponding to the bacterial species consortium having the best AUC was depicted. Specificity (x axis) and sensitivity (y axis) along with their best values were reported for each curve (inset). Diagonal line depicts the absence of predictability for the best clinical outcome.

[0017] C-D, Idem as A-B but considering only patients who did not take ATB.

[0018] FIG. 2. Commensal species associated with TTP>3 months.

[0019] The RECIST 1.1 criterium taken into account as predictive for clinical benefit was “TTP< or >3 months”.

[0020] A. Volcano plots (left) and LEfSe (right) analysis to assess putative bacterial biomarkers for building metagenomics-based GOMS in RCC patients' stools regardless antibiotic usage. Volcano plots were generated computing for each bacterial species: i) the log 2 of fold ratio (FR) among the mean relative abundances of R versus NR (x axis); ii) the co-log 10 of P values deriving from Mann-Whitney U test calculated on relative abundances in absolute values (y axis). LEfSe plots were generated with Python 2.7 on output files derived from LEfSe pipeline, and all species with LDA score 2 were considered for subsequent analysis.

[0021] B. ROC curves to assess predictability of metagenomic-based GOMS in RCC patients' stools regardless antibiotic usage. Patients were divided into NR and R according to their «resistant» or «responding» clinical phenotype upon ICI treatment. Combinations of selected bacterial species in panel A were performed with Python 2.7 and underwent ROC analysis. Upon 5-fold cross-validation (no noise added), the ROC curve corresponding to the bacterial species consortium having the best AUC was depicted. Specificity (x axis) and sensitivity (y axis) along with their best values were reported for each curve (inset). Diagonal line depicts the absence of predictability for the best clinical outcome.

[0022] C-D. Idem as A-B but considering only patients who did not take ATB.

[0023] FIG. 3. Commensal species associated with TTP>6 months.

[0024] The RECIST 1.1 criterium taken into account as predictive for clinical benefit was “TTP< or >6 months”;

[0025] A. Volcano plots (left) and LEfSe (right) analysis to assess putative bacterial biomarkers for building metagenomics-based GOMS in RCC patients' stools regardless antibiotic usage. Volcano plots were generated computing for each bacterial species: i) the log 2 of fold ratio (FR) among the mean relative abundances of R versus NR (x axis); ii) the co-log 10 of P values deriving from Mann-Whitney U test calculated on relative abundances in absolute values (y axis). LEfSe plots were generated with Python 2.7 on output files derived from LEfSe pipeline, and all species with LDA score≥2 were considered for subsequent analysis.

[0026] B. ROC curves to assess predictability of metagenomic-based GOMS in RCC patients' stools regardless antibiotic usage. Patients were divided into NR and R according to their «resistant» or «responding» clinical phenotype upon ICI treatment. Combinations of selected bacterial species in panel A were performed with Python 2.7 and underwent ROC analysis. Upon 5-fold cross-validation (no noise added), the ROC curve corresponding to the bacterial species consortium having the best AUC was depicted. Specificity (x axis) and sensitivity (y axis) along with their best values were reported for each curve (inset). Diagonal line depicts the absence of predictability for the best clinical outcome.

[0027] C-D. Idem as A-B but considering only patients who did not take ATB.

[0028] FIG. 4. TTP6 months allows to segregate R versus NR RCC patients who did not take ATB based on MG composition.

[0029] All RCC patients who did not take ATB from the Routy et al. Science 2018 data base were considered unifying discovery and validation cohorts at TTP6. Alfa-diversity, beta-diversity, Volcano and LEfSe plots were generated as described in FIGS. 1, 2, 3 and 4. Pairwise analysis was performed on NR (orange) and R (blue) cohorts and reported are boxplots generated with Python v2.7 only for significant comparisons (Mann-Whitney U test, P≤0.05). Responders tend to have significantly higher alfa-diversity compared to NR, and are significantly divided from NR (beta-diversity, P values are indicated within the ordination plots). LEfSe, volcano and pairwise analysis plots highlights discriminant species within the two cohorts NR and R.

[0030] FIG. 5. Logistic regression models based on RCC patients regardless antibiotic usage and OUTCOME_1 criterion (OUTCOME_1 meaning considering all SD among responders).

[0031] Logistic regression models were drawn from stool MG of RCC patients regardless antibiotic usage and OUTCOME_1 criterion. Each Model is depicted by three graphs: a feature selection (left), a confusion matrix (center) and a ROC curve (right). Confusion matrices and ROC curves were generated after 5-fold cross-validation. The higher the percentage within the crossing ‘True label’ and ‘Predicted label’ cells, the higher the model predictability. For the ROC curves, both AUC (area under curve) and CV_AUC (cross-validated area under curve) need to be taken into account. At the bottom of each triplet is reported the Model equation described by a logistic regression: exp is the exponent with natural base, CAG is the relative abundance of each CAG species expressed within the closed interval [0:1] and standardized (zero mean and unit variance).

[0032] FIG. 6. Logistic regression models based on RCC patients without antibiotic treatment and OUTCOME_1 criterion (OUTCOME_1 meaning considering all SD among responders).

[0033] Logistic regression models were drawn from stool MG of RCC patients with no antibiotic usage and OUTCOME_1 criterion. Triplet graph (feature selection, confusion matrix, ROC curve) description as in FIG. 6.

[0034] FIG. 7. Logistic regression models based on RCC patients regardless antibiotic usage and OUTCOME_2 criterion (OUTCOME_2 meaning considering only SD>6 months among responders).

[0035] Logistic regression models were drawn from stool MG of RCC patients regardless antibiotic usage and OUTCOME_2 criterion. Triplet graph (feature selection, confusion matrix, ROC curve) description as in FIG. 6.

[0036] FIG. 8. Logistic regression models based on RCC patients without antibiotic treatment and OUTCOME_2 criterion (OUTCOME_2 meaning considering only SD>6 months among responders).

[0037] Logistic regression models were drawn from stool MG of RCC patients with no antibiotic usage and OUTCOME_2 criterion. Triplet graph (feature selection, confusion matrix. ROC curve) description as in FIG. 6.

### DETAILED DESCRIPTION OF THE PREFERRED EMBODIMENTS

[0038] In the present text, the following definitions are used:
[0039] An “immune checkpoint inhibitor” (ICI) designates any drug, molecule or composition which blocks certain proteins made by some types of immune system cells, such as T cells, and some cancer cells. These proteins help keep immune responses in check and can keep T cells from killing cancer cells. When these proteins are blocked, the “brakes” on the immune system are released and T cells are able to kill cancer cells better. Examples of checkpoint proteins found on T cells or cancer cells include PD-1/PD-L1 and CTLA-4/B7-1/B7-2. In particular, ICIs encompass anti-PD1 antibodies (such as Nivolumab or Pembrolizumab), anti-PD-L1 antibodies (such as Atezolizumab or Durvalumab), anti-CTLA-4 antibodies and anti-PD-L2 antibodies. In the scientific literature, ICIs are also designated as “drugs blocking an immune checkpoint”, or “immune checkpoint blockers” or “immune checkpoint blockade drugs”.
[0040] An “anti-PD1/PD-L1/PD-L2 Ab-based therapy” herein designates any therapy including the use of a drug that antagonizes PD1, PD-L1 or PD-L2. These include therapies mainly based on an ICI such as a drug antagonizing PD1 or PD-L1 or PD-L2, as well as combined therapies using several ICIs and/or additional anticancer drugs such as chemotherapeutic drugs. Non-limitative examples of combined therapies encompassed by the phrase “anti-PD1/PD-L1/PD-L2 Ab-based therapy” include anti-PD1+anti-CTLA4, anti-PD1+polychemotherapy (pemetrexed+carboplatin), anti-Lag3+anti-PD1, anti-NKG2A+anti-PD1, IDO inhibitor+anti-PD1 and anti-ICOS+anti-PD1. Although the currently used drugs antagonizing immune checkpoint proteins are monoclonal antibodies, other molecules specifically binding to PD1, PD-L1, PD-L2 or other proteins could be used for the development of future ICIs such as, for example, antibody fragments or specifically designed aptamers. Of course, the phrase “anti-PD1/PD-L1/PD-L2 Ab-based therapy” encompasses any therapy including an active molecule that antagonizes PD1 or PD-L1 or PD-L2.
[0041] “NR” defines a non-responder status to PD-1/PDL-1/PDL-2 blockade
[0042] “R” defines a responder status to PD-1/PDL-1/PDL-2 blockade
[0043] “NGS” defines any Next Generation Sequencing platform available in the past, present or in the future.
[0044] In the present text, each “bacterial species” is defined by a Co-Abundance gene Group (“CAC”), which is a group of bacterial genes from the gut microbiome (i.e., the gene repertoire of the gut microbiota), which abundance level varies in the same proportion among different individual samples. In other words, a bacterial species according to the invention is defined by a cluster of bacterial gene sequences which abundance levels in samples from distinct subjects are statistically linked rather than being randomly distributed.

[0045] Most current approaches for analyzing metagenomic data rely on comparisons to reference genomes, but the human gut microbiota diversity extends beyond what is currently covered by reference databases. In the results disclosed herein, the inventors used a method based on binning co-abundant genes across a series of metagenomic samples, that enables comprehensive discovery of new microorganisms without the need for reference sequences. In what follows, part of the species identified as likely to play a role in the patients' response to therapies based on antibodies against PD1, PD-L1 or PD-L2 are newly-identified species, not yet precisely referenced in public databases. For each of the identified species (both newly-identified and species very close to already referenced species), the present application discloses a set of 50 bacterial genes which are non-redundant sequences and can be used, alone or in combination, as tracer genes to assess the presence and relative abundance to the corresponding species. Of course, once the species are identified, either by the set of non-redundant genes disclosed herein, or later on by their further identification and/or inclusion into a data base, the skilled in the art can assess their relative abundance by any appropriate means, such as, for example, by measuring the copy number of another non-redundant gene that co-varies with the 50 sequences disclosed in the present application, or even by identifying a signature of this species at the protein level rather than in a nucleic acids sample. Hence, the present invention is not limited to the use of the disclosed sequences to measure the relative abundance of the corresponding species.
[0046] The “relative abundance” of a definite bacterial is defined as the fraction of the entire bacterial ecosystem belonging to this bacterial species. Throughout the present text, all relative abundances are expressed within the closed interval [0:1], where 1 stands for the maximum fraction available for a single bacterial species (i.e., a bacterial species with a relative abundance equal to 1 means that 100% of the bacteria present in the sample are of the considered species). For NGS technique, the relative abundance of a bacterial species is considered as the number of reads of that selected species divided by the total number of reads representing the overall bacterial community. For the qPCR technique, the relative abundance of a bacterial species is considered as the ΔCt value of that species X (amplified by a pair of primers specific for X) divided by the ΔCt value of the total bacteria (amplified by an universal primers pair able to catch all the eubacteria present in a sample, the pair consisting of primers PRK341F and PRK806R or the pair consisting of primers 27F and 1492R).
[0047] “predictability” represents the predictability of the overall model done with logistic regression, based on selected bacterial species. Predictability is expressed as a percentage value within the closed interval [0:100].
[0048] “success rate” is the percentage of subjects recognized as NR or R after 5-fold cross-validation, and is different from model predictability.

[0049] When necessary, other definitions are provided later in the present text.

[0050] The present invention concerns a method for in vitro determining if a subject having a renal cell cancer is likely to benefit from a cancer treatment with an ICI and more specifically, from a treatment with antibodies (or other inhibiting molecules) directed against immune checkpoint blockers PD1, PD-L1 or PD-L2, alone or together with CTLA4 and/or other drugs as defined above. The responder (NR) or responder (R) status is established following these steps:

[0051] (i) from a fecal sample of the said subject (or from an ileal or colonic mucosal specimen), obtaining an “abundances pattern” based on the relative abundances of a set of bacterial species, expressed within the closed interval [0:1];

[0052] (ii) using the obtained abundances pattern to calculate, using one (or several) of the complementary models proposed in the present application, the probability that the subject will not respond (NR) or respond (R) to the treatment.

[0053] It is important to note here that, as already mentioned above, the present invention is not limited by the technique used to measure the relative abundances of the bacterial species, which can be obtained by NGS (through any past or future NGS platform, from the first generation to the last available on the market and those in development, using any NGS output file provided as fastq, BAM, SAM, or other kind of files extensions) or any other technique such as, for example, qPCR (quantitative polymerase chain reaction) and microarrays to express the relative abundances of selected bacterial species, using the sequences provided herein or any other co-variant sequence. When the relative abundances are assessed by genetic analysis, the data preferably derive from shotgun sequencing, and not 16S targeted sequencing, in order to comply with the bioinformatic pipeline described in Materials and Methods below.

[0054] According to a first aspect, the present invention pertains to a method for in vitro determining if an individual having a renal cell cancer (RCC) is likely to respond to a treatment with an ICI-based therapy such as an anti-PD1/PD-L1/PD-L2 Ab-based therapy, comprising the following steps:
[0055] (i) from a fecal sample of said individual, obtaining an abundances pattern based on the relative abundances of a set of bacterial species comprising at least 8 bacterial species selected from the group consisting of:

TABLE 1
Bacterial species used to assess the R or NR status of a RCC patient. The
third column specifies, for each bacterial species, if its presence/overrepresentation
in the fecal sample is of good (G) or bad (B) prognosis

| CAG number | Bacterial species | |
|---|---|---|
| CAG00008 | Clostridium_bolteae_ATCC_BAA_613 | B |
| CAG00013 | Clostridiales_bacterium_1_7_47FAA | B |
| CAG00037 | Bacteroides_faecis_MAJ27 | G |
| CAG00048_1 | Clostridium_sp_CAG_226 | B |
| CAG00063 | Barnesiella_viscericola_DSM_18177 | B |
| CAG00122 | Coprococcus_catus_GD_7 | B |
| CAG00140 | Subdoligranulum_sp_4_3_54A2FAA | B |
| CAG00142 | Bacteroides_stercoris_ATCC_43183 | B |
| CAG00211 | Firmicutes_bacterium_CAG_227 | G |
| CAG00218 | Bacteroides_sp_CAG_20 | B |
| CAG00243 | Lachnospiraceae_bacterium_1_1_57FAA | B |
| CAG00300 | Prevotella_sp_CAG_891 | B |
| CAG00317 | Clostridium_sp_CAG_230 | G |
| CAG00327 | Faecalibacterium_sp_CAG_74 | B |
| CAG00341 | Eubacterium_sp_CAG_115 | B |
| CAG00346 | Eubacterium_rectale_M104_1 | B |
| CAG00357 | Bacteroides_ovatus_V975 | B |
| CAG00413 | Bacteroides_sp_CAG_144 | G |
| CAG00473 | Prevotella_sp_CAG_617 | B |
| CAG00474 | Sutterella_wadsworthensis_2_1_59BFAA | G |
| CAG00487 | Prevotella_sp_CAG_279 | B |
| CAG00508 | Alistipes_obesi | G |
| CAG00530 | Prevotella_sp_CAG_617 | G |
| CAG00557 | Ruminococcus_callidus_ATCC_27760 | B |
| CAG00580 | Clostridium_sp_CAG_62 | B |
| CAG00601 | uncultured_Faecalibacterium_sp_{—} | B |
| CAG00607 | Eubacterium_sp_CAG_251 | B |
| CAG00610 | Hungatella_hathewayi_12489931 | B |
| CAG00624 | Firmicutes_bacterium_CAG_552 | G |
| CAG00646 | Alistipes_sp_CAG_268 | G |
| CAG00650 | Dorea_formicigenerans_ATCC_27755 | B |
| CAG00668 | Azospirillum_sp_CAG_239 | G |
| CAG00669 | Firmicutes_bacterium_CAG_103 | G |
| CAG00676 | Firmicutes_bacterium_CAG_176 | G |
| CAG00698 | Ruminococcus_sp_CAG_177 | B |
| CAG00713 | Firmicutes_bacterium_CAG_270 | G |
| CAG00720 | Anaerotruncus_colihominis_DSM_17241 | B |
| CAG00727 | Eggerthella_lenta_DSM_2243 | B |
| CAG00766 | Firmicutes_bacterium_CAG_176 | B |
| CAG00771 | Clostridium_sp_CAG_413 | G |
| CAG00782 | Eubacterium_rectale_CAG_36 | G |
| CAG00861 | Oscillibacter_sp_CAG_241 | B |
| CAG00873 | Butyricimonas_virosa_DSM_23226 | B |
| CAG00880 | Subdoligranulum_sp_CAG_314 | G |
| CAG00886 | Sutterella_sp_CAG_351 | G |
| CAG00889 | Megasphaera_elsdenii_14_14 | G |
| CAG00897 | Firmicutes_bacterium_CAG_83 | B |
| CAG00919 | Clostridium_methylpentosum_DSM_5476 | G |
| CAG00928 | Acidiphilium_sp_CAG_727 | B |
| CAG00937 | Clostridium_sp_CAG_7 | G |
| CAG00963 | Clostridium_sp_CAG_524 | B |
| CAG01039 | Faecalibacterium_cf_prausnitzii_KLE1255 | B |
| CAG01141 | Holdemanella_biformis_DSM_3989 | B |
| CAG01144 | Lactobacillus_vaginalis_DSM_5837_ATCC_49540 | B |
| CAG01158 | Pseudoflavonifractor_capillosus_ATCC_29799 | G |
| CAG01197 | Dialister_succinatiphilus_YIT_11850 | G |
| CAG01208 | Coprococcus_catus_GD_7 | B |
| CAG01263 | Clostridium_clostridioforme_2_1_49FAA | B |
| CAG01321 | Faecalibacterium_prausnitzii_SL3_3 | G |

[0056] (ii) using one or several pre-defined equations each corresponding to a model obtained for at least 8 bacterial species from said set of bacterial species, calculating the probability that said individual responds to the treatment (P_{R}) or the probability that said individual resists to the treatment (P_{NR}) with an ICI-based therapy.

[0057] In the above method, the “abundances pattern based on the relative abundances of a set of bacterial species” can be, for example, in the form of a vector of said relative abundances. This abundance pattern will be inserted into an executable program (Windows OS environment) by the person performing the method (e.g., a clinician) to obtain the NR or R probability percentage of a subject.

[0058] As described in the experimental part below, several models can be obtained from clinical data of a representative cohort to assess the probability, for an individual, to respond (or not to respond) to the treatment. The experimental part describes in detail 12 possible models which, although based on different strategies, all provide very good predictability and success rates.

[0059] Other models can possibly be used, keeping in mind that an overrepresentation of bacterial species identified as “good bacteria” in Table 1 above, and/or underrepresentation of bacterial species identified as “bad bacteria” in the same table indicate that the individual is likely to respond to the treatment, whereas an overrepresentation of bacterial species identified as “bad bacteria” in Table 1 above, and/or underrepresentation of bacterial species identified as “good bacteria” in the same table indicate that the individual is likely to be a poor responder to the treatment. For assessing whether a bacterial species is over- or underrepresented in a fecal sample, its relative abundance is compared to a control value corresponding to the relative abundance of the same bacterial species in normal/healthy volunteers (i.e., individuals not having a cancer). For bacterial species that are not detected in the control volunteers, the mere presence of the bacterium is considered as an overrepresentation. Equations are used to “weight” the predictive values of each species' over- or underrepresentation and more precisely calculate the probability that the patient responds to the treatment (P_{R}) or the probability that the patient resists to the treatment (P_{NR}) with an ICI-based therapy.

[0060] In step (ii), several equations can be used, each corresponding to a model based on a subset of 8 bacteria from the set recited in step (i). The clinician will then combine the result obtained with each of these equations to more precisely predict the R or NR status of the patient.

[0061] According to a particular embodiment of the above method, at least one equation used in step (ii) corresponds to a model for a set of at least 8 bacterial species which are present in the fecal sample of said individual. However, a model based on 8 bacteria which are not all present in the sample can also be used, especially if it is combined to one or several models.

[0062] According to another particular embodiment of the above method, the model(s) used in step (ii) lead to an overall predictability of at least 65% and a success rate of at least 70%. The performance of a model will depend on the representativity of the cohort on which it has been obtained and on the relevance of the strategy used to build the model. A person skilled in the art of statistics can easily calculate the overall predictability and success rate of a model and determine whether it satisfies the required predictability and success rate criteria.

[0063] According to another particular embodiment of the above method, the Probability score obtained in step (ii) is interpreted as clinically meaningful if it is higher than 75% (fixed threshold) and/or if it is concordant among the different Models used, always taking into account the antibiotic usage (known or unknown).

[0064] According to another aspect of the present invention, the above method is combined with another method for determining, from a feces sample from a RCC patient, whether said patient is likely to be a good responder to a treatment with an ICI, based on an animal model. Such a method was already described in a previous application from the inventors's team (WO2016/063263) and comprises the steps of (i) performing a fecal microbial transplantation (FMT) of a feces sample from the patient into germ free (GF) model animals (e.g., GF mice); (ii) at least 7 to 14 days after step (i), inoculating said mice with a transplantable tumor model; (iii) treating the inoculated mice with the ICI; and (iv) measuring the tumor size in the treated animals. The results of step (iv) are illustrative of the response that can be expected for said patient to said treatment. In case the result obtained with the animal differs from the NR or R status predicted by the model(s) (with a probability of X %), the result with the animal model will prevail in the clinician's conclusion.

[0065] When the individual's antibiotic regimen exposure during the last two months is unknown, the method according to the invention is preferably performed using, in step (i), a set of bacterial species that comprises at least 8 bacterial species selected from the group consisting of:

TABLE 2
Bacterial species preferably used to assess the R or NR status
(best outcome criterion) of a patient whose antibiotic regimen
exposure during the last two months is unknown.

| CAG number | Bacterial species |
|---|---|
| CAG00008 | Clostridium_bolteae_ATCC_BAA_613 |
| CAG00037 | Bacteroides_faecis_MAJ27 |
| CAG00063 | Barnesiella_viscericola_DSM_18177 |
| CAG00122 | Coprococcus_catus_GD_7 |
| CAG00140 | Subdoligranulum_sp_4_3_54A2FAA |
| CAG00243 | Lachnospiraceae_bacterium_1_1_57FAA |
| CAG00317 | Clostridium_sp_CAG_230 |
| CAG00327 | Faecalibacterium_sp_CAG_74 |
| CAG00357 | Bacteroides_ovatus_V975 |
| CAG00413 | Bacteroides_sp_CAG_144 |
| CAG00473 | Prevotella_sp_CAG_617 |
| CAG00610 | Hungatella_hathewayi_12489931 |
| CAG00650 | Dorea_formicigenerans_ATCC_27755 |
| CAG00727 | Eggerthella_lenta_DSM_2243 |
| CAG00928 | Acidiphilium_sp_CAG_727 |
| CAG01039 | Faecalibacterium_cf_prausnitzii_KLE1255 |
| CAG01141 | Holdemanella_biformis_DSM_3989 |
| CAG01144 | Lactobacillus_vaginalis_DSM_5837_ATCC_49540 |
| CAG01263 | Clostridium_clostridioforme_2_1_49FAA |

[0066] According to a preferred embodiment of the method for assessing the R or NR status (best outcome criterion) of a patient whose antibiotic regimen exposure during the last two months is unknown, one, two or three equations are used in step (ii), which correspond to models obtained for the following sets of bacterial species, identified by their CAG numbers:

TABLE 3
sets of bacteria used in Models 1.2, 2.2 and 3.2.

| set for model 1.2 | set for model 2.2 | set for model 3.2 |
|---|---|---|
| CAG00008 | CAG00727 | CAG00243 |
| CAG01039 | CAG01141 | CAG00473 |
| CAG00473 | CAG00650 | CAG00327 |
| CAG00140 | CAG00928 | CAG01039 |
| CAG00610 | CAG00473 | CAG00140 |
| CAG01141 | CAG00122 | CAG01263 |
| CAG00413 | CAG01144 | CAG00037 |
| CAG00317 | CAG00063 | CAG00357 |

[0067] According to a preferred embodiment of the above method, at least one equation used corresponds to a model obtained with a set of bacteria which are all present in the individual's sample. However, the models can be run even if a few bacteria are missing. In such a case, it is preferable to use at least two and preferably at least 3 equations in step (ii).

[0068] According to a particular embodiment of the above method based on Models 1.2, 2.2 and/or 3.2, illustrated in the experimental part below, the equations for calculating the probability that said individual responds to the treatment (P_{R}) are as follows:

$${P}_{R} = 1 / [ 1 + {exp}^{⩓} - ( {\sum }_{j = 1}^{8} {β}_{j} {X}_{j} ) ] \qquad [ B ]$$

wherein Xⱼ (j=1 to 8) are the relative abundances of the bacterial species measured in the individual's sample and βⱼ (j=1 to 8) are the following regression coefficients:

TABLE 4
Regression coefficients for Models 1.2, 2.2 and 3.2.

| Model 1.2 | | Model 2.2 | | Model 3.2 | |
|---|---|---|---|---|---|
| | R | | R | | R |
| bacterial | coeffi- | bacterial | coeffi- | bacterial | coeffi- |
| species | cients | species | cients | species | cients |
| CAG00008 | −1.0323 | CAG00727 | −1.0791 | CAG00243 | −1.1735 |
| CAG01039 | −1.084 | CAG01141 | −1.1164 | CAG00473 | −1.027 |
| CAG00473 | −0.9723 | CAG00650 | −1.2839 | CAG00327 | −0.9968 |
| CAG00140 | −0.9907 | CAG00928 | −1.1156 | CAG01039 | −1.0043 |
| CAG00610 | −0.6234 | CAG00473 | −1.014 | CAG00140 | −0.7456 |
| CAG01141 | −0.8468 | CAG00122 | −0.9394 | CAG01263 | −0.8736 |
| CAG00413 | 0.8994 | CAG01144 | −0.8085 | CAG00037 | 0.7032 |
| CAG00317 | 0.6041 | CAG00063 | −0.7679 | CAG00357 | −0.6073 |

[0069] Of course, these coefficients can be refined by the skilled in the art by performing the same strategies as those described in the present application starting from other clinical data (i.e., clinical data from another cohort in addition to or in replacement of the data used by the inventors), or even merely because the 10000 iterations employed in the logistic regression (see methods) ensure each time a weak ‘floating randomness’ of each coefficient, not surpassing the 0.2 units. The coefficients can also differ if a different technique is used for measuring the relative abundances of the bacterial species (e.g., using qPCR instead of MGS analysis). Importantly, even using different techniques, regression coefficients will retain their positive or negative sign, meaning the positive or negative contribution of a definite CAG species to the overall model.

[0070] In case the patient did not take any antibiotic during the last two months, the method according to the invention is preferably performed using, in step (i), a set of bacterial species that comprises at least 8 bacterial species selected from the group consisting of:

TABLE 5
Bacterial species preferably used to assess the R or
NR status (best outcome criterion) of a patient who
did not take antibiotics during the last two months.

| CAG number | Bacterial species |
|---|---|
| CAG00008 | Clostridium_bolteae_ATCC_BAA_613 |
| CAG00048_1 | Clostridium_sp_CAG_226 |
| CAG00140 | Subdoligranulum_sp_4_3_54A2FAA |
| CAG00243 | Lachnospiraceae_bacterium_1_1_57FAA |
| CAG00300 | Prevotella_sp_CAG_891 |
| CAG00327 | Faecalibacterium_sp_CAG_74 |
| CAG00413 | Bacteroides_sp_CAG_144 |
| CAG00473 | Prevotella_sp_CAG_617 |
| CAG00487 | Prevotella_sp_CAG_279 |
| CAG00650 | Dorea_formicigenerans_ATCC_27755 |
| CAG00698 | Ruminococcus_sp_CAG_177 |
| CAG00720 | Anaerotruncus_colihominis_DSM_17241 |
| CAG00727 | Eggerthella_lenta_DSM_2243 |
| CAG00766 | Firmicutes_bacterium_CAG_176 |
| CAG00897 | Firmicutes_bacterium_CAG_83 |
| CAG00963 | Clostridium_sp_CAG_524 |
| CAG01039 | Faecalibacterium_cf_prausnitzii_KLE1255 |
| CAG01141 | Holdemanella_biformis_DSM_3989 |
| CAG01208 | Coprococcus_catus_GD_7 |

[0071] According to a preferred embodiment of the method for assessing the R or NR status (best outcome criterion) of a patient who did not take antibiotics during the last two months, one, two or three equations are used in step (ii), each of which corresponding to a model obtained for the following sets of bacterial species, identified by their CAG numbers:

TABLE 6
Sets of bacteria used in Models 4.2, 5.2 and 6.2.

| set for model 4.2 | set for model 5.2 | set for model 6.2 |
|---|---|---|
| CAG00008 | CAG00048_1 | CAG00243 |
| CAG01039 | CAG00300 | CAG00008 |
| CAG00473 | CAG00473 | CAG00698 |
| CAG00487 | CAG00650 | CAG00473 |
| CAG00140 | CAG00720 | CAG00327 |
| CAG01141 | CAG00727 | CAG01039 |
| CAG01208 | CAG00963 | CAG00897 |
| CAG00413 | CAG01141 | CAG00766 |

[0072] According to a preferred embodiment of the above method, at least one equation used corresponds to a model obtained with a set of bacteria which are all present in the individual's sample. However, the models can be run even if a few bacteria are missing. In such a case, it is preferable to use at least two and preferably at least 3 equations in step (ii).

[0073] According to a particular embodiment of the above method based on Models 4.2, 5.2 and/or 6.2, illustrated in the experimental part below, the equations for calculating the probability that said individual resists (P_{NR}) or responds (P_{R}) to the treatment are as follows:

$$\begin{matrix}{P}_{N R} = 1 / [ 1 + {exp}^{⩓} - ( {\sum }_{j = 1}^{8} {β}_{j} {X}_{j} ) ] for models 4.2 and 5.2 & [ A ] \\ {P}_{R} = 1 / [ 1 + {exp}^{⩓} - ( {\sum }_{j = 1}^{8} {β}_{j} {X}_{j} ) ] for model 6.2 & [ B ]\end{matrix}$$

wherein Xⱼ (j=1 to 8) are the relative abundances of the bacterial species measured in the individual's sample and βⱼ (j=1 to 8) are the following regression coefficients:

TABLE 7
Regression coefficients for Models 4.2, 5.2 and 6.2.

| Model 4.2 | | Model 5.2 | | Model 6.2 | |
|---|---|---|---|---|---|
| | NR | | NR | | R |
| bacterial | coeffi- | bacterial | coeffi- | bacterial | coeffi- |
| species | cients | species | cients | species | cients |
| CAG00008 | 0.955 | CAG00048_1 | 0.7112 | CAG00243 | −1.2907 |
| CAG01039 | 0.8761 | CAG00300 | 0.8931 | CAG00008 | −0.8848 |
| CAG00473 | 0.9951 | CAG00473 | 1.0042 | CAG00698 | −0.9776 |
| CAG00487 | 0.7609 | CAG00650 | 1.1282 | CAG00473 | −0.9997 |
| CAG00140 | 1.1107 | CAG00720 | 1.2569 | CAG00327 | −1.0697 |
| CAG01141 | 0.9402 | CAG00727 | 1.2397 | CAG01039 | −0.7806 |
| CAG01208 | 0.7187 | CAG00963 | 0.7595 | CAG00897 | −0.8376 |
| CAG00413 | −0.5812 | CAG01141 | 1.0235 | CAG00766 | −0.7459 |

[0074] As mentioned above, these coefficients can be refined for several reasons or even changed if a different technique is used for measuring the relative abundances of the bacterial species (e.g., using qPCR instead of MGS analysis).

[0075] The models 1.2, 2.2, 3.2, 4.2, 5.2 and 6.2 above have been obtained using a criterion of best outcome. Patients who first responded to the treatment but relapsed a few months later were thus considered as responders. In order to assess if an individual is likely to have a long-term benefit from the treatment, defined as a time to progression (TTP) of at least 6 months, the inventors obtained additional models by considering only the stable diseases of more than 6 months (SD>6 months) among responders (OUTCOME_2 in the experimental part). These models are based on partly different subsets of the microbiota composition.

[0076] For assessing whether an individual whose antibiotic regimen exposure during the last two months is unknown is likely to have a long-term benefit from a treatment with an anti-PD1/PD-L1/PD-L2 Ab-based therapy, the method according to the invention is preferably performed using, in step (i), a set of bacterial species that comprises at least 8 bacterial species selected from the group consisting of:

TABLE 8
Bacterial species preferably used to assess the R or NR status
(TTP >6 months criterion) of a patient whose antibiotic
regimen exposure during the last two months is unknown.

| CAG number | Bacterial species |
|---|---|
| CAG00013 | Clostridiales_bacterium_1_7_47FAA |
| CAG00211 | Firmicutes_bacterium_CAG_227 |
| CAG00474 | Sutterella_wadsworthensis_2_1_59BFAA |
| CAG00557 | Ruminococcus_callidus_ATCC_27760 |
| CAG00601 | uncultured_Faecalibacterium_sp_{—} |
| CAG00607 | Eubacterium_sp_CAG_251 |
| CAG00624 | Firmicutes_bacterium_CAG_552 |
| CAG00650 | Dorea_formicigenerans_ATCC_27755 |
| CAG00668 | Azospirillum_sp_CAG_239 |
| CAG00669 | Firmicutes_bacterium_CAG_103 |
| CAG00676 | Firmicutes_bacterium_CAG_176 |
| CAG00771 | Clostridium_sp_CAG_413 |
| CAG00782 | Eubacterium_rectale_CAG_36 |
| CAG00861 | Oscillibacter_sp_CAG_241 |
| CAG00873 | Butyricimonas_virosa_DSM_23226 |
| CAG00880 | Subdoligranulum_sp_CAG_314 |
| CAG00886 | Sutterella_sp_CAG_351 |
| CAG00889 | Megasphaera_elsdenii_14_14 |
| CAG00937 | Clostridium_sp_CAG_7 |
| CAG01141 | Holdemanella_biformis_DSM_3989 |
| CAG01197 | Dialister_succinatiphilus_YIT_11850 |
| CAG01321 | Faecalibacterium_prausnitzii_SL3_3 |

[0077] According to a preferred embodiment of the method for assessing the R or NR status (TTP>6months criterion) of a patient whose antibiotic regimen exposure during the last two months is unknown, one, two or three equations are used in step (ii), which correspond to models obtained for the following sets of bacterial species, identified by their CAG numbers:

TABLE 9
Sets of bacteria used in Models 7.2, 8.2 and 9.2.

| set for model 7.2 | set for model 8.2 | set for model 9.2 |
|---|---|---|
| CAG00782 | CAG00211 | CAG00557 |
| CAG00013 | CAG00474 | CAG00601 |
| CAG00873 | CAG00624 | CAG00607 |
| CAG01141 | CAG00650 | CAG00669 |
| CAG00668 | CAG00676 | CAG00861 |
| CAG00669 | CAG00771 | CAG00880 |
| CAG00886 | CAG01197 | CAG00937 |
| CAG00889 | CAG01321 | CAG01321 |

[0078] According to a preferred embodiment of the above method, at least one equation used in step (ii) corresponds to a model obtained with a set of bacteria which are all present in the individual's sample. However, the models can be run even if a few bacteria are missing. In such a case, it is preferable to use at least two and preferably at least 3 equations in step (ii).

[0079] According to a particular embodiment of the above method based on Models 7.2, 8.2 and/or 9.2, illustrated in the experimental part below, the equations for calculating the probability that said individual resists (P_{NR}) to the treatment are as follows:

$${P}_{N R} = 1 / [ 1 + {exp}^{⩓} - ( {\sum }_{j = 1}^{8} {β}_{j} {X}_{j} ) ] \qquad [ A ]$$

wherein Xⱼ (j=1 to 8) are the relative abundances of the bacterial species measured in the individual's sample and βⱼ (j=1 to 8) are the following regression coefficients:

TABLE 10
Regression coefficients for Models 7.2, 8.2 and 9.2.

| Model 7.2 | | Model 8.2 | | Model 9.2 | |
|---|---|---|---|---|---|
| | NR | | NR | | NR |
| bacterial | coeffi- | bacterial | coeffi- | bacterial | coeffi- |
| species | cients | species | cients | species | cients |
| CAG00782 | −0.2034 | CAG00211 | 0.6422 | CAG00557 | 0.9341 |
| CAG00013 | 0.4092 | CAG00474 | −1.0581 | CAG00601 | 0.8927 |
| CAG00873 | 0.2708 | CAG00624 | −0.8984 | CAG00607 | 0.7108 |
| CAG01141 | 0.7665 | CAG00650 | 1.3189 | CAG00669 | −1.2341 |
| CAG00668 | −0.5899 | CAG00676 | −0.7324 | CAG00861 | 1.0379 |
| CAG00669 | −0.5181 | CAG00771 | −0.6623 | CAG00880 | −1.0016 |
| CAG00886 | −0.8415 | CAG01197 | −1.1372 | CAG00937 | −0.872 |
| CAG00889 | −0.7339 | CAG01321 | −0.8525 | CAG01321 | −0.8362 |

[0080] As already mentioned, these coefficients can be refined for several reasons or even changed if a different technique is used for measuring the relative abundances of the bacterial species.

[0081] In case the patient did not take any antibiotic during the last two months, the method according to the invention for assessing his/her probability of having a long-term benefit (TTP>6 months) from a treatment with an anti-PD1/PD-L1/PD-L2 Ab-based therapy is preferably performed using, in step (i), a set of bacterial species that comprises at least 8 bacterial species selected from the group consisting of:

TABLE 11
Bacterial species preferably used to assess the R
or NR status (best outcome criterion) of a patient who
did not take antibiotics during the last two months.

| CAG number | Bacterial species |
|---|---|
| CAG00013 | Clostridiales_bacterium_1_7_47FAA |
| CAG00142 | Bacteroides_stercoris_ATCC_43183 |
| CAG00218 | Bacteroides_sp_CAG__20 |
| CAG00341 | Eubacterium_sp_CAG_115 |
| CAG00346 | Eubacterium_rectale_M104_1 |
| CAG00474 | Sutterella_wadsworthensis_2_1_59BFAA |
| CAG00508 | Alistipes_obesi |
| CAG00530 | Prevotella_sp_CAG_617 |
| CAG00580 | Clostridium_sp_CAG_62 |
| CAG00601 | uncultured_Faecalibacterium_sp_ |
| CAG00607 | Eubacterium_sp_CAG_251 |
| CAG00646 | Alistipes_sp_CAG_268 |
| CAG00668 | Azospirillum_sp_CAG_239 |
| CAG00669 | Firmicutes_bacterium_CAG_103 |
| CAG00713 | Firmicutes_bacterium_CAG_270 |
| CAG00873 | Butyricimonas_virosa_DSM_23226 |
| CAG00880 | Subdoligranulum_sp_CAG_314 |
| CAG00886 | Sutterella_sp_CAG_351 |
| CAG00889 | Megasphaera_elsdenii_14_14 |
| CAG00919 | Clostridium_methylpentosum_DSM_5476 |
| CAG01141 | Holdemanella_biformis_DSM_3989 |
| CAG01158 | Pseudoflavonifractor_capillosus_ATCC_29799 |
| CAG01263 | Clostridium_clostridioforme_2_1_49FAA |
| CAG01321 | Faecalibacterium_prausnitzii_SL3_3 |

[0082] According to a preferred embodiment of the method for assessing the R or NR status (TTP>6 months criterion) of a patient who did not take antibiotics during the last two months, one, two or three equations are used in step (ii), each of which corresponding to a model obtained for the following sets of bacterial species, identified by their CAG numbers:

TABLE 12
Sets of bacterial species for Models 10.2, 11.2 and 12.2.

| set for model 10.2 | set for model 11.2 | set for model 12.2 |
|---|---|---|
| CAG00580 | CAG00346 | CAG00142 |
| CAG00013 | CAG00530 | CAG00218 |
| CAG00873 | CAG00601 | CAG00341 |
| CAG01141 | CAG00607 | CAG00474 |
| CAG00668 | CAG00646 | CAG00508 |
| CAG00669 | CAG00713 | CAG00880 |
| CAG00886 | CAG00919 | CAG01263 |
| CAG00889 | CAG01158 | CAG01321 |

[0083] According to a preferred embodiment of the above method, at least one equation used in step (ii) corresponds to a model obtained with a set of bacteria which are all present in the individual's sample. However, the models can be run even if a few bacteria are missing. In such a case, it is preferable to use at least two and preferably at least 3 equations in step (ii).

[0084] According to a particular embodiment of the above method based on Models 10.2, 11.2 and/or 12.2, illustrated in the experimental part below, the equations for calculating the probability that said individual resists to the treatment (P_{NR}) or responds (P_{R}) are as follows:

$$\begin{matrix}{P}_{N R} = 1 / [ 1 + {exp}^{⩓} - ( {\sum }_{j = 1}^{8} {β}_{j} {X}_{j} ) ] for model 12.2 & [ A ] \\ {P}_{R} = 1 / [ 1 + {exp}^{⩓} - ( {\sum }_{j = 1}^{8} {β}_{j} {X}_{i} ) ] for models 10.2 and 11.2 & [ B ]\end{matrix}$$

[0085] wherein Xⱼ (j=1 to 8) are the relative abundances of the bacterial species measured in the individual's sample and βⱼ (j=1 to 8) are the following regression coefficients:

TABLE 13
Regressions coefficients for Models 10.2, 11.2 and 12.2.

| Mode 10.2 | | Mode 11.2 | | Model 12.2 | |
|---|---|---|---|---|---|
| | R | | R | | NR |
| bacterial | coeffi- | bacterial | coeffi- | bacterial | coeffi- |
| species | cients | species | cients | species | cients |
| CAG00580 | −0.1456 | CAG00346 | −0.8463 | CAG00142 | 1.138 |
| CAG00013 | −0.5496 | CAG00530 | 1.13 | CAG00218 | 1.1396 |
| CAG00873 | −0.4646 | CAG00601 | −1.183 | CAG00341 | −1.0166 |
| CAG01141 | −0.5496 | CAG00607 | −0.9544 | CAG00474 | −0.8403 |
| CAG00668 | 0.5684 | CAG00646 | 0.8929 | CAG00508 | −0.7067 |
| CAG00669 | 0.5129 | CAG00713 | 1.0919 | CAG00880 | −1.185 |
| CAG00886 | 0.6623 | CAG00919 | 0.4881 | CAG01263 | 0.8466 |
| CAG00889 | 0.7102 | CAG01158 | 1.1606 | CAG01321 | −0.8895 |

[0086] As for the other models, these coefficients can be refined for several reasons or even changed if a different technique is used for measuring the relative abundances of the bacterial species.

[0087] According to a particular embodiment of the method of the invention, the fecal sample is obtained before the first administration of any ICI, such as an anti-PD1/PD-L1/PD-L2 antibody.

[0088] According to another particular embodiment, the individual already received a first-line therapy different from PD1/PD-L1/PD-L2 Ab-based therapies for treating his/her RCC. The method of the invention is however not limited to patients receiving a PD1/PD-L1/PD-L2 Ab-based therapy as a second line therapy, and the presently disclosed methods can also be used to assess the responder or non-responder status of RCC patients receiving a first-line PD1/PD-L1/PD-L2 Ab-based therapy either alone or in combination with other antineoplastic drugs (chemotherapy or another ICI such as anti-CTLA-4, as specified above).

[0089] According to another particular embodiment, the anti-PD1/PD-L1/PD-L2 Ab-based therapy administered to the patient is a treatment with an anti-PD1 antibody such as nivolumab or pembrolizumab or an anti-PD-L1 antibody such as atezolizumab or durvalumab, for example.

[0090] According to another of its aspects, the present invention pertains to a theranostic method for determining if a cancer patient needs a bacterial compensation before administration of an anti-PD1/PD-L1/PD-L2 Ab-based therapy and/or during this therapy, comprising assessing, by a method as above-disclosed, whether the patient is likely to be a good responder to such a therapy, wherein if the patient is not identified as likely to be a good responder, the patient needs a bacterial compensation.

[0091] According to this aspect of the invention, the bacterial compensation can be done either by fecal microbiota transplant (FMT), using microbiota from one or several donors (for example, from responders to the treatment), possibly enriched with bacterial strains known to be beneficial in this situation, or by administration of a bacterial composition. The inventors already described bacterial compositions that can be used for such a compensation and restore the ability, for the patient, to respond to the treatment (e.g., in WO 2016/063263 and in WO 2018/115519). Non-limitative examples of bacterial strains which can be beneficial to patients with an initial NR status are: Enterococcus hirae, Akkermansia muciniphila, Blautia strains, Coprococcus comes strains, Alistipes shahii, other Alistipes species (e.g. Alistipes indistinctus and/or onderdonkii and/or finegoldii), Ruminococcacae, Clostridiales species, Bacteroidales species, Actinobacteria, Coriobacteriales species, Methanobrevibacter Burkholderia cepacia, Bacteroides fragilis, Actinotignum schaalii, as well as the following additional bacteria:
[0092] Clostridiales bacteria of the species Christensenella minuta;
[0093] Erysipelotrichia of the species Dielma fastidiosa or Erysipelatoclostridium ramosum;
[0094] Eubacterium limosum;
[0095] Bacteroidales bacteria of the species Bacteroides salyersiae and/or Bamesiella intestinihominis;
[0096] Coriobacteriales bacteria of the species Coffinsella intestinalis and/or Collinsella tanakaei;
[0097] Firmicutes bacteria of the species Flavonifractor plautii.

[0098] Examples of compositions which can be beneficial to a patient with an initial NR status assessed by the method according to the invention are:
[0099] a composition comprising:
   [0100] (i) Enterococcus hirae selected from the group consisting of Enterococcus hirae strain 13144 deposited on Nov. 7, 2013 at the Collection Nationale de Cultures de Microorganismes (CNCM) under the number I-4815, Enterococcus hirae strain IGR7 deposited on Aug. 31, 2017 at the CNCM under the number I-5224, Enterococcus hirae strain IGR4 deposited on Nov. 27, 2017 at the CNCM under the number CNCM I-5260, Enterococcus hirae strain IGR11 deposited on Nov. 27, 2017 at the CNCM under the number CNCM I-5261 and mixtures thereof; and
   [0101] (ii) Akkermansia muciniphila selected from the group consisting of Akkermansia muciniphila strains p2261 and p3415, both deposited at the Collection de souches de I′Unité des Rickettsies (CSUR) and mixtures thereof; and
   [0102] (iii) Eubacterium limosum.
[0103] a composition comprising:
   [0104] (i) Enterococcus hirae selected from the group consisting of Enterococcus hirae strain 13144 deposited on Nov. 7, 2013 at the Collection Nationale de Cultures de Microorganismes (CNCM) under the number I-4815, Enterococcus hirae strain IGR7 deposited on Aug. 31, 2017 at the CNCM under the number 1-5224, Enterococcus hirae strain IGR4 deposited on Nov. 27, 2017 at the CNCM under the number CNCM I-5260, Enterococcus hirae strain IGR11 deposited on Nov. 27, 2017 at the CNCM under the number CNCM I-5261 and mixtures thereof; and
   [0105] (ii) Barnesiella intestinihominis.
[0106] a composition comprising:
   [0107] (i) Enterococcus hirae selected from the group consisting of Enterococcus hirae strain 13144 deposited on Nov. 7, 2013 at the Collection Nationale de Cultures de Microorganismes (CNCM) under the number I-4815, Enterococcus hirae strain IGR7 deposited on Aug. 31, 2017 at the CNCM under the number I-5224, Enterococcus hirae strain IGR4 deposited on Nov. 27, 2017 at the CNCM under the number CNCM I-5260, Enterococcus hirae strain IGR11 deposited on Nov. 27, 2017 at the CNCM under the number CNCM I-5261 and mixtures thereof; and
   [0108] (ii) Christensenella minuta.
[0109] a composition comprising:
   [0110] (i) Enterococcus hirae selected from the group consisting of Enterococcus hirae strain 13144 deposited on Nov. 7, 2013 at the Collection Nationale de Cultures de Microorganismes (CNCM) under the number 1-4815, Enterococcus hirae strain IGR7 deposited on Aug. 31, 2017 at the CNCM under the number 1-5224, Enterococcus hirae strain IGR4 deposited on Nov. 27, 2017 at the CNCM under the number CNCM I-5260, Enterococcus hirae strain IGR11 deposited on Nov. 27, 2017 at the CNCM under the number CNCM I-5261 and mixtures thereof; and
[0111] (ii) Actinotignum schaalii.

[0112] A nucleic acid microarray designed to perform the method according to the invention is also part of the present invention. Such a nucleic acid microarray comprises nucleic acid probes specific for each of the microorganism species to be detected in step (i) of said method (i.e., at least 8 species selected amongst those recited in Table 1). In a specific embodiment, the nucleic acid microarray is an oligonucleotide microarray comprising at least one oligonucleotide specific for at least one sequence selected from SEQ ID NOs: 1-2950. For example, the said microarray comprises at least 8 oligonucleotides, each oligonucleotide being specific for one sequence of a distinct species recited in table 1. The microarray of the invention can of course comprise more oligonucleotides specific for sequences of SEQ ID NOs: 1-2950, for example at least nx96 oligonucleotides, divided into 12 sets of nx8 oligonucleotides corresponding to the 12 models described herein, with n being an integer comprised between 1 and 25 which corresponds to the number of oligonucleotides used to specifically assess the presence of one specific bacterial species. The microarray according to the invention may further comprise at least one oligonucleotide for detecting at least one gene of at least one control bacterial species. A convenient bacterial species may be e.g. a bacterial species the abundance of which does not vary between individuals having a R or a NR status. Preferably, the oligonucleotides are about 50 bases in length. Suitable microarray oligonucleotides specific for any gene of SEQ ID NOs: 1-2950 may be designed, based on the genomic sequence of each gene, using any method of microarray oligonucleotide design known in the art. In particular, any available software developed for the design of microarray oligonucleotides may be used, such as, for instance, the OligoArray software, the GoArrays software, the Array Designer software, the Primer3 software, or the Promide software, all known by the skilled in the art.

[0113] As mentioned above, the relative abundance of the recited bacterial species can be measured by techniques different from the metagenomics analysis used herein, especially when the skilled in the art knows which bacterial species are to be measured. A particular technique which can be used to this purpose is qPCR (quantitative PCR). The PCR-based techniques are performed with amplification primers designed to be specific for the sequences which are measured. The present invention hence also pertains to a set of primers suitable for performing the above method, i.e., a set of primers comprising primer pairs for amplifying sequences specific for each of the microorganism species to be detected in step (i) of said method (i.e., at least 8 species selected amongst those recited in Table 1). Such a set of primers comprises a minimum of 16 primers, but it can comprise more primers, for example 30, 40, 50, 60, 70, 80, 100, 200, 300, 500, 1000, 2000 or more. According to a particular embodiment, the set of primers comprises at least one primer pair specifically amplifying part of a sequence selected amongst SEQ ID Nos: 1-2950. Of course, primer sets according to the invention can advantageously comprise 2, 3, 4, 5, 10, 20, 30, 40, 50, 60, 70, 80, 100, 200, 300, 500, 1000 or more pairs of primers each specifically amplifying part of a sequence selected amongst SEQ ID Nos: 1-2950.

[0114] Other characteristics of the invention will also become apparent in the course of the description which follows of the biological assays which have been performed in the framework of the invention and which provide it with the required experimental support, without limiting its scope.

### EXAMPLES

### Materials and Methods

[0115] Metagenomic Analysis of Stool Samples

[0116] Quantitative metagenomics pipeline developed at MetaGenoPolis (Jouy-en-Josas, France) was employed to reach the species-level description of RCC gut microbiota. DNA was extracted from 69 stool samples through an automated platform (SAMBO, MetaGenoPolis) and subjected to shotgun sequencing using Ion Proton sequencer to reach >20 million short DNA sequence reads (MetaQuant platform, MetaGenoPolis). Reads were filtered (Q>25) and cleaned to eliminate possible contaminants as human reads. The high-quality (HQ) reads were then mapped against the MetaHIT hs_9.9 M genes catalogue and counted through a two-step procedure: 1) using uniquely mapped reads; 2) attributing shared reads according to their mapping ratio based on unique reads. Identity threshold for mapping was set at >95%, in order to overcome gene allelic variants and the non-redundant nature of the catalogue itself. HQ reads were downsized at 13 millions for each sample in order to correct for sequencing depth, then normalized through RPKM (reads per kilo base per million mapped reads) method. A profile matrix of gene frequencies was thus obtained, and used as an input file for MetaOMineR, a suite of R packages developed at MetaGenoPolis.

[0117] In order to achieve the species-level description of microbes in RCC stool samples, the hs_9.9 M catalogue was clustered into 1436 MetaGenomic Species (MGS), roughly >500 genes that covary in abundance among hundreds of samples, ultimately belonging to the same microbial species. The taxonomical annotation of MGS was performed using gene homology with previously sequenced organisms using BLASTn against nt and wgs NCBI databases. After taxonomical assignment of each MGS, a matrix of frequency profiles of 50 co-abundant genes (CAG) was built using normalized MGS mean signals, thus the sum of each MGS within a sample resulted equal to 1. With this approach each species was assigned to a definite CAG number.

[0118] Statistical Analysis

[0119] Multivariate statistics were employed on the matrix of frequency profiles in order to describe the gut microbial composition and diversity. Python 2.7 and related statistical/graphical libraries (Matplotlib, Scikit learn, Pandas, Numpy) were used to compare all MGS through pairwise analysis, linear discriminant analysis effect size (LEfSe) and volcano plots. A P value less than or equal to 0.05 was considered statistically significant. Volcano plots were generated computing for each bacterial species: i) the log 2 of fold ratio (FR) among the mean relative abundances of R versus NR (x axis) and ii) the co-log 10 of P values deriving from Mann-Whitney U test calculated on relative abundances in absolute values (y axis). In order to ease the volcano graphical representation, at TTP6 the chosen P value was less than or equal to 0.7. LEfSe plots were generated with Python 2.7 on output files derived from LEfSe pipeline, and all species with LDA score 2 were considered for subsequent analysis.

[0120] Building the Predictive Models

[0121] A double strategy was implemented to select the bacterial species used to build the models.

[0122] The first one (“human-oriented”) relies on: i) performing Receiver Operating Characteristic (ROC) curves implementing Support Vector Machine (SVM) classifier on all possible combinations of bacterial species, looking for consortia giving the best Area Under Curve (AUC) values; ii) building a logistic regression classifier and a RFECV (recursive feature elimination with cross-validation) feature selection with selected bacterial species; iii) performing metrics as ROC curves and confusion matrices using the train/test subsets deriving from the original dataset.

[0123] The second strategy (“machine-learning”) relies on: i) building a logistic regression classifier and a RFECV feature selection on all bacterial species (without permutation), selecting the ones with higher ranking (equal to 1); ii) performing a new feature selection by means of RFE (recursive feature elimination), selecting the 8 species with highest ranking; iii) re-building a new logistic regression classifier plus RFECV feature selection on the 8 selected bacterial species; iv) performing metrics as ROC curves and confusion matrices using the train/test subsets deriving from the original dataset.

[0124] The main difference among the first and the second strategies is that the first one allows combinations of all the bacterial species present in the original dataset selecting sub-groups of them (called ‘consortia’) based on the highest AUC, while the second one would be able to select single species due to the natural convergence of the logistic regression model to select all the variables in order to reach the maximum predictability.

[0125] The implementations for building the logistic regression classifier and the feature selection models were made in Python (version 2.7) using the methods ‘logisticRegression’, ‘RFE’ and ‘RFECV’ from the Scikit Learn module (version 0.19.1). The implementation for building the SVM classifier (C-Support Vector Classification) was made in Python (version 2.7) using the method SVC from the Scikit Learn module (version 0.19.1). The implementation of combinations for ROC curves in the first strategy was made in Python (version 2.7) using the method ‘combinations’ from the Itertools' module present as a built-in in Python 2.7.

[0126] Logistic regression coefficients β were calculated by logistic regression classifier with the following requirements: a constant (also known as intercept) not added to the decision function; a max iteration equal to 10000; a liblinear solver (with L2 penalization). RFECV feature selection model (step=1, cross-validation equal to 3, scoring accuracy) was implemented in Python with logistic regression estimator (no intercept, 10000 max iteration, liblinear solver), providing rankings within the interval [1: (n_{species}-1)], and it was used to make a recursive feature selection on all bacterial species, selecting only those species having a rank equal to 1. RFE feature selection model (step=1, feature to select=8) was similarly implemented in Python with the same estimator (logistic regression, no intercept, 10000 max iteration, liblinear solver) of RFECV.

[0127] Receiver Operating Characteristic (ROC) curves were built with Python 2.7 using the SVM classifier (linear kernel) and employed to assess the actual predictive meaning of selected bacterial species or consortia. Two different approaches were used to achieve such a selection: 1) species retrieved from LEfSe analysis (with LDA score 2) and combined within all possible combinations (2×2, 3×3, 4×4, 5×5, etc. . . . ) and 2) all species were considered and the first 5 having the best AUC were combined into a consortium. Area Under Curve (AUC), specificity and sensitivity were computed for each best combination, and reported as ROC curve and tabular data. A 5-fold cross-validation was used, with no added noise. Mean relative abundances (±Standard Error of the Mean), Fold Ratio (FR), Log 10 of FR and P value of cohort comparison (R vs NR, non-parametric Mann-Whitney U test) were also reported.

[0128] According to the aforementioned methods, bacterial species were chosen in the following manner: i) for the first strategy, taking into account all the combinations for all available species, and especially those derived from LEfSe, we selected the ‘consortium’ for each OUTCOME_1, OUTCOME_2, TTP3 and TTP6 timepoints having the highest AUC value, both for NR and R status; ii) for the second strategy, we selected the bacterial species having a RFECV and then RFE rank equal to 1, regardless negative and positive logistic regression coefficients (β), for OUTCOME_1 and OUTCOME_2.

[0129] Taking into account the two aforementioned strategies, a logistic regression classifier was implemented, for both of them, on standardized raw data (removing the mean and scaling to unit variance) in order to calculate regression coefficients (β) to be used in equation [2]. Thus, the relative contribution of each selected bacterial species to each model was weighted by the β coefficient and put into the equation [2] in order to predict through equation [1] the estimation (in probability percentage) of the outcome for a definite new subject.

P=1/(1+exp\hat{ }−z) [1]

and

z=β1*x1+ . . . +βn*xn [2]

[0130] For both strategies, two feature selection models (RFECV and then RFE) model were implemented to refine the number of selected species at 8, a number useful to be implemented in future and forthcoming diagnostic kits for clinical practical use. Evaluation of the final Models (built on three different sets of 8 bacterial species) was performed through metrics as ROC curves and confusion matrices using t train/test subsets of the original dataset (implemented in Python 2.7 and Scikit learn 0.19, through the train_test_split method).

[0131] For OUTCOME_1, taking into account all the aforementioned embodiments, methods and strategies, and taking into account the dichotomous/complementary nature of logistic regression classifier, in the present invention we propose four equations ([3], [4], [6], [7]) to predict the NR or R status of a definite new subject JD. Two of them ([3], [4]) take into account the eventuality of an unknown antibiotic regimen/treatment status, while the other two ([6], [7]) consider that the individual did not take antibiotics during the past two months.

[0132] In order to circumvent the caveats deriving from the natural sources of variability within the subjects' cohort (feces sampling, feces consistencies, sample storage, sequencing biases, etc. . . . ) that could affect relative abundances of under-represented bacterial species, the inventors built two further equations ([5], [8]) based solely on the species having an average relative abundance greater than or equal to 0.001 if expressed in the interval [0:1] (or 0.1% if expressed in the interval [0:100]) for subjects with unknown antibiotic treatment ([5]) and for subjects who did not take antibiotics during the last two months prior sampling ([8]) These pattern of species underwent the second strategy of modeling as described above.

[0133] For OUTCOME_2, taking into account all the aforementioned embodiments, methods and strategies, and taking into account the dichotomous/complementary nature of logistic regression classifier, in the present invention we propose four equations ([9], [10], [12], [13]) to predict the NR or R status of a definite new subject JD. Two of them ([9], [10]) take into account the eventuality of an unknown antibiotic regimen/treatment status, while the other two ([12], [13]) consider that the individual did not take antibiotics during the past two months.

[0134] In order to circumvent the caveats deriving from the natural sources of variability within the subjects' cohort (feces sampling, feces consistencies, sample storage, sequencing biases, etc. . . . ) that could affect relative abundances of under-represented bacterial species, the inventors built two further equations ([11], [14]) based solely on the species having an average relative abundance greater than or equal to 0.001 if expressed in the interval [0:1] (or 0.1% if expressed in the interval [0:100]) for subjects with unknown antibiotic treatment ([11]) and for subjects who did not take antibiotics during the last two months prior sampling ([14]) These pattern of species underwent the second strategy of modeling as described above.

### Example 1: Metagenomics-Based GOMS Associated with Clinical Outcome According to RECIST 1.1 Criteria (FIG. 1)

[0135] We explored the composition of the gut microbiota using quantitative metagenomics by shotgun sequencing, reaching >20 million short DNA sequence reads per sample followed by analysis of the results in a 9.9 million-gene reference catalogue (J. Li, Nat. Biotechnol. 32, 834-841 (2014). Total DNA was extracted from 69 patients diagnosed with RCC prior to starting therapy (Table 1). Among the 69 RCC patients, 58 did not take ATB, while 11 had been prescribed ATB before the MG analyses. As reported in Materials and Methods, each metagenomic species (MGS) was assigned to a definite co-abundant gene profile (CAG), and the subsequent taxonomical annotation was performed based on gene homology to previously sequenced organisms (using blastN against the nt and WGS databanks). R (responders) were defined as those patients exhibiting a complete or partial or stable disease >3 months, while NR (non responders) were defined as harbouring a progressive disease

TABLE 14
Patients' characteristics. The clinical parameters relevant for
the 69 RCC included in this study are described in this table (gender,
age, antibiotics, disease status at diagnosis, responses, follow up).

| | | Total (n = 69) | |
|---|---|---|---|
| | | absolute numbers (%) | |
| Age-yr | Median | 62 | |
| | Range | 30-82 | |
| Age-yr-no.(%) | <65 | 40 | (58) |
| | ≥65 <75 | 22 | (32) |
| | ≥75 | 7 | (10) |
| Gender-no.(%) | Male | 48 | (69) |
| | female | 21 | (31) |
| Histology-no.(%) | Clear cell | 57 | (97) |
| | Non-clear cell | 2 | (3) |
| Nephrectomyy-no.(%) | Yes | 63 | (91) |
| | Mo | 6 | (9) |
| IMDC risk group-no.(%) | Good | 14 | (20) |
| | Intermediate | 39 | (57) |
| | Poor | 14 | (20) |
| | Unknown | 2 | (3) |
| Number of prior | <2 | 55 | (80) |
| treatments-no.(%) | ≥3 | 14 | (20) |
| ATB-no.(%) | Yes | 11 | (16) |
| | No | 58 | (84) |

IMDC, International Metastatic Renal Cell Carcinoma Database Consortium (includes: Karnofsky performance status, time from diagnosis to treatment, hemoglobin, serum calcium concentration, neutrophil and platelet counts);
ATB, Antibiotics

[0136] When segregating responders (R) from non-responders (NR) in all 69 patients (according to the best clinical response as assessed by RECIST1.1), we failed to observe significant differences with a FDR of 10%.

[0137] GAMS Associated with Worse Clinical Outcome

[0138] However, the best predictive model allowing to identify the “resistant” patients with AUC value of 0.882, a specificity of 0.778 (true positive cases) and a sensitivity (false positive cases) of 0.860 was obtained when considering LEfSe combination species, and the commensals retained in the model, that were increased in NR (“bad bacteria”) were:
[0139] Clostridium boltae ATCC BAA 613 (fold increase 13)
[0140] Faecalibacterium prausnitzii KLE1255-3 (fold increase 4.4)
[0141] Prevotella sp CAG617 (detectable only in NR)
[0142] Prevotella copri CAG164 (detectable only in NR)
[0143] Subdoligranulum sp 4_3_54A2FAA (fold increase 2.6)
[0144] while those that were decreased in NR (“good bacteria”) were:
[0145] Bacteroides sp CAG 144 (decreased by 62 fold)
[0146] Acinetobacter CAG196 (decreased by 3.4 fold)
[0147] Eubacterium sp CAG38 (decreased by 2.3 fold)

[0148] The cut-off values correspond to the means±SEM featuring in Table 2. We kept only those species having a p value <0.05 for the final model, and claim the equilibrium between good and bad bacteria for the best outcome in this patent.

[0149] When segregating responders (R) from non-responders (NR) in ROC who did not take ATB (according to the best clinical response as assessed by RECIST1.1), we failed to observe significant differences with a FDR p value <0.05.

[0150] However, the best predictive model allowing to identify the “resistant” patients with AUC value of 0.879, a specificity of 0.707 (true positive cases) and a sensitivity (false positive cases) of 0.950 was obtained when considering LEfSe combination species, and the commensals retained in the model that were increased in NR (“bad bacteria”) were:
[0151] Clostridium boltae ATCC BAA 613 (fold increase 15.7)
[0152] Prevotella sp CAG617 (detectable only in NR)
[0153] while those that were decreased in NR (“good bacteria”) were:
[0154] Bacteroides sp CAG 144 (decreased by 50 fold)
[0155] Eubacterium sp CAG115 (decreased by 47 fold)
[0156] Eubacterium siraeum sp CAGBO (decreased by 14 fold)
[0157] Firmicutes bacterium sp. CAG651 (decreased by 1.9 fold)

[0158] The cut-off values correspond to the means±SEM featuring in Table 15. We kept only those species having a p value <0.05 for the final model. According to the present invention, the equilibrium between good and bad bacteria is critical for the best outcome.

[0159] GAMS Associated with Best Clinical Outcome

[0160] The best predictive model allowing to identify the “responding” patients (R) among all patients with AUC value of 0.863, a specificity of 0.798 (true positive cases) and a sensitivity (false positive cases) of 0.842 was obtained when considering LEfSe combo species: the decrease of the following detrimental commensals retained in the model were:
[0161] Clostridium boltae ATCC BAA 613 (fold decrease 13)
[0162] Faecalibacterium prausnitzii KLE1255-3 (fold decrease 15)
[0163] Prevotella sp CAG617 (infini, detectable only in NR)
[0164] Subdoligranulum sp 4_3_54A2 FAA (fold decrease 2.6)
[0165] while those that were increased in R (“good bacteria”) were:
[0166] Bacteroides sp CAG 144 (increased by 62 fold)
[0167] Eubacterium sp CAG38 (increased by 2.3 fold)
[0168] Azospiriilum sp CAG 239 (increased by 3.8 fold)

[0169] The cut-off values correspond to the means±SEM featuring in Table 15. We kept only these species (that had a p value <0.05) for the final model and claim the equilibrium between good and bad bacteria for the best outcome in this patent.

[0170] The best predictive model allowing to identify the “responding” patients (R) among those who did not take ATB with AUC value of 0.845, Spec=0.990; Sens=0.614 was obtained when considering LEfSe combo species, and the commensals retained in the model were:

[0171] Are decreased in R the following ones:
[0172] Prevotella_sp_CAG_617 (infini, absent in R)
[0173] Clostridium_clostridioforme_2_1_49FAA_1 (decreased by 6.3 fold in R)

[0174] Are increased in R the following ones:
[0175] Bacteroides plebeius CAG 211 (increased by 327 fold in R)
[0176] Bacteroides coprophilus DSM 18228 JCM 13818 (present only in R)
[0177] Eubacterium_siraeum_CAG_80 (increased by 14 fold in R)
[0178] Eubacterium_sp_CAG_202 (increased by 5.4 fold in R)
[0179] Eubacterium_sp_CAG_115 (increased by 47 fold in R)

[0180] The cut-off values correspond to the means±SEM featuring in Table 15. We kept only these species (that had a p value <0.05) for the final model. According to the present invention, the equilibrium between good and bad bacteria is critical for the best outcome.

TABLE 15
Commensal bacteria associated with best (or worse) clinical outcome). Part A includes all RCC patients while part
B considered only patients who did not take antibiotics. The mean relative abundance with SEM (standard error mean)
of each commensal is indicated, as well as the ratio of this mean comparing responders (R) versus non responders
(NR) as the fold change and its log2 value with the p value (not considered significantly relevant when <0.05).

| | Commensal bacteria associated with best (or worse) clinical outcome). | | | | | | | |
|---|---|---|---|---|---|---|---|---|
| | | NR Mean | | R Mean | | Fold Ratio | | P value |
| | | rel, | | rel, | | (FR) | log2FR | NR |
| Species | CAG | abund, | NR Sem | abund, | R Sem | R/NR | R/NR | vs R |
| Part A | | | | | | | | |

NR - KIDNEY/OUTCOME_1/AUC = 0.882; Spec = 0.778; Sens = 0.860

| | | | | | | | | |
|---|---|---|---|---|---|---|---|---|
| Clostridium_bolteae_ATCC_BAA_613 | CAG00008 | 0.0069 | 0.00429 | 0.000531 | 0.000133 | 0.0769 | −3.7 | 0.00999 |
| Bacteroides_sp_CAG_144 | CAG00413 | 2.90E−05 | 2.06E−05 | 0.00181 | 0.000585 | 62.55 | 5.96 | 0.0287 |
| Faecalibacterium_cf_prausnitzii_KLE1255_3 | CAG01039 | 0.00301 | 0.00208 | 0.000687 | 0.000199 | 0.227 | −2.133 | 0.0351 |
| Eubacterium_sp_CAG_38 | CAG00178 | 0.0012 | 0.000685 | 0.0028 | 0.00072 | 2.336 | 1.224 | 0.0181 |
| Prevotella_sp_CAG_617 | CAG00473 | 0.00326 | 0.00192 | 0 | 0 | 0 | −inf | 0.0296 |
| Subdoligranulum_sp_4_3_54A2FAA | CAG00140 | 0.00338 | 0.00087 | 0.00128 | 0.000195 | 0.379 | −1.398 | 0.0204 |
| Prevotella_copri_CAG_164 | CAG01004 | 0.000576 | 0.000558 | 0 | 0 | 0 | −inf | 0.0296 |
| Acinetobacter_sp_CAG_196 | CAG00761 | 0.000557 | 0.000417 | 0.00191 | 0.000695 | 3.44 | 1.782 | 0.0186 |
| Azospirillum_sp_CAG_239 | CAG00302 | 0.000452 | 0.000331 | 0.00172 | 0.00083 | 3.8 | 1.926 | 0.0501 |

R - KIDNEY/OUTCOME_1/AUC = 0.863; Spec = 0.798; Sens = 0.842

| | | | | | | | | |
|---|---|---|---|---|---|---|---|---|
| Clostridium_bolteae_ATCC_BAA_613 | CAG00008 | 0.0069 | 0.00429 | 0.000531 | 0.000133 | 0.0769 | −3.7 | 0.00999 |
| Bacteroides_sp_CAG_144 | CAG00413 | 2.90E−05 | 2.06E−05 | 0.00181 | 0.000585 | 62.55 | 5.96 | 0.0287 |
| Faecalibacterium_cf_prausnitzii_KLE1255_3 | CAG01039 | 0.00301 | 0.00208 | 0.000687 | 0.000199 | 0.227 | −2.133 | 0.0351 |
| Eubacterium_sp_CAG_38 | CAG00178 | 0.0012 | 0.000685 | 0.0028 | 0.00072 | 2.336 | 1.224 | 0.0181 |
| Prevotella_sp_CAG_617 | CAG00473 | 0.00326 | 0.00192 | 0 | 0 | 0 | −inf | 0.0296 |
| Subdoligranulum_sp_4_3_54A2FAA | CAG00140 | 0.00338 | 0.00087 | 0.00128 | 0.000195 | 0.379 | −1.398 | 0.0204 |
| Azospirillum_sp_CAG 239 | CAG00302 | 0.000452 | 0.000331 | 0.00172 | 0.00083 | 3.8 | 1.926 | 0.0501 |
| Part B | | | | | | | | |

NR - KIDNEY_noatb/OUTCOME_1/AUC = 0.879; Spec = 0.707; Sens = 0.950

| | | | | | | | | |
|---|---|---|---|---|---|---|---|---|
| Clostridium_bolteae_ATCC_BAA_613 | CAG00008 | 0.00806 | 0.00605 | 0.000513 | 0.000142 | 0.0636 | −3.972 | 0.00974 |
| Bacteroides_sp_CAG_144 | CAG00413 | 3.88E−05 | 2.91E−05 | 0.00195 | 0.000625 | 50.203 | 5.649 | 0.0368 |
| Firmicutes_bacterium_CAG_65_1 | CAG00792 | 0.00413 | 0.00234 | 0.00798 | 0.00259 | 1.931 | 0.949 | 0.0395 |
| Eubacterium_sp_CAG_115 | CAG00341 | 5.33E−05 | 3.66E−05 | 0.00252 | 0.000927 | 47.381 | 5.566 | 0.0148 |
| Prevotella_sp_CAG_617 | CAG00473 | 0.00378 | 0.00261 | 0 | 0 | 0 | −inf | 0.0436 |
| Bacteroides_plebeius_CAG_211 | CAG00711 | 1.66E−05 | 1.66E−05 | 0.00544 | 0.00195 | 327.612 | 8.355 | 0.0557 |
| Eubacterium_siraeum_CAG_80 | CAG00653 | 0.000425 | 0.000185 | 0.00608 | 0.00215 | 14.277 | 3.835 | 0.0232 |
| Bacteroides_coprophilus_DSM_18228_JCM_13818 | CAG00132 | 0 | 0 | 0.00234 | 0.00121 | 0 | −inf | 0.0533 |

R - KIDNEY_noatb/OUTCOME_1/AUC = 0.845; Spec = 0.990; Sens = 0.614

| | | | | | | | | |
|---|---|---|---|---|---|---|---|---|
| Eubacterium_sp_CAG_115 | CAG00341 | 5.33E−05 | 3.66E−05 | 0.00252 | 0.000927 | 47.381 | 5.566 | 0.0148 |
| Prevotella_sp_CAG_617 | CAG00473 | 0.00378 | 0.00261 | 0 | 0 | 0 | −inf | 0.0436 |
| Clostridium_clostridioforme_2_1_49FAA_1 | CAG01263 | 0.0053 | 0.00356 | 0.000839 | 0.000471 | 0.158 | −2.659 | 0.0415 |
| Bacteroides_plebeius_CAG_211 | CAG00711 | 1.66E−05 | 1.66E−05 | 0.00544 | 0.00195 | 327.612 | 8.355 | 0.0557 |
| Eubacterium_siraeum_CAG_80 | CAG00653 | 0.000425 | 0.000185 | 0.00608 | 0.00215 | 14.277 | 3.835 | 0.0232 |
| Eubacterium_sp_CAG_202 | CAG00796 | 0.000954 | 0.00095 | 0.00514 | 0.00162 | 5.39 | 2.43 | 0.0402 |
| Bacteroides_coprophilus_DSM_18228_JCM_13818 | CAG00132 | 0 | 0 | 0.00234 | 0.00121 | 0 | −inf | 0.0533 |

### Example 2: Metagenomics-Based GOMS Associated with TTP>3 Months According to RECIST 1.1 Criteria (FIG. 2)

[0181] Metagenomics-based GOMS associated with TTP>3 months according to RECIST 1.1 criteria (FIG. 2).

[0182] When segregating responders (R, TTP>3 months) from non-responders (NR, TTP<3 months) in all 69 patients (according to the best clinical response as assessed by RECIST1.1), we failed to observe significant differences with a FDR p value <0.05. When segregating responders (R, TTP>3 months) from non-responders (NR, TTP<3 months) in RCC who did not take ATB (according to the best clinical response as assessed by RECIST1.1), we failed to observe significant differences with a FDR p value <0.05.

[0183] However, the multivariate model allowed to find some GOMS with clinical relevance.

[0184] GOMS Associated with TTP<3 Months

[0185] Resistance at 3 months was the best clinical readout of our analysis in RCC patients.

[0186] The best predictive model allowing to identify the “resistant” patients (NR) among all patients with AUC value of 0.913, a specificity of 0.798 (true positive cases) and a sensitivity (false positive cases) of 0.910 was obtained when considering LEfSe combination, and the commensals retained in the model as “bad bacteria” increased in NR were the following, as shown in Table 16:
[0187] Clostridium_sp_CAG_71 (increased by 2 fold in NR)
[0188] Hungatella_hathewayi_12489931_1 (increased by 47 fold in NR)
[0189] Prevotella_sp_CAG_617 (infinite, detectable only in NR) and
[0190] Holdemanella_biformis_DSM_3989_1 (increased by 48 fold in NR),
[0191] whereas in Azospirillum_sp_CAG_239 was decrease by 11 fold in NR (good bacterium)

[0192] However, in patients who did not took ATB, the list of bacteria retained in this model which gave an AUC of 0.884, specificity 0.667, sensitivity 1.000 were:

[0193] For the bad bacteria, increase of:
[0194] Clostridium_bolteae_ATCC_BAA_613 (increased by 15 fold in NR)
[0195] Prevotella_sp_CAG_617 (present only in NR)
[0196] Holdemanella_biformis_DSM 39891 (increased by 32 fold in NR) and
[0197] Faecalibacterium_cf_prausnitzii_KLE1255 (increased by 8.8 fold in NR)

[0198] For the good bacteria, decrease of:
[0199] Eubacterium_sp_CAG_38 (decreased by 2 fold in NR)
[0200] Eubacterium_sp_CAG_115 (decreased by 37 fold in NR)

[0201] We did retain the ratio between good and bad bacteria for TTP3 NR in our final model (see Table 16, part B).

[0202] GOMS Associated with TTP>3 Months

[0203] The best predictive model allowing to identify the “responders” patients (R) among all patients, with AUC=0.876; Spec=0.990; Sens=0.727, was obtained when considering LEfSe combination, and the commensals retained in the model as “bad bacteria” decreased in R were the following, as shown in Table 16:
[0204] Clostridium_bolteae_ATCC_BAA613 (decreased by 92% in R)
[0205] Clostridium_sp_CA G_7_1 (decreased by 46%)
[0206] Faecalibacterium_cf_prausnitzii_KLE12553 (decreased by 83%)
[0207] Prevotella_sp_CAG_617 (present only in NR)
[0208] Holdemanella_biformis_DSM_39891 (decreased by 79%)
[0209] Peptoniphilus_sp_oral_taxon_836_str_F0141 (present only in NR)
[0210] whereas Azospirillum_sp_CAG_239 was increased in R by 11 fold (good bacterium).

[0211] However, in patients who did not took ATB, the list of bacteria retained in this model which gave AUC=0.899; Spec=0.990; Sens=0.836 were:

[0212] For the bad bacteria, a decrease in:
[0213] Clostridium_bolteae_ATCC_BAA_613 (decreased by 93.2% in R)
[0214] Clostridium_sp_CAG_7_1 (decreased by 44.5%)
[0215] Prevotella_sp_CAG_617 (present only in NR)
[0216] Prevotella_copri_CAG_164 (present only in NR)
[0217] Holdernanella_biformis_DSM_3989_1 (decreased by 96.9%)
[0218] Prevotella_sp_CAG_2791 (present only in NR)
[0219] Faecalibacterium_of_prausnitzii_KLE1255 (decreased by 88.6%)

[0220] For the good bacteria, an increase in:
[0221] Akkermansia_muciniphila_CAG_154 (2.5 fold increase in R)
[0222] Eubacterium_sp_CAG_115 (37 fold increase in R)

[0223] We did retain the ratio between good and bad bacteria for TTP3 R in our final model (see Table 16, part B).

TABLE 16
Commensal bacteria associated with TTP> or <3 months. Part A includes all RCC patients while part B considered
only patients who did not take antibiotics. The mean relative abundance with SEM (standard error mean) of each
commensal is indicated, as well as the ratio of this mean comparing responders (R) versus non responders (NR)
as the fold change and its log2 value with the p value (not considered significantly relevant when <0.05).

| | Commensal bacteria associated with TTP> or <3 months. | | | | | | | |
|---|---|---|---|---|---|---|---|---|
| | | NR Mean | | R Mean | | Fold Ratio | | P value |
| | | rel, | | rel, | | (FR) | log2FR | NR |
| Species | CAG | abund, | NR Sem | abund, | R Sem | R/NR | R/NR | vs R |
| Part A | | | | | | | | |

NR - KIDNEY/TTP3/AUC = 0.913; Spec = 0.798; Sens = 0.910

| | | | | | | | | |
|---|---|---|---|---|---|---|---|---|
| Clostridium_sp_CAG_7_1 | CAG00047 | 0.0031 | 0.000679 | 0.00166 | 0.000576 | 0.537 | −0.895 | 0.00404 |
| Hungatella_hathewayi_12489931_1 | CAG00610 | 0.000963 | 0.000659 | 2.15E−05 | 9.31E−06 | 0.0223 | −5.483 | 0.0118 |
| Prevotella_sp_CAG_617 | CAG00473 | 0.004 | 0.00233 | 0 | 0 | 0 | −inf | 0.0107 |
| Holdemanella_biformis_DSM_3989_1 | CAG01141 | 0.00249 | 0.0013 | 5.19E−05 | 5.19E−05 | 0.0208 | −5.586 | 0.0154 |
| Azospirillum_sp_CAG_239 | CAG00302 | 0.000157 | 0.00011 | 0.00172 | 0.00076 | 10.914 | 3.448 | 0.0454 |

R - KIDNEY/TTP3/AUC = 0.876; Spec = 0.990; Sens = 0.727

| | | | | | | | | |
|---|---|---|---|---|---|---|---|---|
| Clostridium_bolteae_ATCC_BAA_613 | CAG00008 | 0.00813 | 0.00525 | 0.000635 | 0.000163 | 0.0781 | −3.678 | 0.0387 |
| Clostridium_sp_CAG_7_1 | CAG00047 | 0.0031 | 0.000679 | 0.00166 | 0.000576 | 0.537 | −0.895 | 0.00404 |
| Faecalibacterium_cf_prausnitzii_KLE1255_3 | CAG01039 | 0.00363 | 0.00254 | 0.000645 | 0.00018 | 0.177 | −2.494 | 0.0242 |
| Prevotella_sp_CAG_617 | CAG00473 | 0.004 | 0.00233 | 0 | 0 | 0 | −inf | 0.0107 |
| Holdemanella_biformis_DSM_3989_1 | CAG01141 | 0.00249 | 0.0013 | 5.19E−05 | 5.19E−05 | 0.0208 | −5.586 | 0.0154 |
| Azospirillum_sp_CAG_239 | CAG00302 | 0.000157 | 0.00011 | 0.00172 | 0.00076 | 10.914 | 3.448 | 0.0454 |
| Peptoniphilus_sp_oral_taxon_836_str_F0141 | CAG01339 | 6.19E−06 | 5.00E−06 | 0 | 0 | 0 | −inf | 0.0393 |
| Part B | | | | | | | | |

NR - KIDNEY_noatb/TTP3/AUC = 0.884; Spec = 0.667; Sens = 1.000

| | | | | | | | | |
|---|---|---|---|---|---|---|---|---|
| Clostridium_bolteae_ATCC_BAA_613 | CAG00008 | 0.00919 | 0.00718 | 0.000619 | 0.000181 | 0.0673 | −3.892 | 0.0242 |
| Eubacterium_sp_CAG_38 | CAG00178 | 0.00141 | 0.00112 | 0.00281 | 0.000721 | 1.998 | 0.998 | 0.011 |
| Eubacterium_sp_CAG_115 | CAG00341 | 6.32E−05 | 4.32E−05 | 0.00234 | 0.000866 | 37.05 | 5.211 | 0.0472 |
| Prevotella_sp_CAG_617 | CAG00473 | 0.00449 | 0.00308 | 0 | 0 | 0 | −inf | 0.0223 |
| Holdemanella_biformis_DSM_3989_1 | CAG01141 | 0.00187 | 0.00102 | 5.81E−05 | 5.81E−05 | 0.031 | −5.009 | 0.0265 |
| Faecalibacterium_cf_prausnitzii_KLE1255 | CAG00495 | 0.00342 | 0.00215 | 0.00039 | 0.000277 | 0.114 | −3.132 | 0.0397 |

R - KIDNEY_noatb/TTP3/AUC = 0.899; Spec = 0.990; Sens = 0.836

| | | | | | | | | |
|---|---|---|---|---|---|---|---|---|
| Clostridium_bolteae_ATCC_BAA_613 | CAG00008 | 0.00919 | 0.00718 | 0.000619 | 0.000181 | 0.0673 | −3.892 | 0.0242 |
| Clostridium_sp_CAG_7_1 | CAG00079 | 0.00319 | 0.000675 | 0.00177 | 0.000642 | 0.557 | −0.843 | 0.00285 |
| Akkermansia_muciniphila_CAG_154 | CAG00301 | 0.00228 | 0.00209 | 0.00571 | 0.00159 | 2.495 | 1.319 | 0.016 |
| Eubacterium_sp_CAG_115 | CAG00341 | 6.32E−05 | 4.32E−05 | 0.00234 | 0.000866 | 37.05 | 5.211 | 0.0472 |
| Prevotella_sp_CAG_617 | CAG00473 | 0.00449 | 0.00308 | 0 | 0 | 0 | −inf | 0.0223 |
| Prevotella_copri_CAG_164 | CAG01004 | 0.000972 | 0.000941 | 0 | 0 | 0 | −inf | 0.00461 |
| Holdemanella_biformis DSM_3989_1 | CAG01141 | 0.00187 | 0.00102 | 5.81E−05 | 5.81E−05 | 0.031 | −5.009 | 0.0265 |
| Prevotella_sp_CAG_279_1 | CAG00487 | 0.000701 | 0.000568 | 0 | 0 | 0 | −inf | 0.0223 |
| Faecalibacterium_cf_prausnitzii_KLE1255 | CAG00495 | 0.00342 | 0.00215 | 0.00039 | 0.000277 | 0.114 | −3.132 | 0.0397 |

### Example 3: Metagenomics-Based GOMS Associated with TTP>6 Months According to RECIST 1.1 Criteria (FIG. 3)

[0224] When segregating responders (R, TTP>6 months) from non-responders (NR, TTP<6 months) in all ROC patients (according to the TTP6 as assessed by RECIST1.1), we did not observe significant differences with a FDR p value <0.05 (not shown). When segregating responders (R, TTP>6 months) from non-responders (NR, TTP<6 months) in RCC who did not take ATB (according to the TTP6 as assessed by RECIST1.1), we observed significant differences with a FDR p value <0.05 (FIG. 4). Of note, Subdoligranulum_sp_CAG_314_1 and Eubacterium_sp_CAG_115 were associated with TTP>6 months in RCC patients who took no antibiotics.

[0225] We conducted the multivariate model allowing to find very robust GOMS with clinical relevance.

[0226] GOMS Associated with TTP>6 Months

[0227] The best predictive model allowing to identify the “responding” patients (R) among all patients with AUC value of 0.845, a specificity of 0.889 (true positive cases) and a sensitivity (false positive cases) of 0.800 was obtained when considering LEfSe combination, and the good commensals retained in the model were the following, as shown in Table 17 (part A):
[0228] Clostridium_sp_CAG_230 (increased by 6.7 fold in R)
[0229] Clostridium_sp_CAG_167 (increased by 2.8 fold in R)
[0230] Azospirilium_sp_CAG_239_3 (detectable only in R)
[0231] Firmicutes_bacterium_CAG_176_12 (increased by 6.9 fold in R)

[0232] The bad commensals that should be decreased are:
[0233] Coprococcus_catus_GD_7_6 (decreased by 65.6%)
[0234] Oscillibacter_sp_KLE_1745_6 (decreased by 56.6%)

[0235] The cut-off values correspond to the means±SEM featuring in Table 17.

[0236] However, in patients who did not took ATB, the list of favorable bacteria retained in this model was different and included the following ones, reaching AUC value of 0.804, a specificity of 0.848 (true positive cases) and a sensitivity (false positive cases) of 0.770 was obtained when considering LEfSe combination (Table 17 part B):
[0237] Eubacterium_sp_CAG_1801 (increased by 3 fold in R)
[0238] Eubacterium_sp_CAG_115 (increased by 13 fold in R)
[0239] Eubacterium_siraeum_CAG_80 (increased by 5.4 fold in R)
[0240] Butyrivibrio_crossotus_DSM_2876 (detectable only in R)

[0241] The cut-off values correspond to the means±SEM featuring in Table 17. These favorable and unfavorable commensals are major spp influencing favorable responses to PD1 blockade.

[0242] GOMS Associated with TTP<6 Months

[0243] As for the bacteria associated with short TTP<6 months in all patients, the list of significant bacteria was very restrained even more without ATB. Very few can be found significantly associated with resistance:
[0244] Clostridialas_bacterium_VE202_14_1 (undetectable in NR)
[0245] Clostridium_sp_CAG_230 (6.7 fold increase in R)
[0246] Azospirillum_sp_CAG 239_1 (undetectable in NR).

TABLE 17
Commensal bacteria associated with TTP> or <6 months. Part A includes all RCC patients while part B considered
only patients who did not take antibiotics. The mean relative abundance with SEM (standard error mean) of each
commensal is indicated, as well as the ratio of this mean comparing responders (R) versus non responders (NR)
as the fold change and its log2 value with the p value (not considered significantly relevant when <0.05).

| | Commensal bacteria associated with TTP> or <6 months. | | | | | | | |
|---|---|---|---|---|---|---|---|---|
| | | NR Mean | | R Mean | | Fold Ratio | | P value |
| | | rel, | | rel, | | (FR) | log2FR | NR |
| Species | CAG | abund, | NR Sem | abund, | R Sem | R/NR | R/NR | vs R |
| Part A | | | | | | | | |

NR - KIDNEY/TTP6/AUC = 0.796; Spec = 0.828; Sens = 0.688

| | | | | | | | | |
|---|---|---|---|---|---|---|---|---|
| Clostridium_bolteae_ATCC_BAA_613 | CAG00008 | 0.00477 | 0.00285 | 0.000508 | 0.000154 | 0.106 | −3.229 | 0.0623 |
| Alistipes_sp_CAG_514_1 | CAG00827 | 0 | 0 | 0.00618 | 0.00562 | 0 | −inf | 0.0714 |
| Clostridiales_bacterium_VE202_14_1 | CAG00821 | 0 | 0 | 1.88E−05 | 1.13E−05 | 0 | −inf | 0.0254 |
| Clostridium_sp_CAG_230 | CAG00317 | 9.10E−05 | 6.01E−05 | 0.000612 | 0.000309 | 6.733 | 2.751 | 0.00989 |
| Azospirillum_sp_CAG_239_1 | CAG00472 | 0 | 0 | 0.000412 | 0.000328 | 0 | −inf | 0.0714 |
| Azospirillum_sp_CAG_239_3 | CAG00668 | 0 | 0 | 0.000816 | 0.000574 | 0 | −inf | 0.0254 |
| Alistipes_sp_CAG_268 | CAG00421 | 0 | 0 | 0.002 | 0.00193 | 0 | −inf | 0.0714 |

R - KIDNEY/TTP6/AUC = 0.845; Spec = 0.889; Sens = 0.800

| | | | | | | | | |
|---|---|---|---|---|---|---|---|---|
| Coprococcus_catus_GD_7_6 | CAG01208 | 0.000926 | 0.000278 | 0.000318 | 9.32E−05 | 0.343 | −1.541 | 0.103 |
| Clostridium_sp_CAG_230 | CAG00317 | 9.10E−05 | 6.01E−05 | 0.000612 | 0.000309 | 6.733 | 2.751 | 0.00989 |
| Clostridium_sp_CAG_167 | CAG00452 | 0.000271 | 0.000164 | 0.000781 | 0.00029 | 2.878 | 1.525 | 0.0277 |
| Oscillibacter_sp_KLE_1745_6 | CAG00931 | 0.000795 | 0.000203 | 0.000345 | 7.49E−05 | 0.433 | −1.204 | 0.0367 |
| Azospirillum_sp_CAG_239_3 | CAG00668 | 0 | 0 | 0.000816 | 0.000574 | 0 | −inf | 0.0254 |
| Firmicutes_bacterium_CAG_176_12 | CAG01043 | 5.85E−05 | 5.85E−05 | 0.000404 | 0.00025 | 6.912 | 2.789 | 0.0501 |
| Part B | | | | | | | | |

NR - KIDNEY_noatb/TTP6/AUC = 0.721; Spec = 0.798; Sens = 0.606

| | | | | | | | | |
|---|---|---|---|---|---|---|---|---|
| Firmicutes_bacterium_CAG_110_1 | CAG00604 | 0.00166 | 0.000682 | 0.00201 | 0.000735 | 1.212 | 0.277 | 0.207 |

R - KIDNEY_noatb/TTP6/AUC = 0.804; Spec = 0.848; Sens = 0.770

| | | | | | | | | |
|---|---|---|---|---|---|---|---|---|
| Eubacterium_sp_CAG_180_1 | CAG00523 | 0.00221 | 0.00124 | 0.00672 | 0.00195 | 3.039 | 1.603 | 0.0272 |
| Eubacterium_sp_CAG_115 | CAG00341 | 0.000274 | 0.000241 | 0.00355 | 0.0015 | 12.961 | 3.696 | 0.000501 |
| Eubacterium_siraeum_CAG_80 | CAG00653 | 0.00161 | 0.00095 | 0.00872 | 0.00348 | 5.396 | 2.431 | 0.0252 |
| Butyrivibrio_crossotus_DSM_2876 | CAG00542 | 0 | 0 | 0.0136 | 0.00801 | 0 | −inf | 0.0324 |

### Example 4: Results for RCC Patients Regardless Antibiotic Usage, OUTCOME 1 Criterion

[0247] In this example, three different models were built based on a bundle of 69 “reference patterns”, which are the standardized abundances profiles (zero mean and unit variance) obtained from the 69 samples used in training the logistic regression models. Standardization is necessary to homogenize the dynamic range of bacterial species abundances.

[0248] Based on the first strategy described in the Materials and Methods, applied to 69 RCC patients (NR=27; R=42) with unknown antibiotic usage history and OUTCOME_1 criterion (best outcome), we selected 25 bacterial species that gave a logistic regression model overall predictability equal to 89.86% (model 1.1). In order to measure the goodness of the model with 25 species, after a 5-fold cross-validation performed on a subset of the original dataset, the model itself was able to predict 60% of NR and 69% of R subjects, with a CV_AUC=0.917 and an AUC=0.785. Upon RFECV and RFE feature selection, 8 species were selected from the aforementioned 25: the model built on these 8 species gave an overall predictability of 79.71% (model 1.2, FIG. 5), and the summary statistics for these species are reported in Table 18 below. In order to measure the goodness of the model, after a 5-fold cross-validation performed on a subset of the original dataset, the model itself was able to predict 40% of NR and 77% of R subjects, with a CV_AUC=0.635 and an AUC=0.815.

[0249] Based on the second strategy (machine-learning) applied to 69 RCC patients (NR=27; R=42) with unknown antibiotic usage history and OUTCOME_1 criterion, we took into account all the bacterial species of the dataset (n=1112). After a first round of feature selection, RFECV gave a rank=1 to 31 species which collectively, after a 5-fold cross-validation, were able to predict 100% of NR and 100% of R subjects, with a CV_AUC=1 and an AUC=1 (model 2.1). Upon a second round of feature selection, RFE gave a rank=1 to 8 species, which were selected for the subsequent logistic regression classifier. The model built on these 8 species gave an overall predictability of 89.86% (model 2.2, FIG. 5), and the summary statistics for these species are reported in Table 19 below. In order to measure the goodness of the model, after a 5-fold cross-validation performed on a subset of the original dataset, the model itself was able to predict 80% of NR and 92% of R subjects, with a CV_AUC=1 and an AUC=0.923.

TABLE 18
Statistics for the species selected in Model 1.2.

| | | | NR (n = | R (n = | | | NR_Odds | |
|---|---|---|---|---|---|---|---|---|
| Group | op. | Thr | 27) (%) | 42) (%) | Pval_Fisher | NR_coeff | Ratio | R_coeff |
| CAG00008_Clostridium_bolteae_ATCC_BAA_613 | > | 0 | 92.6 | 95.2 | 0.6415 | 1.0323 | 2.0453 | −1.0323 |
| CAG01039_Faecalibacterium_cf_prausnitzii_KLE1255 | > | 0 | 77.8 | 47.6 | 0.0229 | 1.084 | 2.1199 | −1.084 |
| CAG00473_Prevotella_sp_CAG_617 | > | 0 | 11.1 | 0.0 | 0.0558 | 0.9723 | 1.9619 | −0.9723 |
| CAG00140_Subdoligranulum_sp_4_3_54A2FAA | > | 0 | 92.6 | 100.0 | 0.1496 | 0.9907 | 1.9872 | −0.9907 |
| CAG00610_Hungatella_hathewayi_12489931 | > | 0 | 51.9 | 21.4 | 0.0174 | 0.6234 | 1.5406 | −0.6234 |
| CAG01141_Holdemanella_biformis_DSM_3989 | > | 0 | 14.8 | 2.4 | 0.0728 | 0.8468 | 1.7986 | −0.8468 |
| CAG00413_Bacteroides_sp_CAG_144 | > | 0 | 11.1 | 31.0 | 0.0803 | −0.8994 | 0.5361 | 0.8994 |
| CAG00317_Clostridium_sp_CAG_230 | > | 0 | 11.1 | 35.7 | 0.027 | −0.6041 | 0.6579 | 0.6041 |

| | R_Odds | | | NR Mean | |
|---|---|---|---|---|---|
| Group | Ratio | rank_RFECV | rank_RFE | relabund | NR Sem |
| CAG00008_Clostridium_bolteae_ATCC_BAA_613 | 0.4889 | 1 | 1 | 0.0069045 | 0.00429957 |
| CAG01039_Faecalibacterium_cf_prausnitzii_KLE1255 | 0.4717 | 1 | 1 | 0.00301567 | 0.0020844 |
| CAG00473_Prevotella_sp_CAG_617 | 0.5097 | 1 | 1 | 0.00326379 | 0.00192 |
| CAG00140_Subdoligranulum_sp_4_3_54A2FAA | 0.5032 | 1 | 1 | 0.00338708 | 0.00087016 |
| CAG00610_Hungatella_hathewayi_12489931 | 0.6491 | 1 | 1 | 0.00079124 | 0.00053962 |
| CAG01141_Holdemanella_biformis_DSM_3989 | 0.556 | 1 | 1 | 0.00203209 | 0.00107945 |
| CAG00413_Bacteroides_sp_CAG_144 | 1.8653 | 1 | 1 | 2.895e−05 | 2.056e−05 |
| CAG00317_Clostridium_sp_CAG_230 | 1.52 | 1 | 1 | 2.568e−05 | 1.459e−05 |

| | R Mean | | Fold Ratio | log2FR | P value |
|---|---|---|---|---|---|
| Group | relabund | R Sem | (FR) R/NR | R/NR | NR vs R |
| CAG00008_Clostridium_bolteae_ATCC_BAA_613 | 0.00053101 | 0.00013359 | 0.08 | −3.7 | 0.00999 |
| CAG01039_Faecalibacterium_cf_prausnitzii_KLE1255 | 0.00068723 | 0.00019997 | 0.23 | −2.13 | 0.03517 |
| CAG00473_Prevotella_sp_CAG_617 | 0.0 | 0.0 | 0.0 | −inf | 0.02965 |
| CAG00140_Subdoligranulum_sp_4_3_54A2FAA | 0.0012847 | 0.00019541 | 0.38 | −1.4 | 0.02047 |
| CAG00610_Hungatella_hathewayi_12489931 | 2.023e−05 | 1.029e−05 | 0.03 | −5.29 | 0.00354 |
| CAG01141_Holdemanella_biformis_DSM_3989 | 5.809e−05 | 5.809e−05 | 0.03 | −5.13 | 0.0489 |
| CAG00413_Bacteroides_sp_CAG_144 | 0.0018108 | 0.00058512 | 62.56 | 5.97 | 0.02879 |
| CAG00317_Clostridium_sp_CAG_230 | 0.00047284 | 0.00019556 | 18.41 | 4.2 | 0.0214 |

TABLE 19
Statistics for the species selected in Model 2.2.

| | | | NR (n = | R (n = | | | NR_Odds | |
|---|---|---|---|---|---|---|---|---|
| Group | op. | Thr | 27) (%) | 42) (%) | Pval_Fisher | NR_coeff | Ratio | R_coeff |
| CAG00727_Eggerthella_lenta_DSM_2243 | > | 0 | 77.8 | 50.0 | 0.0251 | 1.0791 | 2.1127 | −1.0791 |
| CAG01141_Holdemanella_biformis_DSM_3989 | > | 0 | 14.8 | 2.4 | 0.0728 | 1.1164 | 2.1681 | −1.1164 |
| CAG00650_Dorea_formicigenerans_ATCC_27755 | > | 0 | 81.5 | 88.1 | 0.4972 | 1.2839 | 2.4349 | −1.2839 |
| CAG00928_Acidiphilium_sp_CAG_727 | > | 0 | 14.8 | 4.8 | 0.2006 | 1.1156 | 2.1668 | −1.1156 |
| CAG00473_Prevotella_sp_CAG_617 | > | 0 | 11.1 | 0.0 | 0.0558 | 1.014 | 2.0194 | −1.014 |
| CAG00122_Coprococcus_catus_GD_7 | > | 0 | 11.1 | 0.0 | 0.0558 | 0.9394 | 1.9177 | −0.9394 |
| CAG01144_Lactobacillus_vaginalis_DSM_5837_ATCC_49540 | > | 0 | 7.4 | 0.0 | 0.1496 | 0.8085 | 1.7514 | −0.8085 |
| CAG00063_Barnesiella_viscericola_DSM_18177 | > | 0 | 7.4 | 0.0 | 0.1496 | 0.7679 | 1.7028 | −0.7679 |

| | R_Odds | | | NR Mean | |
|---|---|---|---|---|---|
| Group | Ratio | rank_RFECV | rank_RFE | relabund | NR Sem |
| CAG00727_Eggerthella_lenta_DSM_2243 | 0.4733 | 1 | 1 | 0.00062355 | 0.00025745 |
| CAG01141_Holdemanella_biformis_DSM_3989 | 0.4612 | 1 | 1 | 0.00203209 | 0.00107945 |
| CAG00650_Dorea_formicigenerans_ATCC_27755 | 0.4107 | 1 | 1 | 0.00113438 | 0.0003259 |
| CAG00928_Acidiphilium_sp_CAG_727 | 0.4615 | 1 | 1 | 0.00021637 | 0.00013333 |
| CAG00473_Prevotella_sp_CAG_617 | 0.4952 | 1 | 1 | 0.00326379 | 0.00192 |
| CAG00122_Coprococcus_catus_GD_7 | 0.5214 | 1 | 1 | 0.00015959 | 0.00010288 |
| CAG01144_Lactobacillus_vaginalis_DSM_5837_ATCC_49540 | 0.571 | 1 | 1 | 4.76e−06 | 3.39e−06 |
| CAG00063_Barnesiella_viscericola_DSM_18177 | 0.5873 | 1 | 1 | 0.00049676 | 0.00035498 |

| | R Mean | | | log2FR | P value |
|---|---|---|---|---|---|
| Group | relabund | R Sem | FR R/NR | R/NR | NR vs R |
| CAG00727_Eggerthella_lenta_DSM_2243 | 9.683e−05 | 2.923e−05 | 0.16 | −2.69 | 0.00559 |
| CAG01141_Holdemanella_biformis_DSM_3989 | 5.809e−05 | 5.809e−05 | 0.03 | −5.13 | 0.0489 |
| CAG00650_Dorea_formicigenerans_ATCC_27755 | 0.00041466 | 6.136e−05 | 0.37 | −1.45 | 0.18765 |
| CAG00928_Acidiphilium_sp_CAG_727 | 5.87e−06 | 4.1e−06 | 0.03 | −5.2 | 0.14111 |
| CAG00473_Prevotella_sp_CAG_617 | 0.0 | 0.0 | 0.0 | −inf | 0.02965 |
| CAG00122_Coprococcus_catus_GD_7 | 0.0 | 0.0 | 0.0 | −inf | 0.02965 |
| CAG01144_Lactobacillus_vaginalis_DSM_5837_ATCC_49540 | 0.0 | 0.0 | 0.0 | −inf | 0.07916 |
| CAG00063_Barnesiella_viscericola_DSM_18177 | 0.0 | 0.0 | 0.0 | −inf | 0.07916 |

[0250] Taking into account the bacterial species (n=181, above 1112 total species, 16.3% of the total microbial composition) having an average relative abundance greater than or equal to 0.001 if expressed in the interval [0:1] (thus, the 0.1%) within the overall RCC cohort, we applied the second strategy (machine-learning) for 69 RCC patients (NR=27; R=42) with unknown antibiotic usage history and OUTCOME_1 criterion. After a first round of feature selection, RFECV gave a rank=1 to 21 species which collectively, after a 5-fold cross-validation, were able to predict 100% of NR and 92% of R subjects, with a CV_AUC=0.573 and an AUC=1 (model 3.1). After a second round of feature selection, RFE gave a rank=1 to 8 species which were selected for the subsequent logistic regression classifier. The model built on these 8 species gave an overall predictability of 85.51% (model 3.2, FIG. 5), and the summary statistics for these species are reported in Table 20 below. In order to measure the goodness of the model, after a 5-fold cross-validation performed on a subset of the original dataset, the model itself was able to predict 80% of NR and 85% of R subjects, with a CV_AUC=0.635 and an AUC=0.831. This last model was designed to be more affordable in case of problems in fecal samples storage, sequencing, stiffness, etcetera.

[0251] According to the Models 1.2, 2.2 and 3.2, which were modeled on unknown antibiotic usage history and OUTCOME_1 criterion, and are all based on 8 bacterial species so they can be properly compared, it is shown that the Model 2.2 has the highest predictability (89.86%) with the highest CV_AUC and AUC.

TABLE 20
Statistics for the species selected in Model 3.2.

| | | | NR (n = | R (n = | | | | |
|---|---|---|---|---|---|---|---|---|
| Group | op. | Thr | 27) (%) | 42) (%) | Pval_Fisher | NR_coeff | NR_OddsRatio | R_coeff |
| CAG00243_Lachnospiraceae_bacterium_1_1_57FAA | > | 0 | 85.2 | 90.5 | 0.7024 | 1.1735 | 2.2555 | −1.1735 |
| CAG00473_Prevotella_sp_CAG_617 | > | 0 | 11.1 | 0.0 | 0.0558 | 1.027 | 2.0378 | −1.027 |
| CAG00327_Faecalibacterium_sp_CAG_74 | > | 0 | 44.4 | 59.5 | 0.3226 | 0.9968 | 1.9956 | −0.9968 |
| CAG01039_Faecalibacterium_cf_prausnitzii_KLE1255 | > | 0 | 77.8 | 47.6 | 0.0229 | 1.0043 | 2.006 | −1.0043 |
| CAG00140_Subdoligranulum_sp_4_3_54A2FAA | > | 0 | 92.6 | 100.0 | 0.1496 | 0.7456 | 1.6767 | −0.7456 |
| CAG01263_Clostridium_clostridioforme_2_1_49FAA | > | 0 | 81.5 | 78.6 | 1.0 | 0.8736 | 1.8322 | −0.8736 |
| CAG00037_Bacteroides_faecis_MAJ27 | > | 0 | 14.8 | 28.6 | 0.2478 | −0.7032 | 0.6142 | 0.7032 |
| CAG00357_Bacteroides_ovatus_V975 | > | 0 | 92.6 | 92.9 | 1.0 | 0.6073 | 1.5234 | −0.6073 |

| | R_Odds | | | NR Mean | |
|---|---|---|---|---|---|
| Group | Ratio | rank_RFECV | rank_RFE | relabund | NR Sem |
| CAG00243_Lachnospiraceae_bacterium_1_1_57FAA | 0.4434 | 1 | 1 | 0.00861298 | 0.00346076 |
| CAG00473_Prevotella_sp_CAG_617 | 0.4907 | 1 | 1 | 0.00326379 | 0.00192 |
| CAG00327_Faecalibacterium_sp_CAG_74 | 0.5011 | 1 | 1 | 0.00212113 | 0.00139362 |
| CAG01039_Faecalibacterium_cf_prausnitzii_KLE1255 | 0.4985 | 1 | 1 | 0.00301567 | 0.0020844 |
| CAG00140_Subdoligranulum_sp_4_3_54A2FAA | 0.5964 | 1 | 1 | 0.00338708 | 0.00087016 |
| CAG01263_Clostridium_clostridioforme_2_1_49FAA | 0.5458 | 1 | 1 | 0.00452728 | 0.00253406 |
| CAG00037_Bacteroides_faecis_MAJ27 | 1.6282 | 1 | 1 | 0.00031624 | 0.00019911 |
| CAG00357_Bacteroides_ovatus_V975 | 0.6564 | 1 | 1 | 0.01574035 | 0.00485731 |

| | R Mean | | | log2FR | P value |
|---|---|---|---|---|---|
| Group | relabund | R Sem | FR R/NR | R/NR | NR vs R |
| CAG00243_Lachnospiraceae_bacterium_1_1_57FAA | 0.00153833 | 0.00031904 | 0.18 | −2.49 | 0.26546 |
| CAG00473_Prevotella_sp_CAG_617 | 0.0 | 0.0 | 0.0 | −inf | 0.02965 |
| CAG00327_Faecalibacterium_sp_CAG_74 | 0.00043694 | 0.00012343 | 0.21 | −2.28 | 0.92773 |
| CAG01039_Faecalibacterium_cf_prausnitzii_KLE1255 | 0.00068723 | 0.00019997 | 0.23 | −2.13 | 0.03517 |
| CAG00140_Subdoligranulum_sp_4_3_54A2FAA | 0.0012847 | 0.00019541 | 0.38 | −1.4 | 0.02047 |
| CAG01263_Clostridium_clostridioforme_2_1_49FAA | 0.0009867 | 0.00045528 | 0.22 | −2.2 | 0.05257 |
| CAG00037_Bacteroides_faecis_MAJ27 | 0.00320497 | 0.00119881 | 10.13 | 3.34 | 0.12006 |
| CAG00357_Bacteroides_ovatus_V975 | 0.00872078 | 0.00225535 | 0.55 | −0.85 | 0.27645 |

### Example 5: Predictive Models for RCC Patients Regardless Antibiotic Usage, OUTCOME 1 Criterion

[0252] According to the results obtained in Example 4, and due to the fact that responders (R) are predicted better than non-responders (NR) in all the three models proposed with 8 species (FIG. 5), we took into consideration the logistic regression β coefficients relative to R.

[0253] For the Model 1.2, according to the β coefficients of R (R_coeff), the probability estimate (expressed as a percentage) of belonging to R cohort for a tested subject JD is calculated as follows:

P_{R(JD)}=1/[1 exp\hat{ }−(−1.0323*CAG00008+

−1.084*CAG01039+

−0.9723*CAG00473+

−0.9907*CAG00140+

−0.6234*CAG00610+−0.8468*CAG01141+

0.8994*CAG00413+

0.6041*CAG00317)] [3]

[0254] In equation [3], “CAGXXXXX” represents the relative abundance of the bacterial species defined by the recited CAG, in a stool sample from the tested subject JD. These relative abundances need to be expressed as standardized values (zero mean and unit variance). The best option is to standardize the “abundances pattern” of the tested subject with a bundle of known “reference patterns”, i.e., all the relative abundances of each bacterial species for each fecal sample used in training the logistic regression model and the present invention refers a claim of a Python script used to ease the computation of the P_{R} (JD). From the standardized abundance pattern of a tested subject, the equation [3] can be applied to predict his/her belonging to the NR cohort with a model predictability of 79.71% and a success rate of 77%.

[0255] For the Model 2.2, according to the β coefficients of R (R_coeff), the probability estimate (expressed as a percentage) of belonging to R cohort for a tested subject JD is calculated as follows:

P_{R(JD)}=1/[1+exp\hat{ }−(−1.0791*CAG00727+

−1.1164*CAG01141+

−1.2839*CAG00650+

−1.1156*CAG00928+

−1.014*CAG00473+

−0.9394*CAG00122+

−0.8085*CAG01144+

−0.7679*CAG00063)] [4]

[0256] In equation [4], “CAGXXXXX” represents the relative abundance of the bacterial species defined by the recited CAG, in a stool sample from the tested subject JD. These relative abundances need to be expressed as standardized values (zero mean and unit variance). The best option is to standardize the “abundances pattern” of the tested subject with a bundle of known “reference patterns”, and the present invention refers a claim of a Python script used to ease the computation of the P_{R (JD)}. From the standardized abundance pattern of a tested subject, the equation [4] can be applied to predict his/her belonging to the R cohort with a model predictability of 89.86% and a success rate of 92%.

[0257] For the Model 3.2, according to the β coefficients of R (R_coeff), the probability estimate (expressed as a percentage) of belonging to R cohort for a tested subject JD is calculated as follows:

P_{R(JD)}=1/[1+exp\hat{ }−(−1.1735*CAG00243+

−1.027*CAG00473+

−0.9968*CAG00327+

−1.0043*CAG01039+

−0.7456*CAG00140+

−0.8736*CAG01263+

0.7032*CAG00037+

−0.6073*CAG00357)] [5]

[0258] In equation [5], “CAGXXXXX” represents the relative abundance of the bacterial species defined by the recited CAG, in a stool sample from the tested subject JD. These relative abundances need to be expressed as standardized values (zero mean and unit variance). The best option is to standardize the “abundances pattern” of the tested subject with a bundle of known “reference patterns”, and the present invention refers a claim of a Python script used to ease the computation of the P_{R (JD)}. From the standardized abundance pattern of a tested subject, the equation [5] can be applied to predict his/her belonging to the R cohort with a model predictability of 85.51% and a success rate of 85%.

### Example 6: Results for RCC Patients with No Antibiotic Usage, OUTCOME 1 Criterion

[0259] In this example, three different models were built based on a bundle of 58 “reference patterns”, which are the standardized abundances profiles (zero mean and unit variance) obtained from the 58 samples used in training the logistic regression models. Standardization is necessary to homogenize the dynamic range of bacterial species abundances.

[0260] Based on the first strategy applied to 58 RCC patients (NR=19; R=39) with no antibiotic usage history and OUTCOME_1 criterion (best outcome), we selected 25 bacterial species that gave a logistic regression model overall predictability equal to 89.66% (model 4.1). In order to measure the goodness of the model with 25 species, after a 5-fold cross-validation performed on a subset of the original dataset, the model itself was able to predict 67% of NR and 100% of R subjects, with a CV_AUC=1 and an RUC=0.778. Upon RFECV and RFE feature selection, 8 species were selected from the aforementioned 25: the model built on these 8 species gave an overall predictability of 87.93% (model 4.2, FIG. 6), and the summary statistics for these species are reported in Table 21 below. In order to measure the goodness of the model, after a 5-fold cross-validation performed on a subset of the original dataset, the model itself was able to predict 100% of NR and 92% of R subjects, with a CV_AUC=1 and an AUC=1.

[0261] Based on the second strategy (machine-learning) applied to 58 RCC patients (NR=19; R=39) with no antibiotic usage history and OUTCOME_1 criterion, we took into account all the bacterial species of the dataset (n=1083). After a first round of feature selection, RFECV gave a rank=1 to 9 species which collectively, after a 5-fold cross-validation, were able to predict 100% of NR and 92% of R subjects, with a CV_AUC=1 and an AUC=1 (model 5.1). Upon a second round of feature selection, RFE gave a rank=1 to 8 species, which were selected for the subsequent logistic regression classifier. The model built on these 8 species gave an overall predictability of 93.1% (model 5.2, FIG. 6), and the summary statistics for these species are reported in Table 22 below. In order to measure the goodness of the model, after a 5-fold cross-validation performed on a subset of the original dataset, the model itself was able to predict 100% of NR and 92% of R subjects, with a CV_AUC=1 and an AUC=1.

TABLE 21
Statistics for the species selected in Model 4.2.

| | | | NR (n = | R (n = | | | NR_Odds | |
|---|---|---|---|---|---|---|---|---|
| Group | op. | Thr | 19) (%) | 39) (%) | Pval_Fisher | NR_coeff | Ratio | R_coeff |
| CAG00008_Clostridium_bolteae_ATCC_BAA_613 | > | 0 | 94.7 | 94.9 | 1.0 | 0.955 | 1.9386 | −0.955 |
| CAG01039_Faecalibacterium_cf_prausnitzii_KLE1255 | > | 0 | 73.7 | 51.3 | 0.1561 | 0.8761 | 1.8354 | −0.8761 |
| CAG00473_Prevotella_sp_CAG_617 | > | 0 | 10.5 | 0.0 | 0.1034 | 0.9951 | 1.9932 | −0.9951 |
| CAG00487_Prevotella_sp_CAG_279 | > | 0 | 10.5 | 0.0 | 0.1034 | 0.7609 | 1.6945 | −0.7609 |
| CAG00140_Subdoligranulum_sp_4_3_54A2FAA | > | 0 | 89.5 | 100.0 | 0.1034 | 1.1107 | 2.1595 | −1.1107 |
| CAG01141_Holdemanella_biformis_DSM_3989 | > | 0 | 15.8 | 2.6 | 0.0982 | 0.9402 | 1.9188 | −0.9402 |
| CAG01208_Coprococcus_catus_GD_7 | > | 0 | 84.2 | 69.2 | 0.3399 | 0.7187 | 1.6456 | −0.7187 |
| CAG00413_Bacteroides_sp_CAG_144 | > | 0 | 10.5 | 33.3 | 0.1084 | −0.5812 | 0.6684 | 0.5812 |

| | | | | NR Mean | |
|---|---|---|---|---|---|
| Group | R_OddsRatio | rank_RFECV | rank_RFE | relabund | NR Sem |
| CAG00008_Clostridium_bolteae_ATCC_BAA_613 | 0.5158 | 1 | 1 | 0.00806075 | 0.00605804 |
| CAG01039_Faecalibacterium_cf_prausnitzii_KLE1255 | 0.5449 | 1 | 1 | 0.00364533 | 0.00295908 |
| CAG00473_Prevotella_sp_CAG_617 | 0.5017 | 1 | 1 | 0.00378162 | 0.00261518 |
| CAG00487_Prevotella_sp_CAG_279 | 0.5901 | 1 | 1 | 0.00059085 | 0.00047993 |
| CAG00140_Subdoligranulum_sp_4_3_54A2FAA | 0.4631 | 1 | 1 | 0.00380225 | 0.00120314 |
| CAG01141_Holdemanella_biformis_DSM_3989 | 0.5212 | 1 | 1 | 0.0015759 | 0.00087372 |
| CAG01208_Coprococcus_catus_GD_7 | 0.6077 | 1 | 1 | 0.00134292 | 0.00056097 |
| CAG00413_Bacteroides_sp_CAG_144 | 1.4961 | 1 | 1 | 3.884e−05 | 2.907e−05 |

| | R Mean | | | log2FR | P value |
|---|---|---|---|---|---|
| Group | relabund | R Sem | FR R/NR | R/NR | NR vs R |
| CAG00008_Clostridium_bolteae_ATCC_BAA_613 | 0.00051335 | 0.00014219 | 0.06 | −3.97 | 0.00975 |
| CAG01039_Faecalibacterium_cf_prausnitzii_KLE1255 | 0.0007401 | 0.00021316 | 0.2 | −2.3 | 0.21913 |
| CAG00473_Prevotella_sp_CAG_617 | 0.0 | 0.0 | 0.0 | −inf | 0.04363 |
| CAG00487_Prevotella_sp_CAG_279 | 0.0 | 0.0 | 0.0 | −inf | 0.04363 |
| CAG00140_Subdoligranulum_sp_4_3_54A2FAA | 0.00128653 | 0.00020791 | 0.34 | −1.56 | 0.08193 |
| CAG01141_Holdemanella_biformis_DSM_3989 | 6.256e−05 | 6.256e−05 | 0.04 | −4.65 | 0.05935 |
| CAG01208_Coprococcus_catus_GD_7 | 0.00040444 | 7.399e−05 | 0.3 | −1.73 | 0.36682 |
| CAG00413_Bacteroides_sp_CAG_144 | 0.00195009 | 0.00062503 | 50.2 | 5.65 | 0.03684 |

TABLE 22
Statistics for the species selected in Model 5.2.

| | | | NR (n = | R (n = | | | NR_Odds | |
|---|---|---|---|---|---|---|---|---|
| Group | op. | Thr | 19) (%) | 39) (%) | Pval_Fisher | NR_coeff | Ratio | R_coeff |
| CAG00048_1_Clostridium_sp_CAG_226 | > | 0 | 21.1 | 5.1 | 0.0828 | 0.7112 | 1.6372 | −0.7112 |
| CAG00300_Prevotella_sp_CAG_891 | > | 0 | 15.8 | 0.0 | 0.0314 | 0.8931 | 1.8571 | −0.8931 |
| CAG00473_Prevotella_sp_CAG_617 | > | 0 | 10.5 | 0.0 | 0.1034 | 1.0042 | 2.0058 | −1.0042 |
| CAG00650_Dorea_formicigenerans_ATCC_27755 | > | 0 | 84.2 | 92.3 | 0.3822 | 1.1282 | 2.1858 | −1.1282 |
| CAG00720_Anaerotruncus_colihominis_DSM_17241 | > | 0 | 84.2 | 69.2 | 0.3399 | 1.2569 | 2.3898 | −1.2569 |
| CAG00727_Eggerthella_lenta_DSM_2243 | > | 0 | 78.9 | 48.7 | 0.0458 | 1.2397 | 2.3615 | −1.2397 |
| CAG00963_Clostridium_sp_CAG_524 | > | 0 | 10.5 | 0.0 | 0.1034 | 0.7595 | 1.6929 | −0.7595 |
| CAG01141_Holdemanella_biformis_DSM_3989 | > | 0 | 15.8 | 2.6 | 0.0982 | 1.0235 | 2.0328 | −1.0235 |

| | R_Odds | | | NR Mean | |
|---|---|---|---|---|---|
| Group | Ratio | rank RFECV | rank RFE | relabund | NR Sem |
| CAG00048_1_Clostridium_sp_CAG_226 | 0.6108 | 1 | 1 | 6.032e−05 | 3.159e−05 |
| CAG00300_Prevotella_sp_CAG_891 | 0.5385 | 1 | 1 | 7.957e−05 | 5.076e−05 |
| CAG00473_Prevotella_sp_CAG_617 | 0.4986 | 1 | 1 | 0.00378162 | 0.00261518 |
| CAG00650_Dorea_formicigenerans_ATCC_27755 | 0.4575 | 1 | 1 | 0.00129344 | 0.00043426 |
| CAG00720_Anaerotruncus_colihominis_DSM_17241 | 0.4184 | 1 | 1 | 0.00086591 | 0.00038685 |
| CAG00727_Eggerthella_lenta_DSM_2243 | 0.4235 | 1 | 1 | 0.00063799 | 0.00031339 |
| CAG00963_Clostridium_sp_CAG_524 | 0.5907 | 1 | 1 | 5.774e−05 | 4.984e−05 |
| CAG01141_Holdemanella_biformis_DSM_3989 | 0.4919 | 1 | 1 | 0.0015759 | 0.00087372 |

| | R Mean | | | log2FR | P value |
|---|---|---|---|---|---|
| Group | relabund | R Sem | FR R/NR | R/NR | NR vs R |
| CAG00048_1_Clostridium_sp_CAG_226 | 3.2e−06 | 2.68e−06 | 0.05 | −4.24 | 0.05012 |
| CAG00300_Prevotella_sp_CAG_891 | 0.0 | 0.0 | 0.0 | −inf | 0.01229 |
| CAG00473_Prevotella_sp_CAG_617 | 0.0 | 0.0 | 0.0 | −inf | 0.04363 |
| CAG00650_Dorea_formicigenerans_ATCC_27755 | 0.00044294 | 6.381e−05 | 0.34 | −1.55 | 0.1252 |
| CAG00720_Anaerotruncus_colihominis_DSM_17241 | 0.00010478 | 2.71e−05 | 0.12 | −3.05 | 0.01338 |
| CAG00727_Eggerthella_lenta_DSM_2243 | 9.214e−05 | 2.989e−05 | 0.14 | −2.79 | 0.00697 |
| CAG00963_Clostridium_sp_CAG_524 | 0.0 | 0.0 | 0.0 | −inf | 0.04363 |
| CAG01141_Holdemanella_biformis_DSM_3989 | 6.256e−05 | 6.256e−05 | 0.04 | −4.65 | 0.05935 |

[0262] Taking into account the bacterial species (n=183, above 1083 total species, 16.9% of the total microbial composition) having an average relative abundance greater than or equal to 0.001 if expressed in the interval [0:1] (thus, the 0.1%) within the overall RCC cohort, we applied the second strategy (machine-learning) for 58 RCC patients (NR=19; R=39) with no antibiotic usage history and OUTCOME_1 criterion. After a first round of feature selection, RFECV gave a rank=1 to 20 species which collectively, after a 5-fold cross-validation, were able to predict 100% of NR and 92% of R subjects, with a CV_AUC=0.917 and an AUC=1 (model 6.1). After a second round of feature selection, RFE gave a rank=1 to 8 species which were selected for the subsequent logistic regression classifier. The model built on these 8 species gave an overall predictability of 84.48% (model 6.2, FIG. 6), and the summary statistics for these species are reported in Table 23 below. In order to measure the goodness of the model, after a 5-fold cross-validation performed on a subset of the original dataset, the model itself was able to predict 67% of NR and 100% of R subjects, with a CV_AUC=0.917 and an AUC=0.889. This last model was designed to be more affordable in case of problems in fecal samples storage, sequencing, stiffness, etc.

[0263] According to the Models 4.2, 5.2 and 6.2, which were modeled on no antibiotic usage history and OUTCOME_1 criterion and were all based on 8 bacterial species in order to be properly compared, it is shown that the Model 5.2 has the highest predictability (93.1%) with optimal CV_AUC and AUC.

TABLE 23
Statistics for the species selected in Model 6.2.

| | | | NR (n = | R (n = | | | NR_Odds | |
|---|---|---|---|---|---|---|---|---|
| Group | op. | Thr | 19) (%) | 39) (%) | Pval_Fisher | NR_coeff | Ratio | R_coeff |
| CAG00243_Lachnospiraceae_bacterium_1_1_57FAA | > | 0 | 84.2 | 89.7 | 0.6726 | 1.2907 | 2.4465 | −1.2907 |
| CAG00008_Clostridium_bolteae_ATCC_BAA_613 | > | 0 | 94.7 | 94.9 | 1.0 | 0.8848 | 1.8465 | −0.8848 |
| CAG00698_Ruminococcus_sp_CAG_177 | > | 0 | 15.8 | 10.3 | 0.6726 | 0.9776 | 1.9691 | −0.9776 |
| CAG00473_Prevotella_sp_CAG_617 | > | 0 | 10.5 | 0.0 | 0.1034 | 0.9997 | 1.9996 | −0.9997 |
| CAG00327_Faecalibacterium_sp_CAG_74 | > | 0 | 36.8 | 61.5 | 0.0973 | 1.0697 | 2.099 | −1.0697 |
| CAG01039_Faecalibacterium_cf_prausnitzii_KLE1255 | > | 0 | 73.7 | 51.3 | 0.1561 | 0.7806 | 1.7178 | −0.7806 |
| CAG00897_Firmicutes_bacterium_CAG_83 | > | 0 | 89.5 | 89.7 | 1.0 | 0.8376 | 1.7871 | −0.8376 |
| CAG00766_Firmicutes_bacterium_CAG_176 | > | 0 | 36.8 | 48.7 | 0.4172 | 0.7459 | 1.6771 | −0.7459 |

| | R_Odds | | | NR Mean | |
|---|---|---|---|---|---|
| Group | Ratio | rank_RFECV | rank_RFE | relabund | NR Sem |
| CAG00243_Lachnospiraceae_bacterium_1_1_57FAA | 0.4087 | 1 | 1 | 0.0104986 | 0.00482111 |
| CAG00008_Clostridium_bolteae_ATCC_BAA_613 | 0.5416 | 1 | 1 | 0.00806075 | 0.00605804 |
| CAG00698_Ruminococcus_sp_CAG_177 | 0.5078 | 1 | 1 | 0.00683429 | 0.00584606 |
| CAG00473_Prevotella_sp_CAG_617 | 0.5001 | 1 | 1 | 0.00378162 | 0.00261518 |
| CAG00327_Faecalibacterium_sp_CAG_74 | 0.4764 | 1 | 1 | 0.00262438 | 0.0019694 |
| CAG01039_Faecalibacterium_cf_prausnitzii_KLE1255 | 0.5821 | 1 | 1 | 0.00364533 | 0.00295908 |
| CAG00897_Firmicutes_bacterium_CAG_83 | 0.5596 | 1 | 1 | 0.00380745 | 0.00159185 |
| CAG00766_Firmicutes_bacterium_CAG_176 | 0.5963 | 1 | 1 | 0.01478181 | 0.00761963 |

| | R Mean | | Fold Ratio | log2FR | P value |
|---|---|---|---|---|---|
| Group | relabund | R Sem | (FR) R/NR | R/NR | NR vs R |
| CAG00243_Lachnospiraceae_bacterium_1_1_57FAA | 0.00156745 | 0.00034161 | 0.15 | −2.74 | 0.42608 |
| CAG00008_Clostridium_bolteae_ATCC_BAA_613 | 0.00051335 | 0.00014219 | 0.06 | −3.97 | 0.00975 |
| CAG00698_Ruminococcus_sp_CAG_177 | 0.00013458 | 8.414e−05 | 0.02 | −5.67 | 0.51949 |
| CAG00473_Prevotella_sp_CAG_617 | 0.0 | 0.0 | 0.0 | −inf | 0.04363 |
| CAG00327_Faecalibacterium_sp_CAG_74 | 0.00046816 | 0.00013167 | 0.18 | −2.49 | 0.518 |
| CAG01039_Faecalibacterium_cf_prausnitzii_KLE1255 | 0.0007401 | 0.00021316 | 0.2 | −2.3 | 0.21913 |
| CAG00897_Firmicutes_bacterium_CAG_83 | 0.00166388 | 0.00044938 | 0.44 | −1.19 | 0.35326 |
| CAG00766_Firmicutes_bacterium_CAG_176 | 0.00510704 | 0.00148355 | 0.35 | −1.53 | 0.74374 |

### Example 7: Predictive Models for RCC Patients with No Antibiotic Usage, OUTCOME 1 Criterion

[0264] According to the results obtained in Example 6, and due to the fact that non-responders (NR) are predicted better than responders (R) in the first two models proposed with 8 species (FIG. 7), while is the opposite for the last model, we took into consideration the logistic regression β coefficients relative to NR for Models 4.2 and 5.2, and the logistic regression β coefficients relative to R for the Model 6.2.

[0265] Regarding the Model 4.2, and according to the g coefficients of NR (NR_coeff), the probability estimate (expressed as a percentage) of belonging to NR cohort for a tested subject JD is calculated as follows:

P_{NR(JD)}=1/[1+exp\hat{ }−(0.955*CAG00008+

0.8761*CAG01039+

0.9951*CAG00473+

0.7609*CAG00487+

1.1107*CAG00140+

0.9402*CAG01141+

0.7187*CAG01208+

−0.5812*CAG00413)] [6]

[0266] In equation [6], “CAGXXXXX” represents the relative abundance of the bacterial species defined by the recited CAG, in a stool sample from the tested subject JD. These relative abundances need to be expressed as standardized values (zero mean and unit variance). The best option is to standardize the “abundances pattern” of the tested subject with a bundle of known “reference patterns”, and the present invention refers a claim of a Python script used to ease the computation of the P_{NR} (JD). From the standardized abundance pattern of a tested subject, the equation [6] can be applied to predict his/her belonging to the NR cohort with a model predictability of 87.93% and a success rate of 100%.

[0267] Regarding the Model 5.2, and according to the β coefficients of NR (NR_coeff), the probability estimate (expressed as a percentage) of belonging to NR cohort for a tested subject JD is calculated as follows:

P_{NR(JD)}=1/[1+exp\hat{ }−(0.7112*CAG00048_1+

0.8931*CAG00300+

1.0042*CAG00473+

1.1282*CAG00650+

1.2569*CAG00720+

1.2397*CAG00727+

0.7595*CAG00963+

1.0235*CAG01141)] [7]

[0268] In equation [7], “CAGXXXXX” represents the relative abundance of the bacterial species defined by the recited CAG, in a stool sample from the tested subject JD. These relative abundances need to be expressed as standardized values (zero mean and unit variance). The best option is to standardize the “abundances pattern” of the tested subject with a bundle of known “reference patterns”, and the present invention refers a claim of a Python script used to ease the computation of the P_{NR} (JD). From the standardized abundance pattern of a tested subject, the equation [7] can be applied to predict his/her belonging to the NR cohort with a model predictability of 93.1% and a success rate of 100%.

[0269] Regarding the Model 6.2, and according to the coefficients of R (R_coeff), the probability estimate (expressed as a percentage) of belonging to R cohort for a tested subject JD is calculated as follows:

P_{R(JD)}=1/[1+exp\hat{ }−(−1.2907*CAG00243+

−0.8848*CAG00008+

−0.9776*CAG00698+

−0.9997*CAG00473+

−1.0697*CAG00327+

−0.7806*CAG01039+

−0.8376*CAG00897+

−0.7459*CAG00766)] [8]

[0270] In equation [8], “CAGXXXXX” represents the relative abundance of the bacterial species defined by the recited CAG, in a stool sample from the tested subject JD. These relative abundances need to be expressed as standardized values (zero mean and unit variance). The best option is to standardize the “abundances pattern” of the tested subject with a bundle of known “reference patterns”, and the present invention refers a claim of a Python script used to ease the computation of the P_{R} (JD). From the standardized abundance pattern of a tested subject, the equation [8] could be applied to predict his/her belonging to the R cohort with a model predictability of 84.48% and a success rate of 100%.

### Example 8: Results for RCC Patients Regardless Antibiotic Usage, OUTCOME 2 Criterion

[0271] In this example, three different models were built based on a bundle of 67 “reference patterns”, which are the standardized abundances profiles (zero mean and unit variance) obtained from the 67 samples used in training the logistic regression models. Standardization is necessary to homogenize the dynamic range of bacterial species abundances.

[0272] Based on the first strategy applied to 67 RCC patients (NR=37; R=30) with unknown antibiotic usage history and OUTCOME_2 criterion (TPP>6 months), we selected 10 bacterial species that gave a logistic regression model overall predictability equal to 65.22% (model 7.1). In order to measure the goodness of the model with 10 species, after a 5-fold cross-validation performed on a subset of the original dataset, the model itself was able to predict 78% of NR and 44% of R subjects, with a CV_AUC=0.370 and an AUC=0.716. Upon RFECV and RFE feature selection, 8 species were selected from the aforementioned 10: the model built on these 8 species gave an overall predictability of 66.67% (model 7.2, FIG. 7), and the summary statistics for these species are reported in Table 24. In order to measure the goodness of the model, after a 5-fold cross-validation performed on a subset of the original dataset, the model itself was able to predict 78% of NR and 44% of R subjects, with a CV_AUC=0.481 and an AUC=0.704.

[0273] Based on the second strategy (machine-learning) applied to 67 RCC patients (NR=37; R=30) with unknown antibiotic usage history and OUTCOME_2 criterion, we took into account all the bacterial species of the dataset (n=1112). After a first round of feature selection, RFECV gave a rank=1 to 1070 species which collectively, after a 5-fold cross-validation, were able to predict 11% of NR and 100% of R subjects, with a CV_AUC=0.667 and an AUC=0.667 (model 8.1). Upon a second round of feature selection, RFE gave a rank=1 to 8 species, which were selected for the subsequent logistic regression classifier. The model built on these 8 species gave an overall predictability of 88.41% (model 8.2, FIG. 7), and the summary statistics for these species are reported in Table 25. In order to measure the goodness of the model, after a 5-fold cross-validation performed on a subset of the original dataset, the model itself was able to predict 100% of NR and 67% of R subjects, with a CV_AUC=0.667 and an AUC=0.926.

[0274] Taking into account the bacterial species (n=181, above 1112 total species, 16.3% of the total microbial composition) having an average relative abundance greater than or equal to 0.001 if expressed in the interval [0:1] (thus, the 0.1%) within the overall RCC cohort, we applied the second strategy (machine-learning) for 67 RCC patients (NR=37; R=30) with unknown antibiotic usage history and OUTCOME_2 criterion. After a first round of feature selection, RFECV gave a rank=1 to 175 species which collectively, after a 5-fold cross-validation, were able to predict 33% of NR and 78% of R subjects, with a CV_AUC=0.222 and an AUC=0.605 (model 9.1). After a second round of feature selection, RFE gave a rank=1 to 8 species which were selected for the subsequent logistic regression classifier. The model built on these 8 species gave an overall predictability of 88.41% (model 9.2, FIG. 7), and the summary statistics for these species are reported in Table 26. In order to measure the goodness of the model, after a 5-fold cross-validation performed on a subset of the original dataset, the model itself was able to predict 89% of NR and 78% of R subjects, with a CV_AUC=0.481 and an AUC=0.864. This last model was designed to be more affordable in case of problems in fecal samples storage, sequencing, stiffness, etcetera.

[0275] According to all Models, which were modeled on unknown antibiotic usage history and OUTCOME_2 criterion, it is shown that the Model 8.2 has a good predictability (84.41%) with good CV_AUC and AUC, and can be chosen as the most discriminant among NR and R patients.

TABLE 24
Statistics for the species selected in Model 7.2.

| | | | NR (n = | R (n = | | | NR_Odds | |
|---|---|---|---|---|---|---|---|---|
| Group | op. | Thr | 37) (%) | 30) (%) | Pval_Fisher | NR_coeff | Ratio | R_coeff |
| CAG00782_Eubacterium_rectale_CAG_36 | > | 0 | 86.5 | 83.3 | 0.7431 | −0.2034 | 0.8685 | 0.2009 |
| CAG00013_Clostridiales_bacterium_1_7_47FAA | > | 0 | 78.4 | 76.7 | 1.0 | 0.4092 | 1.328 | −0.348 |
| CAG00873_Butyricimonas_virosa_DSM_23226 | > | 0 | 70.3 | 73.3 | 1.0 | 0.2708 | 1.2065 | −0.2435 |
| CAG01141_Holdemanella_biformis_DSM_3989 | > | 0 | 13.5 | 0.0 | 0.0599 | 0.7665 | 1.7011 | −0.6748 |
| CAG00668_Azospirillum_sp_CAG_239 | > | 0 | 0.0 | 10.0 | 0.0848 | −0.5899 | 0.6644 | 0.6848 |
| CAG00669_Firmicutes_bacterium_CAG_103 | > | 0 | 32.4 | 53.3 | 0.1345 | −0.5181 | 0.6983 | 0.4599 |
| CAG00886_Sutterella_sp_CAG_351 | > | 0 | 0.0 | 10.0 | 0.0848 | −0.8415 | 0.5581 | 0.9265 |
| CAG00889_Megasphaera_elsdenii_14_14 | > | 0 | 0.0 | 13.3 | 0.0358 | −0.7339 | 0.6013 | 0.8563 |

| | R_Odds | | | NR Mean | |
|---|---|---|---|---|---|
| Group | Ratio | rank_RFECV | rank_RFE | relabund | NR Sem |
| CAG00782_Eubacterium_rectale_CAG_36 | 1.1494 | 3 | 1 | 0.01855862 | 0.00499803 |
| CAG00013_Clostridiales_bacterium_1_7_47FAA | 0.7857 | 1 | 1 | 0.00056515 | 0.00023638 |
| CAG00873_Butyricimonas_virosa_DSM_23226 | 0.8447 | 2 | 1 | 0.00109418 | 0.00020006 |
| CAG01141_Holdemanella_biformis_DSM_3989 | 0.6264 | 1 | 1 | 0.00154882 | 0.00079727 |
| CAG00668_Azospirillum_sp_CAG_239 | 1.6075 | 1 | 1 | 0.0 | 0.0 |
| CAG00669_Firmicutes_bacterium_CAG_103 | 1.3754 | 1 | 1 | 0.00062774 | 0.00020461 |
| CAG00886_Sutterella_sp_CAG_351 | 1.9007 | 1 | 1 | 0.0 | 0.0 |
| CAG00889_Megasphaera_elsdenii_14_14 | 1.8104 | 1 | 1 | 0.0 | 0.0 |

| | R Mean | | Fold Ratio | log2FR | P value |
|---|---|---|---|---|---|
| Group | relabund | R Sem | (FR) R/NR | R/NR | NR vs R |
| CAG00782_Eubacterium_rectale_CAG_36 | 0.0158587 | 0.00446139 | 0.85 | −0.23 | 0.84974 |
| CAG00013_Clostridiales_bacterium_1_7_47FAA | 0.00030914 | 0.00011594 | 0.55 | −0.87 | 0.57258 |
| CAG00873_Butyricimonas_virosa_DSM_23226 | 0.00063137 | 0.00012234 | 0.58 | −0.79 | 0.29268 |
| CAG01141_Holdemanella_biformis_DSM_3989 | 0.0 | 0.0 | 0.0 | −inf | 0.03925 |
| CAG00668_Azospirillum_sp_CAG_239 | 0.00068027 | 0.00048003 | 0.0 | −inf | 0.05297 |
| CAG00669_Firmicutes_bacterium_CAG_103 | 0.00180915 | 0.00055553 | 2.88 | 1.53 | 0.0513 |
| CAG00886_Sutterella_sp_CAG_351 | 0.0007941 | 0.00060463 | 0.0 | −inf | 0.05297 |
| CAG00889_Megasphaera_elsdenii_14_14 | 0.00133655 | 0.00079124 | 0.0 | −inf | 0.02403 |

TABLE 25
Statistics for the species selected in Model 8.2.

| | | | NR (n = | R (n = | | | NR_Odds | |
|---|---|---|---|---|---|---|---|---|
| Group | op. | Thr | 37) (%) | 30) (%) | Pval_Fisher | NR_coeff | Ratio | R_coeff |
| CAG00211_Firmicutes_bacterium_CAG_227 | > | 0 | 16.2 | 10.0 | 0.7206 | 0.6422 | 1.5607 | −0.5746 |
| CAG00474_Sutterella_wadsworthensis_2_1_59BFAA | > | 0 | 8.1 | 23.3 | 0.0982 | −1.0581 | 0.4803 | 1.1768 |
| CAG00624_Firmicutes_bacterium_CAG_552 | > | 0 | 0.0 | 16.7 | 0.0148 | −0.8984 | 0.5365 | 1.0055 |
| CAG00650_Dorea_formicigenerans_ATCC_27755 | > | 0 | 81.1 | 90.0 | 0.4926 | 1.3189 | 2.4947 | −1.271 |
| CAG00676_Firmicutes_bacterium_CAG_176 | > | 0 | 16.2 | 20.0 | 0.7553 | −0.7324 | 0.6019 | 0.0679 |
| CAG00771_Clostridium_sp_CAG_413 | > | 0 | 0.0 | 10.0 | 0.0848 | −0.6623 | 0.6319 | 0.4204 |
| CAG01197_Dialister_succinatiphilus_YIT_11850 | > | 0 | 8.1 | 30.0 | 0.0268 | −1.1372 | 0.4546 | 0.9425 |
| CAG01321_Faecalibacterium_prausnitzii_SL3_3 | > | 0 | 83.8 | 90.0 | 0.7206 | −0.8525 | 0.5538 | 0.8843 |

| | R_Odds | | | NR Mean | |
|---|---|---|---|---|---|
| Group | Ratio | rank_RFECV | rank_RFE | relabund | NR Sem |
| CAG00211_Firmicutes_bacterium_CAG_227 | 0.6715 | 1 | 1 | 5.982e−05 | 2.678e−05 |
| CAG00474_Sutterella_wadsworthensis_2_1_59BFAA | 2.2608 | 1 | 1 | 0.00023198 | 0.00014013 |
| CAG00624_Firmicutes_bacterium_CAG_552 | 2.0076 | 1 | 1 | 0.0 | 0.0 |
| CAG00650_Dorea_formicigenerans_ATCC_27755 | 0.4144 | 1 | 1 | 0.00092982 | 0.0002447 |
| CAG00676_Firmicutes_bacterium_CAG_176 | 1.0482 | 1 | 1 | 0.0001876 | 0.00010047 |
| CAG00771_Clostridium_sp_CAG_413 | 1.3383 | 1 | 1 | 0.0 | 0.0 |
| CAG01197_Dialister_succinatiphilus_YIT_11850 | 1.9219 | 1 | 1 | 3.257e−05 | 2.681e−05 |
| CAG01321_Faecalibacterium_prausnitzii_SL3_3 | 1.8458 | 1 | 1 | 0.00480104 | 0.00091279 |

| | R Mean | | Fold Ratio | log2FR | P value |
|---|---|---|---|---|---|
| Group | relabund | R Sem | (FR) R/NR | R/NR | NR vs R |
| CAG00211_Firmicutes_bacterium_CAG_227 | 1.092e−05 | 7.11e−06 | 0.18 | −2.45 | 0.39482 |
| CAG00474_Sutterella_wadsworthensis_2_1_59BFAA | 0.0019427 | 0.00086912 | 8.37 | 3.07 | 0.07186 |
| CAG00624_Firmicutes_bacterium_CAG_552 | 7.419e−05 | 3.936e−05 | 0.0 | −inf | 0.0109 |
| CAG00650_Dorea_formicigenerans_ATCC_27755 | 0.00039615 | 7.209e−05 | 0.43 | −1.23 | 0.30037 |
| CAG00676_Firmicutes_bacterium_CAG_176 | 0.00087187 | 0.00055567 | 4.65 | 2.22 | 0.67128 |
| CAG00771_Clostridium_sp_CAG_413 | 5.164e−05 | 3.902e−05 | 0.0 | −inf | 0.05297 |
| CAG01197_Dialister_succinatiphilus_YIT_11850 | 0.00014594 | 5.12e−05 | 4.48 | 2.16 | 0.01886 |
| CAG01321_Faecalibacterium_prausnitzii_SL3_3 | 0.01054466 | 0.00251204 | 2.2 | 1.14 | 0.13467 |

TABLE 26
Statistics for the species selected in Model 9.2.

| | | | NR (n = | R (n = | | | NR_Odds | |
|---|---|---|---|---|---|---|---|---|
| Group | op. | Thr | 37) (%) | 30) (%) | Pval_Fisher | NR_coeff | Ratio | R_coeff |
| CAG00557_Ruminococcus_callidus_ATCC_27760 | > | 0 | 24.3 | 33.3 | 0.4303 | 0.9341 | 1.9107 | −0.8033 |
| CAG00601_uncultured_Faecalibacterium_sp_{—} | > | 0 | 70.3 | 70.0 | 1.0 | 0.8927 | 1.8567 | −1.0252 |
| CAG00607_Eubacterium_sp_CAG_251 | > | 0 | 37.8 | 30.0 | 0.6076 | 0.7108 | 1.6367 | −0.5952 |
| CAG00669_Firmicutes_bacterium_CAG_103 | > | 0 | 32.4 | 53.3 | 0.1345 | −1.2341 | 0.4251 | 1.1675 |
| CAG00861_Oscillibacter_sp_CAG_241 | > | 0 | 37.8 | 26.7 | 0.4347 | 1.0379 | 2.0532 | −0.9407 |
| CAG00880_Subdoligranulum_sp_CAG_314 | > | 0 | 21.6 | 36.7 | 0.188 | −1.0016 | 0.4995 | 0.8717 |
| CAG00937_Clostridium_sp_CAG_7 | > | 0 | 86.5 | 90.0 | 0.7225 | −0.872 | 0.5464 | 0.9665 |
| CAG01321_Faecalibacterium_prausnitzii_SL3_3 | > | 0 | 83.8 | 90.0 | 0.7206 | −0.8362 | 0.5601 | 0.8646 |

| | R_Odds | | | NR Mean | |
|---|---|---|---|---|---|
| Group | Ratio | rank_RFECV | rank_RFE | relabund | NR Sem |
| CAG00557_Ruminococcus_callidus_ATCC_27760 | 0.573 | 1 | 1 | 0.00160652 | 0.00069973 |
| CAG00601_uncultured_Faecalibacterium_sp_{—} | 0.4913 | 1 | 1 | 0.00483175 | 0.0009123 |
| CAG00607_Eubacterium_sp_CAG_251 | 0.662 | 1 | 1 | 0.00225675 | 0.00078393 |
| CAG00669_Firmicutes_bacterium_CAG_103 | 2.2462 | 1 | 1 | 0.00062774 | 0.00020461 |
| CAG00861_Oscillibacter_sp_CAG_241 | 0.521 | 1 | 1 | 0.00475511 | 0.00195861 |
| CAG00880_Subdoligranulum_sp_CAG_314 | 1.8298 | 1 | 1 | 0.00084578 | 0.00045115 |
| CAG00937_Clostridium_sp_CAG_7 | 1.9541 | 1 | 1 | 0.00087447 | 0.00015342 |
| CAG01321_Faecalibacterium_prausnitzii_SL3_3 | 1.8208 | 1 | 1 | 0.00480104 | 0.00091279 |

| | R Mean | | Fold Ratio | log2FR | P value |
|---|---|---|---|---|---|
| Group | relabund | R Sem | (FR) R/NR | R/NR | NR vs R |
| CAG00557_Ruminococcus_callidus_ATCC_27760 | 0.0004874 | 0.00020579 | 0.3 | −1.72 | 0.69767 |
| CAG00601_uncultured_Faecalibacterium_sp_{—} | 0.00223149 | 0.00050757 | 0.46 | −1.11 | 0.12832 |
| CAG00607_Eubacterium_sp_CAG_251 | 0.00059667 | 0.00025431 | 0.26 | −1.92 | 0.2972 |
| CAG00669_Firmicutes_bacterium_CAG_103 | 0.00180915 | 0.00055553 | 2.88 | 1.53 | 0.0513 |
| CAG00861_Oscillibacter_sp_CAG_241 | 0.000911 | 0.00043555 | 0.19 | −2.38 | 0.26701 |
| CAG00880_Subdoligranulum_sp_CAG_314 | 0.00390209 | 0.00155646 | 4.61 | 2.21 | 0.10582 |
| CAG00937_Clostridium_sp_CAG_7 | 0.00125129 | 0.00028594 | 1.43 | 0.52 | 0.48764 |
| CAG01321_Faecalibacterium_prausnitzii_SL3_3 | 0.01054466 | 0.00251204 | 2.2 | 1.14 | 0.13467 |

### Example 9: Predictive Models for RCC Patients Regardless Antibiotic Usage, OUTCOME 2 Criterion

[0276] According to the results obtained in Example 8, we took into consideration the logistic regression β coefficients relative to NR for Models 7.2, 8.2 and 9.2.

[0277] For the Model 7.2, according to the β coefficients of non-responders (NR_coeff), the probability estimate (expressed as a percentage) of belonging to NR cohort for a tested subject JD is calculated as follows:

P_{NR(JD)}=1/[1+exp\hat{ }−(−0.2034*CAG00782+

0.4092*CAG00013+

0.2708*CAG00873+

0.7665*CAG01141+

−0.5899*CAG00668+

−0.5181*CAG00669+

−0.8415*CAG00886+

−0.7339*CAG00889)] [9]

[0278] In equation [9], “CAGXXXXX” represents the relative abundance of the bacterial species defined by the recited CAG, in a stool sample from the tested subject JD. These relative abundances need to be expressed as standardized values (zero mean and unit variance). The best option is to standardize the “abundances pattern” of the tested subject with a bundle of known “reference patterns”, and the present invention refers a claim of a Python script used to ease the computation of the P_{NR} (JD). From the standardized abundance pattern of a tested subject, the equation [9] can be applied to predict his/her belonging to the NR cohort with a model predictability of 66.67% and a success rate of 78%.

[0279] For the Model 8.2, according to the β coefficients of NR (NR_coeff), the probability estimate (expressed as a percentage) of belonging to NR cohort for a tested subject JD is calculated as follows:

P_{NR(JD)}=1/[1+exp\hat{ }−(0.6422*CAG00211+

−1.0581*CAG00474+

−0.8984*CAG00624+

1.3189*CAG00650+

−0.7324*CAG00676+

−0.6623*CAG00771+

−1.1372*CAG01197+

−0.8525*CAG01321)] [10]

[0280] In equation [10], “CAGXXXXX” represents the relative abundance of the bacterial species defined by the recited CAG, in a stool sample from the tested subject JD. These relative abundances need to be expressed as standardized values (zero mean and unit variance). The best option is to standardize the “abundances pattern” of the tested subject with a bundle of known “reference patterns”, and the present invention refers a claim of a Python script used to ease the computation of the P_{NR} (JD). From the standardized abundance pattern of a tested subject, the equation [10] can be applied to predict his/her belonging to the NR cohort with a model predictability of 84.41% and a success rate of 100%.

[0281] For the Model 9.2, according to the β coefficients of NR (NR_coeff), the probability estimate (expressed as a percentage) of belonging to NR cohort for a tested subject JD is calculated as follows:

P_{NR(JD)}=1/[1+exp\hat{ }−(0.9341*CAG00557+

0.8927*CAG00601+

0.7108*CAG00607+

−1.2341*CAG00669+

1.0379*CAG00861+

−1.0016*CAG00880+

−0.872*CAG00937+

−0.8362*CAG01321)] [11]

[0282] In equation [11], “CAGXXXXX” represents the relative abundance of the bacterial species defined by the recited CAG, in a stool sample from the tested subject JD. These relative abundances need to be expressed as standardized values (zero mean and unit variance). The best option is to standardize the “abundances pattern” of the tested subject with a bundle of known “reference patterns”, and the present invention refers a claim of a Python script used to ease the computation of the P_{NR} (JD). From the standardized abundance pattern of a tested subject, the equation [11] can be applied to predict his/her belonging to the NR cohort with a model predictability of 88.41% and a success rate of 89%.

### Example 10: Results for RCC Patients with No Antibiotic Usage, OUTCOME 2 Criterion

[0283] In this example, three different models were built based on a bundle of 56 “reference patterns”, which are the standardized abundances profiles (zero mean and unit variance) obtained from the 56 samples used in training the logistic regression models. Standardization is necessary to homogenize the dynamic range of bacterial species abundances.

[0284] Based on the first strategy applied to 56 RCC patients (NR=29; R=27) with no antibiotic usage history and OUTCOME_2 criterion, we selected 10 bacterial species that gave a logistic regression model overall predictability equal to 72.41% (model 10.1). In order to measure the goodness of the model with 10 species, after a 5-fold cross-validation performed on a subset of the original dataset, the model itself was able to predict 78% of NR and 67% of R subjects, with a CV_AUC=0.667 and an AUC=0.796. Upon RFECV and RFE feature selection, 8 species were selected from the aforementioned 10: the model built on these 8 species gave an overall predictability of 68.97% (model 10.2, FIG. 8), and the summary statistics for these species are reported in Table 27. In order to measure the goodness of the model, after a 5-fold cross-validation performed on a subset of the original dataset, the model itself was able to predict 89% of NR and 100% of R subjects, with a CV_AUC=0.556 and an AUC=0.981.

[0285] Based on the second strategy (machine-learning) applied to 56 RCC patients (NR=29; R=27) with no antibiotic usage history and OUTCOME_2 criterion, we took into account all the bacterial species of the dataset (n=1083). After a first round of feature selection, RFECV gave a rank=1 to 51 species which collectively, after a 5-fold cross-validation, were able to predict 89% of NR and 83% of R subjects, with a CV_AUC=0.944 and an AUC=0.944 (model 11.1). Upon a second round of feature selection, RFE gave a rank=1 to 8 species, which were selected for the subsequent logistic regression classifier. The model built on these 8 species gave an overall predictability of 91.38% (model 11.2, FIG. 8), and the summary statistics for these species are reported in Table 28. In order to measure the goodness of the model, after a 5-fold cross-validation performed on a subset of the original dataset, the model itself was able to predict 78% of NR and 100% of R subjects, with a CV_AUC=1 and an AUC=0.981.

TABLE 27
Statistics for the species selected in Model 10.2.

| | | | NR (n = | R (n = | | | NR_Odds | |
|---|---|---|---|---|---|---|---|---|
| Group | op. | Thr | 29) (%) | 27) (%) | Pval_Fisher | NR_coeff | Ratio | R_coeff |
| CAG00580_Clostridium_sp_CAG_62 | > | 0 | 75.9 | 77.8 | 1.0 | 0.2713 | 1.2069 | −0.1456 |
| CAG00013_Clostridiales_bacterium_1_7_47FAA | > | 0 | 79.3 | 74.1 | 0.7555 | 0.662 | 1.5823 | −0.5496 |
| CAG00873_Butyricimonas_virosa_DSM_23226 | > | 0 | 72.4 | 74.1 | 1.0 | 0.4991 | 1.4133 | −0.4646 |
| CAG01141_Holdemanella_biformis_DSM_3989 | > | 0 | 13.8 | 0.0 | 0.1124 | 0.6615 | 1.5817 | −0.5496 |
| CAG00668_Azospirillum_sp_CAG_239 | > | 0 | 0.0 | 11.1 | 0.1055 | −0.4506 | 0.7318 | 0.5684 |
| CAG00669_Firmicutes_bacterium_CAG_103 | > | 0 | 27.6 | 55.6 | 0.0563 | −0.6129 | 0.6539 | 0.5129 |
| CAG00886_Sutterella_sp_CAG_351 | > | 0 | 0.0 | 7.4 | 0.2279 | −0.5618 | 0.6775 | 0.6623 |
| CAG00889_Megasphaera_elsdenii_14_14 | > | 0 | 0.0 | 11.1 | 0.1055 | −0.5819 | 0.6681 | 0.7102 |

| | R_Odds | | | NR Mean | |
|---|---|---|---|---|---|
| Group | Ratio | rank_RFECV | rank_RFE | relabund | NR Sem |
| CAG00580_Clostridium_sp_CAG_62 | 0.904 | 2 | 1 | 0.00355474 | 0.00090909 |
| CAG00013_Clostridiales_bacterium_1_7_47FAA | 0.6832 | 1 | 1 | 0.00068832 | 0.00029843 |
| CAG00873_Butyricimonas_virosa_DSM_23226 | 0.7247 | 1 | 1 | 0.00123868 | 0.000242 |
| CAG01141_Holdemanella_biformis_DSM_3989 | 0.6832 | 1 | 1 | 0.00111662 | 0.00058518 |
| CAG00668_Azospirillum_sp_CAG_239 | 1.4829 | 1 | 1 | 0.0 | 0.0 |
| CAG00669_Firmicutes_bacterium_CAG_103 | 1.4269 | 1 | 1 | 0.00047936 | 0.00020785 |
| CAG00886_Sutterella_sp_CAG_351 | 1.5826 | 1 | 1 | 0.0 | 0.0 |
| CAG00889_Megasphaera_elsdenii_14_14 | 1.6361 | 1 | 1 | 0.0 | 0.0 |

| | R Mean | | Fold Ratio | log2FR | P value |
|---|---|---|---|---|---|
| Group | relabund | R Sem | (FR) R/NR | R/NR | NR vs R |
| CAG00580_Clostridium_sp_CAG_62 | 0.00216117 | 0.00057471 | 0.61 | −0.72 | 0.43804 |
| CAG00013_Clostridiales_bacterium_1_7_47FAA | 0.00017732 | 6.043e−05 | 0.26 | −1.96 | 0.27615 |
| CAG00873_Butyricimonas_virosa_DSM_23226 | 0.00057747 | 0.00012007 | 0.47 | −1.1 | 0.14061 |
| CAG01141_Holdemanella_biformis_DSM_3989 | 0.0 | 0.0 | 0.0 | −inf | 0.04946 |
| CAG00668_Azospirillum_sp_CAG_239 | 0.00075585 | 0.00053233 | 0.0 | −inf | 0.0708 |
| CAG00669_Firmicutes_bacterium_CAG_103 | 0.00194815 | 0.00061023 | 4.06 | 2.02 | 0.01602 |
| CAG00886_Sutterella_sp_CAG_351 | 0.00023671 | 0.00021212 | 0.0 | −inf | 0.14611 |
| CAG00889_Megasphaera_elsdenii_14_14 | 0.00147009 | 0.00087685 | 0.0 | −inf | 0.0708 |

TABLE 28
Statistics for the species selected in Model 11.2.

| | | | NR (n = | R (n = | | | NR_Odds | |
|---|---|---|---|---|---|---|---|---|
| Group | op. | Thr | 29) (%) | 27) (%) | Pval_Fisher | NR_coeff | Ratio | R_coeff |
| CAG00346_Eubacterium_rectale_M104_1 | > | 0 | 10.3 | 0.0 | 0.2373 | 0.9631 | 1.9495 | −0.8463 |
| CAG00530_Prevotella_sp_CAG_617 | > | 0 | 10.3 | 29.6 | 0.0965 | −1.2447 | 0.422 | 1.13 |
| CAG00601_uncultured_Faecalibacterium_sp_{—} | > | 0 | 79.3 | 74.1 | 0.7555 | 1.0027 | 2.0038 | −1.183 |
| CAG00607_Eubacterium_sp_CAG_251 | > | 0 | 37.9 | 33.3 | 0.7849 | 1.181 | 2.2673 | −0.9544 |
| CAG00646_Alistipes_sp_CAG_268 | > | 0 | 13.8 | 25.9 | 0.3224 | −0.7539 | 0.593 | 0.8929 |
| CAG00713_Firmicutes_bacterium_CAG_270 | > | 0 | 6.9 | 33.3 | 0.0184 | −0.9526 | 0.5167 | 1.0919 |
| CAG00919_Clostridium_methylpentosum_DSM_5476 | > | 0 | 17.2 | 33.3 | 0.2214 | −0.7227 | 0.606 | 0.4881 |
| CAG01158_Pseudoflavonifractor_capillosus_ATCC_29799 | > | 0 | 3.4 | 29.6 | 0.0104 | −0.9687 | 0.511 | 1.1606 |

| | R_Odds | | | NR Mean | |
|---|---|---|---|---|---|
| Group | Ratio | rank_RFECV | rank_RFE | relabund | NR Sem |
| CAG00346_Eubacterium_rectale_M104_1 | 0.5562 | 1 | 1 | 2.084e−05 | 1.172e−05 |
| CAG00530_Prevotella_sp_CAG_617 | 2.1886 | 1 | 1 | 0.00032714 | 0.0002189 |
| CAG00601_uncultured_Faecalibacterium_sp_{—} | 0.4404 | 1 | 1 | 0.00595075 | 0.00106984 |
| CAG00607_Eubacterium_sp_CAG_251 | 0.5161 | 1 | 1 | 0.00265039 | 0.00097373 |
| CAG00646_Alistipes_sp_CAG_268 | 1.8569 | 1 | 1 | 0.00020628 | 0.00010205 |
| CAG00713_Firmicutes_bacterium_CAG_270 | 2.1316 | 1 | 1 | 2.89e−06 | 2.09e−06 |
| CAG00919_Clostridium_methylpentosum_DSM_5476 | 1.4026 | 1 | 1 | 1.004e−05 | 4.17e−06 |
| CAG01158_Pseudoflavonifractor_capillosus_ATCC_29799 | 2.2355 | 1 | 1 | 6.3e−06 | 6.3e−06 |

| | R Mean | | Fold Ratio | log2FR | P value |
|---|---|---|---|---|---|
| Group | relabund | R Sem | (FR) R/NR | R/NR | NR vs R |
| CAG00346_Eubacterium_rectale_M104_1 | 0.0 | 0.0 | 0.0 | −inf | 0.09282 |
| CAG00530_Prevotella_sp_CAG_617 | 0.00163373 | 0.00059881 | 4.99 | 2.32 | 0.06874 |
| CAG00601_uncultured_Faecalibacterium_sp_{—} | 0.00227143 | 0.00053733 | 0.38 | −1.39 | 0.01999 |
| CAG00607_Eubacterium_sp_CAG_251 | 0.00066297 | 0.00028011 | 0.25 | −2.0 | 0.37879 |
| CAG00646_Alistipes_sp_CAG_268 | 0.00156952 | 0.00064613 | 7.61 | 2.93 | 0.17786 |
| CAG00713_Firmicutes_bacterium_CAG_270 | 0.00021793 | 8.762e−05 | 75.46 | 6.24 | 0.0087 |
| CAG00919_Clostridium_methylpentosum_DSM_5476 | 7.683e−05 | 3.389e−05 | 7.65 | 2.94 | 0.16102 |
| CAG01158_Pseudoflavonifractor_capillosus_ATCC_29799 | 0.00024491 | 9.486e−05 | 38.88 | 5.28 | 0.00656 |

TABLE 29
Statistics for the species selected in Model 12.2.

| | | | NR (n = | R (n = | | | NR_Odds | |
|---|---|---|---|---|---|---|---|---|
| Group | op. | Thr | 29) (%) | 27) (%) | Pval_Fisher | NR_coeff | Ratio | R_coeff |
| CAG00142_Bacteroides_stercoris_ATCC_43183 | > | 0 | 48.3 | 37.0 | 0.4303 | 1.138 | 2.2007 | −0.8803 |
| CAG00218_Bacteroides_sp_CAG_20 | > | 0 | 89.7 | 81.5 | 0.462 | 1.1396 | 2.2031 | −0.8724 |
| CAG00341_Eubacterium_sp_CAG_115 | > | 0 | 13.8 | 44.4 | 0.0174 | −1.0166 | 0.4943 | 0.6772 |
| CAG00474_Sutterella_wadsworthensis_2_1_59BFAA | > | 0 | 6.9 | 25.9 | 0.0733 | −0.8403 | 0.5585 | 0.8566 |
| CAG00508_Alistipes_obesi | > | 0 | 72.4 | 92.6 | 0.0798 | −0.7067 | 0.6127 | 0.6586 |
| CAG00880_Subdoligranulum_sp_CAG_314 | > | 0 | 13.8 | 33.3 | 0.1165 | −1.185 | 0.4398 | 1.0027 |
| CAG01263_Clostridium_clostridioforme_2_1_49FAA | > | 0 | 86.2 | 74.1 | 0.3224 | 0.8466 | 1.7982 | −0.5783 |
| CAG01321_Faecalibacterium_prausnitzii_SL3_3 | > | 0 | 79.3 | 92.6 | 0.2544 | −0.8895 | 0.5398 | 0.9053 |

| | R_Odds | | | NR Mean | |
|---|---|---|---|---|---|
| Group | Ratio | rank_RFECV | rank_RFE | relabund | NR Sem |
| CAG00142_Bacteroides_stercoris_ATCC_43183 | 0.5433 | 1 | 1 | 0.01293929 | 0.00368976 |
| CAG00218_Bacteroides_sp_CAG_20 | 0.5462 | 1 | 1 | 0.01321164 | 0.00169549 |
| CAG00341_Eubacterium_sp_CAG_115 | 1.599 | 1 | 1 | 0.00031187 | 0.00027514 |
| CAG00474_Sutterella_wadsworthensis_2_1_59BFAA | 1.8108 | 1 | 1 | 0.00020181 | 0.00015501 |
| CAG00508_Alistipes_obesi | 1.5785 | 1 | 1 | 0.00262606 | 0.00069393 |
| CAG00880_Subdoligranulum_sp_CAG_314 | 2.0038 | 1 | 1 | 0.00036879 | 0.00020934 |
| CAG01263_Clostridium_clostridioforme_2_1_49FAA | 0.6698 | 1 | 1 | 0.00425323 | 0.00240791 |
| CAG01321_Faecalibacterium_prausnitzii_SL3_3 | 1.8729 | 1 | 1 | 0.00465506 | 0.00103762 |

| | R Mean | | Fold Ratio | log2FR | P value |
|---|---|---|---|---|---|
| Group | relabund | R Sem | (FR) R/NR | R/NR | NR vs R |
| CAG00142_Bacteroides_stercoris_ATCC_43183 | 0.003047 | 0.00114758 | 0.24 | −2.09 | 0.14334 |
| CAG00218_Bacteroides_sp_CAG_20 | 0.00941315 | 0.00154558 | 0.71 | −0.49 | 0.07752 |
| CAG00341_Eubacterium_sp_CAG_115 | 0.00289445 | 0.00124963 | 9.28 | 3.21 | 0.00822 |
| CAG00474_Sutterella_wadsworthensis_2_1_59BFAA | 0.00215856 | 0.00095824 | 10.7 | 3.42 | 0.04832 |
| CAG00508_Alistipes_obesi | 0.00471117 | 0.0009454 | 1.79 | 0.84 | 0.08724 |
| CAG00880_Subdoligranulum_sp_CAG_314 | 0.00400279 | 0.00171271 | 10.85 | 3.44 | 0.05113 |
| CAG01263_Clostridium_clostridioforme_2_1_49FAA | 0.0003713 | 0.00011117 | 0.09 | −3.52 | 0.05414 |
| CAG01321_Faecalibacterium_prausnitzii_SL3_3 | 0.01086215 | 0.00270038 | 2.33 | 1.22 | 0.07615 |

[0286] Taking into account the bacterial species (n=183, above 1083 total species, 16.9% of the total microbial composition) having an average relative abundance greater than or equal to 0.001 if expressed in the interval [0:1] (thus, the 0.1%) within the overall RCC cohort, we applied the second strategy (machine-learning) for 56 RCC patients (NR=29; R=27) with no antibiotic usage history and OUTCOME_2 criterion. After a first round of feature selection, RFECV gave a rank=1 to 20 species which collectively, after a 5-fold cross-validation, were able to predict 78% of NR and 67% of R subjects, with a CV_AUC=0.833 and an AUC=0.852 (model 12.1). After a second round of feature selection, RFE gave a rank=1 to 8 species which were selected for the subsequent logistic regression classifier. The model built on these 8 species gave an overall predictability of 89.66% (model 12.2, FIG. 8), and the summary statistics for these species are reported in Table 29. In order to measure the goodness of the model, after a 5-fold cross-validation performed on a subset of the original dataset, the model itself was able to predict 78% of NR and 50% of R subjects, with a CV_AUC=0.889 and an AUC=0.611. This last model was designed to be more affordable in case of problems in fecal samples storage, sequencing, stiffness, etc.

[0287] According to the Models 10.2, 11.2 and 12.2, which were modeled on no antibiotic usage history and OUTCOME_2 criterion, and were all based on 8 bacterial species in order to be properly compared, it is shown that the Model 11.2 has the highest discriminatory power among NR and R, with good predictability (91.38%), and excellent CV_AUC and AUC.

### Example 11: Predictive Models for RCC Patients with No Antibiotic Usage, OUTCOME 2 Criterion

[0288] According to the results obtained in Example 10, and due to the fact that responders (R) are predicted better than non-responders (NR) in models 10.2 and 11.2, while is the opposite for model 12.2, and that all models were proposed with 8 species (FIG. 7) to make them comparable, we took into consideration the logistic regression β coefficients relative to R for models 10.2 and 11.2, while the logistic regression β coefficients relative to NR for model 12.2.

[0289] Regarding the Model 10.2, and according to the coefficients of R (R_coeff), the probability estimate (expressed as a percentage) of belonging to R cohort for a tested subject JD is calculated as follows:

P_{R(JD)}=1/[1+exp\hat{ }−(−0.1456*CAG00580+

−0.5496*CAG00013+

−0.4646*CAG00873+

−0.5496*CAG01141+

0.5684*CAG00668+

0.5129*CAG00669+

0.6623*CAG00886+

0.7102*CAG00889)] [12]

[0290] In equation [12], “CAGXXXXX” represents the relative abundance of the bacterial species defined by the recited CAG, in a stool sample from the tested subject JD. These relative abundances need to be expressed as standardized values (zero mean and unit variance). The best option is to standardize the “abundances pattern” of the tested subject with a bundle of known “reference patterns”, and the present invention refers a claim of a Python script used to ease the computation of the P_{R} (JD). From the standardized abundance pattern of a tested subject, the equation [12] can be applied to predict his/her belonging to the R cohort with a model predictability of 68.97% and a success rate of 100%.

[0291] Regarding the Model 11.2, and according to the β coefficients of R (R_coeff), the probability estimate (expressed as a percentage) of belonging to R cohort for a tested subject JD is calculated as follows:

P_{R(JD)}=1/[1+exp\hat{ }−(−0.8463*CAG00346+

1.13*CAG00530+

−1.183*CAG00601+

−0.9544*CAG00607+

0.8929*CAG00646+

1.0919*CAG00713+

0.4881*CAG00919+

1.1606*CAG01158)] [13]

[0292] In equation [13], “CAGXXXXX” represents the relative abundance of the bacterial species defined by the recited CAG, in a stool sample from the tested subject JD. These relative abundances need to be expressed as standardized values (zero mean and unit variance). The best option is to standardize the “abundances pattern” of the tested subject with a bundle of known “reference patterns”, and the present invention refers a claim of a Python script used to ease the computation of the P_{R} (JD). From the standardized abundance pattern of a tested subject, the equation [13] can be applied to predict his/her belonging to the R cohort with a model predictability of 91.38% and a success rate of 100%.

[0293] Regarding the Model 12.2, and according to the β coefficients of NR (NR_coeff), the probability estimate (expressed as a percentage) of belonging to NR cohort for a tested subject JD is calculated as follows:

P_{NR(JD)}=1/[1+exp\hat{ }−(1.138*CAG00142+

1.1396*CAG00218+

−1.0166*CAG00341+

−0.8403*CAG00474+

−0.7067*CAG00508+

−1.185*CAG00880+

0.8466*CAG01263+

−0.8895*CAG01321)] [14]

[0294] In equation [14], “CAGXXXXX” represents the relative abundance of the bacterial species defined by the recited CAG, in a stool sample from the tested subject JD. These relative abundances need to be expressed as standardized values (zero mean and unit variance). The best option is to standardize the “abundances pattern” of the tested subject with a bundle of known “reference patterns”, and the present invention refers a claim of a Python script used to ease the computation of the P_{NR} (JD). From the standardized abundance pattern of a tested subject, the equation [14] can be applied to predict his/her belonging to the NR cohort with a model predictability of 89.66% and a success rate of 78%.

### Discussion

[0295] The method described above relies on the following positive features:
[0296] (i) it is possible to use different NGS sequencing platforms (454, Illumina, IonTorrent, Nanopore, PacBio) and molecular biology techniques (qPCR, microarray, . . . )
[0297] (ii) the expression of the relative abundances of model-selected bacterial species within the closed interval [0:1].
[0298] (iii) if the tested subject does not have one or more selected species belonging to the chosen model, this model retains a high predictability due to its additive nature and the proposed double strategy.
[0299] (iv) each one of both strategies is split into two different models, one which is limited to individuals who did not take antibiotics during the past two months, while the other one considers the eventuality of an unknown antibiotic regimen/treatment status.

[0300] According to the statistical method used to properly fit the “abundances pattern” of a definite subject into one of the proposed models, as described in Materials and Methods, we propose the following steps:
[0301] (i) a fecal sample taken from the subject undergoes DNA extraction and shotgun sequencing with the preferred NGS platform (as described above), and relative abundances within the closed interval [0:1] are measured through the bioinformatic pipeline described in Materials and Methods.
[0302] (ii) the predictability score (P) for the subject JD, which represents the probability estimate (expressed as a percentage) of belonging to a definite cohort (NR or R) is defined as follows:

P=1/(1+exp\hat{ }−z) [1]

and

z=β1*x1+ . . . +βn*xn [2]

[0303] where z is the log-odds ratio (expressing the natural logarithm of the ratio between the probability that an event will occur to the probability that it will not occur), exp is the exponent in natural base, each β is the regression coefficient pre-computed according to the invention, and each x is the relative abundance of selected bacterial species expressed within the closed interval [0:1], obligatory expressed as standardized data (mean removed and unit variance scaled);
[0304] (iii) the P score obtained in step (ii) is interpreted as clinically meaningful if it is higher than 75% (fixed threshold) and/or it is concordant among the different Models used, always taking into account the antibiotic usage (known or unknown).

[0305] In the above method, the regression coefficients have to be calculated by logistic regression classifier with the following requirements: a constant (also known as intercept) not added to the decision function; a max iteration equal to 10000; a liblinear solver (with L2 penalization). All these parameters for logistic regression are explained and described thoroughly in section 1.1.11. of Sci-Kit Learn library guide.

[0306] OUTCOME_2 means one considers only SD>6 months among responders.

[0307] Based on the results disclosed herein, we conclude the following notions:

[0308] 1/GOMS (“gut oncomicrobiome signatures”) can definitely predict good clinical outcome during PD-1 blockade with AUC>0.9, and decent specificity and sensitivity in RCC.

[0309] 2/Some clinical criteria contrasting R versus NR can be impacted by the composition of the gut oncomicrobiome.

[0310] 3/The GOMS of R and NR are by and large the same ones when taking into consideration the ‘human-driven’ strategy, and they can predict differently the NR or R status based on logistic regression coefficients.

[0311] 4/Clinical significance relies on an equilibrium between “favorable” and “unfavorable” commensals, detectable in higher abundance in R feces or NR feces, respectively

[0312] 5/Some species withstand ATB, mainly members of Firmicutes phylum.

[0313] 6/Our best predicting minimal ecosystem (called “GOMS”) on the whole population of RCC 2L is based on few MGS (unfavorable Prevotella spp. Faecalibcaterium spp., Coprococcus catus, Eggerthelia lenta, Clostridium boiteae versus favorable Suttereila spp., Akkermansia, Alistipes spp.), as evidenced by pairwise analysis and logistic regression models.

[0314] 7/Of note, some favorable commensals are part of the differences observed between healthy versus cancer individuals (overexpressed bacteria in HV (vs cancer pts) are also associated with R phenotype in anti-PD1 treated patients)

[0315] In the present text, we proposed different GOMS (gut oncomicrobiome signatures) to predict the NR or R status of a definite subject suffering from RCC depending, before an ICI treatment, on two main criteria: i) the presence of an antibiotic treatment/usage within the last two months; ii) the RECIST definition of outcome (OUTCOME_1 or OUTCOME_2). As a first step, we evidenced how GOMS are able to differentiate among NR and R at OUTCOME_1, TTP3 and TTP6, with this latter showing significant alfa- and beta-diversity in the first cohort reported in Routy et al Science 2018. Mean AUC values (among NR and R) for the best descriptors (single bacterial species or consortia) based on ROC curves showed the higher prediction value at TTP3: regardless antibiotic usage we have Mean AUC_{OUTCOME1}=0.872, Mean AUC_{TTP3}=0.894, Mean AUC_{TTP6}=0.840, while with no antibiotic treatment we have Mean AUC_{OUTCOME1}=0.862, Mean AUC_{TTP3}=0.891, Mean AUC_{TTP6}=0.762. From these observations, it seems that in RCC the antibiotic pressure (at least within the two months before ICI treatment) seems to enhance predictability of the GOMS signature especially at TTP6 (+10%), while leaving unalterated the one at OUTCOME1 and TTP3.

[0316] In the above study, we deeply analyzed by means of Volcano, LEfSe and pairwise analysis the bacterial signature of NR and R in patients regardless antibiotic usage and of those who did not take antibiotics during the two months preceeding ICI treatment. We found that from the original signature at TTP6 no bacterial species resisted ATB among NR, while 18% resisted ATB among responders (FIG. 3). All these species could be good predictors for a RCC patient with unknown antibiotic regimen. Different logistic regression models are proposed herein, based on the aforementioned GOMS, antibiotic usage, and OUTCOME status following RECIST criteria. Upon a double strategy (as described in Materials and Methods) and after an internal feature selection and 5-fold cross-validation we made six models (Model 10.2, Model 2.2, Model 3.2, Model 7.2, Model 8.2, Model 9.2) for RCC patients regardless ATB, while we made other six models (Model 4.2, Model 5.2, Model 6.2, Model 10.2, Model 11.2, Model 12.2) for RCC patients without ATB treatment (see Table 30). From a first survey, after logistic regression models, it seems that ATB worsens by around 4% the overall model predictability for both OUTCOMES; in fact, we have Mean Pred._{OUTCOME1_regardlessATB}=85.02%, Mean Pred._{OUTCOME1_noATB}=88.50%, Mean ried_{OUTCOME2_regardlessATB}=79.83%, and finally Mean Pred._{OUTCOME2_noATB}=8334%. From these results OUTCOME_1 criterion seems to a best predictor than OUTCOME_2, at least for the overall predictability. Notably, only around 50% of species were in common among models without and regardless antibiotic usage, mainly belonging to Firmicutes phylum (genera Faecalibacterium, Hoidemanella, Subdoligranulum for OUTCOME_1 and OUTCOME_2, while genus Eubacterium only for OUTCOME_2). Members of Proteobacteria phylum (genera Sutterella and Azospirillum) withstanding antibiotic treatment were found only with models generated with OUTCOME_2,

TABLE 31
Specific sequences for each bacterial species.

| Bacterial species | Specific sequences |
|---|---|
| CAG00008_Clostridium_bolteae_ATCC_BAA_613 | SEQ ID NO: 1-50 |
| CAG00013_Clostridiales_bacterium_1_7_47FAA | SEQ ID NO: 51-100 |
| CAG00037_Bacteroides_faecis_MAJ27 | SEQ ID NO: 101-150 |
| CAG00048_1_Clostridium_sp_CAG_226 | SEQ ID NO: 2001-2050 |
| CAG00063_Barnesiella_viscericola_DSM_18177 | SEQ ID NO: 151-200 |
| CAG00122_Coprococcus_catus_GD_7 | SEQ ID NO: 401-450 |
| CAG00140_Subdoliqranulum_sp_4_3_54A2FAA | SEQ ID NO: 451-500 |
| CAG00142_Bacteroides_stercoris_ATCC_43183 | SEQ ID NO: 501-550 |
| CAG00211_Firmicutes_bacterium_CAG_227 | SEQ ID NO: 601-650 |
| CAG00218_Bacteroides_sp_CAG_20 | SEQ ID NO: 651-700 |
| CAG00243_Lachnospiraceae_bacterium_1_1_57FAA | SEQ ID NO: 551-600 |
| CAG00300_Prevotella_sp_CAG_891 | SEQ ID NO: 701-750 |
| CAG00317_Clostridium_sp_CAG_230 | SEQ ID NO: 751-800 |
| CAG00327_Faecalibacterium_sp_CAG_74 | SEQ ID NO: 801-850 |
| CAG00341_Eubacterium_sp_CAG_115 | SEQ ID NO: 851-900 |
| CAG00346_Eubacterium_rectale_M104_1 | SEQ ID NO: 901-950 |
| CAG00357_Bacteroides_ovatus_V975 | SEQ ID NO: 951-1000 |
| CAG00413_Bacteroides_sp_CAG_144 | SEQ ID NO: 1001-1050 |
| CAG00473_Prevotella_sp_CAG_617 | SEQ ID NO: 1051-1100 |
| CAG00474_Sutterella_wadsworthensis_2_1_59BFAA | SEQ ID NO: 1101-1150 |
| CAG00487_Prevotella_sp_CAG_279 | SEQ ID NO: 351-400 |
| CAG00508_Alistipes_obesi | SEQ ID NO: 1151-1200 |
| CAG00530_Prevotella_sp_CAG_617 | SEQ ID NO: 1201-1250 |
| CAG00557_Ruminococcus_callidus_ATCC_27760 | SEQ ID NO: 1251-1300 |
| CAG00580_Clostridium_sp_CAG_62 | SEQ ID NO: 301-350 |
| CAG00601_uncultured_Faecalibacterium_sp_{—} | SEQ ID NO: 201-250 |
| CAG00607_Eubacterium_sp_CAG_251 | SEQ ID NO: 1301-1350 |
| CAG00610_Hungatella_hathewayi_12489931 | SEQ ID NO: 1351-1400 |
| CAG00624_Firmicutes_bacterium_CAG_552 | SEQ ID NO: 1401-1450 |
| CAG00646_Alistipes_sp_CAG_268 | SEQ ID NO: 1451-1500 |
| CAG00650_Dorea_formicigenerans_ATCC_27755 | SEQ ID NO: 1501-1550 |
| CAG00668_Azospirillum_sp_CAG_239 | SEQ ID NO: 1551-1600 |
| CAG00669_Firmicutes_bacterium_CAG_103 | SEQ ID NO: 1601-1650 |
| CAG00676_Firmicutes_bacterium_CAG_176 | SEQ ID NO: 1651-1700 |
| CAG00698_Ruminococcus_sp_CAG_177 | SEQ ID NO: 1701-1750 |
| CAG00713_Firmicutes_bacterium_CAG_270 | SEQ ID NO: 1751-1800 |
| CAG00720_Anaerotruncus_colihominis_DSM_17241 | SEQ ID NO: 1801-1850 |
| CAG00727_Eggerthella_lenta_DSM_2243 | SEQ ID NO: 1851-1900 |
| CAG00766_Firmicutes_bacterium_CAG_176 | SEQ ID NO: 251-300 |
| CAG00771_Clostridium_sp_CAG_413 | SEQ ID NO: 1901-1950 |
| CAG00782_Eubacterium_rectale_CAG_36 | SEQ ID NO: 1951-2000 |
| CAG00861_Oscillibacter_sp_CAG_241 | SEQ ID NO: 2051-2100 |
| CAG00873_Butyricimonas_virosa_DSM_23226 | SEQ ID NO: 2101-2150 |
| CAG00880_Subdoliqranulum_sp_CAG_314 | SEQ ID NO: 2151-2200 |
| CAG00886_Sutterella_sp_CAG_351 | SEQ ID NO: 2201-2250 |
| CAG00889_Megasphaera_elsdenii_14_14 | SEQ ID NO: 2251-2300 |
| CAG00897_Firmicutes_bacterium_CAG_83 | SEQ ID NO: 2301-2350 |
| CAG00919_Clostridium_methylpentosum_DSM_5476 | SEQ ID NO: 2351-2400 |
| CAG00928_Acidiphilium_sp_CAG_727 | SEQ ID NO: 2401-2450 |
| CAG00937_Clostridium_sp_CAG_7 | SEQ ID NO: 2451-2500 |
| CAG00963_Clostridium_sp_CAG_524 | SEQ ID NO: 2501-2550 |
| CAG01039_Faecalibacterium_cf_prausnitzii_KLE1255 | SEQ ID NO: 2551-2600 |
| CAG01141_Holdemanella_biformis_DSM_3989 | SEQ ID NO: 2601-2650 |
| CAG01144_Lactobacillus_vaginalis_DSM_5837 | SEQ ID NO: 2651-2700 |
| CAG01158_Pseudoflavonifractor_capillosus | SEQ ID NO: 2701-2750 |
| CAG01197_Dialister_succinatiphilus_YIT_11850 | SEQ ID NO: 2751-2800 |
| CAG01208_Coprococcus_catus_GD_7 | SEQ ID NO: 2801-2850 |
| CAG01263_Clostridium_clostridioforme_2_1_49FAA | SEQ ID NO: 2851-2900 |
| CAG01321_Faecalibacterium_prausnitzii_SL3_3 | SEQ ID NO: 2901-2950 |

### REFERENCES

[0317] Borghaei, H., Paz-Ares, L., Horn, L., Spigel, D. R., Steins, M., Ready, N. E., Chow, L. Q., Vokes, E. E., Felip, E., Holgado, E., et al. (2015). Nivolumab versus Docetaxel in Advanced Nonsquamous Non-Small-Cell Lung Cancer. N. Engl. J. Med. 373, 1627-1639.
[0318] Gao, J., Shi, L. Z., Zhao, H., Chen, J., Xiong, L., He, Q., Chen, T., Roszik, J., Bernatchez, C., Woodman, S. E., et al. (2016). Loss of IFN-γ Pathway Genes in Tumor Cells as a Mechanism of Resistance to Anti-CTLA-4 Therapy. Cell 167, 397-404.e9.
[0319] Gopalakrishnan V, Spencer C N, Nezi L, Reuben A, Andrews M C, Karpinets T V, et al. Gut microbiome modulates response to anti-PD-1 immunotherapy in melanoma patients. Science 2018; 359:97-103. doi:10.1126/science.aan4236.
[0320] Koyama, S., Akbay, E. A., Li, Y. Y., Herter-Sprie, G. S., Buczkowski, K. A., Richards, W. G., Gandhi, L., Redig, A. J., Rodig, S. J., Asahina, H., et al. (2016). Adaptive resistance to therapeutic PD-1 blockade is associated with upregulation of alternative immune checkpoints. Nat. Commun. 7, 10501.
[0321] Li J.1, Jia H., Cai X., Zhong H., Feng Q., Sunagawa S., Arumugam M., Kultima J. R., Prifti E., Nielsen T. et al. (2014). An integrated catalog of reference genes in the human gut microbiome. Nat Biotechnol. 2014 August; 32(8):834-41.
[0322] Matson V, Fessler J, Bao R, Chongsuwat T, Zha Y, Alegre M-L, et al. The commensal microbiome is associated with anti-PD-1 efficacy in metastatic melanoma patients. Science 2018; 359:104-8. doi:10.1126/science.aao3290.
[0323] Nghiem, P. T., Bhatia, S., Lipson, E. J., Kudchadkar, R. R., Miller, N. J., Annamalai, L., Berry, S., Chartash, E. K., Daud, A., Fling, S. P., et al. (2016). PD-1 Blockade with Pembrolizumab in Advanced Merkel-Cell Carcinoma. N. Engl. J. Med. 374, 2542-2552.
[0324] Pardoll, D. (2015). Cancer and the Immune System: Basic Concepts and Targets for Intervention. Semin. Oncol. 42, 523-538.
[0325] Pardoll, D. M. (2012). The blockade of immune checkpoints in cancer immunotherapy. Nat. Rev. Cancer 12, 252-264.
[0326] Restifo, N. P., Dudley, M. E., and Rosenberg, S. A. (2012). Adoptive immunotherapy for cancer: harnessing the T cell response. Nat. Rev. Immunol. 12, 269-281.
[0327] Riaz, N., Havel, J. J., Kendall, S. M., Makarov, V., Walsh, L. A., Desrichard, A., Weinhold, N., and Chan, T. A. (2016). Recurrent SERPINB3 and SERPINB4 mutations in patients who respond to anti-CTLA4 immunotherapy. Nat. Genet. 48, 1327-1329.
[0328] Ribas, A., Hamid, O., Daud, A., Hodi, F. S., Wolchok, J. D., Kefford, R., Joshua, A. M., Patnaik, A., Hwu, W.-J., Weber, J. S., et al. (2016). Association of Pembrolizumab With Tumor Response and Survival Among Patients With Advanced Melanoma. JAMA 315, 1600-1609.
[0329] Rizvi, N. A., Hellmann, M. D., Snyder, A., Kvistborg, P., Makarov, V., Havel, J. J., Lee, W., Yuan, J., Wong, P., Ho, T. S., et al. (2015). Cancer immunology. Mutational landscape determines sensitivity to PD-1 blockade in non-small cell lung cancer. Science 348, 124-128.
[0330] Robert, C., Thomas, L., Bondarenko, I., O'Day, S., Weber, J., Garbe, C., Lebbe, C., Baurain, J.-F., Testori, A., Grob, J.-J., et al. (2011). Ipilimumab plus dacarbazine for previously untreated metastatic melanoma. N. Engl. J. Med. 364, 2517-2526.
[0331] Rosenberg, J. E., Hoffman-Censits, J., Powles, T., van der Heijden, M. S., Balar, A. V., Necchi, A., Dawson, N., O'Donnell, P. H., Balmanoukian, A., Loriot, Y., et al. (2016). Atezolizumab in patients with locally advanced and metastatic urothelial carcinoma who have progressed following treatment with platinum-based chemotherapy: a single-arm, multicentre, phase 2 trial. Lancet Lond. Engl. 387, 1909-1920.
[0332] Sharma, P., and Allison, J. P. (2015a). Immune checkpoint targeting in cancer therapy: toward combination strategies with curative potential. Cell 161, 205-214.
[0333] Sharma, P., and Allison, J. P. (2015b). The future of immune checkpoint therapy. Science 348, 56-61.
[0334] Smyth, M. J., Ngiow, S. F., Ribas, A., and Teng, M. W. L. (2016). Combination cancer immunotherapies tailored to the tumour microenvironment. Nat. Rev. Clin. Oncol. 13, 143-158.
[0335] Spranger, S., Bao, R., and Gajewski, T. F. (2015). Melanoma-intrinsic β-catenin signalling prevents anti-tumour immunity. Nature 523, 231-235.
[0336] Taube, J. M., Anders, R. A., Young, G. D., Xu, H., Sharma, R., McMiller, T. L., Chen, S., Klein, A. P., Pardoll, D. M., Topalian, S. L., et al. (2012). Colocalization of inflammatory response with B7-h1 expression in human melanocytic lesions supports an adaptive resistance mechanism of immune escape. Sci. Transl. Med. 4, 127ra37.
[0337] Topalian, S. L., Hodi, F. S., Brahmer, J. R., Gettinger, S. N., Smith, D. C., McDermott, D. F., Powderly, J. D., Carvajal, R. D., Sosman, J. A., Atkins, M. B., et al. (2012). Safety, activity, and immune correlates of anti-PD-1 antibody in cancer. N. Engl. J. Med. 366, 2443-2454.
[0338] Zaretsky, J. M., Garcia-Diaz, A., Shin, D. S., Escuin-Ordinas, H., Hugo, W., Hu-Lieskovan, S., Torrejon, D. Y., Abril-Rodriguez, G., Sandoval, S., Barthly, L., et al. (2016). Mutations Associated with Acquired Resistance to PD-1 Blockade in Melanoma. N. Engl. J. Med. 375, 819-829.
[0339] Zitvogel, L., Tesniere, A., and Kroemer, G. (2006). Cancer despite immunosurveillance: immunoselection and immunosubversion. Nat. Rev. Immunol. 6, 715-727.X

The application's sequence listing, which the Patent Office published only in electronic form, follows.

SEQUENCE LISTING (2950 sequences)

SEQ ID NO: 1 - DNA, 2049 bp, Clostridium bolteae
gtggcatattacacaatacccaggtatgagggaaagacagaaggaaaccgcatcatatgggagacggcaggagagctggtctatatcgaaccatacggaagggacgccatacggttccgctccagtaagagcctgcgcattgatgaagctctcaactggactctggaggaaccggcctctcctgagggagttatcatagaagcggatgatgaaaaggcctgcatgacaaacggtaaaatacaggtgacgattacgggcgacggcaccgtcacctaccggaacacccggacaggaaaggtgcttctggaggaatactggattgacggaagggtacacacggcccctctccgcagggccagggaatacagggtcacatcaggcaatcagtttaagataagcctgtactttaaggcggagccgggcgagcatttttacggaatgggacaggacgccaatgactgctttgatttaaaggggagcacggtggagctgcttcagaagaacggaaaatgcaccatcccctatacatattcatccaggggatatggattcatatggaacaatccagccataggccgcgctgaatttgtcaacaaccataccatgtggcatgtacagtgcgcaaagcagattgactatgtgatcatagcaggggacacgccgggagagatcaatgagaaatttaccgccatcacaggccgggctcccatgctgcctgagtgggccgcgggtttctggcagtgcaagctgcgctatgagacccaggaggagctgcttcaggtggccagggagtataaaagaaggggacttcccatttcagtcatagtcattgattattttcactggaccatgcagggagaatggaagtttgatcctgagaaatggcctgatcccaaggccatggtcagtgagctggagtccatgggtatcaaactgatggtgtccgtctggcctaccatagacccaaggagtgaaaattatgcatatatgagagagcataattacattctcaggggagagcggggagtggacgtggtatttatgttctttggtccccagacttatgtggataccacccatccgggagcccgggaatttttctggtccagggcaaagaaaaattactatgactatggaattcgtactttctggctggatgaggcggagccggagatgcggccctatgattacgacaatgtccgcatgtaccttggaaacggggaggaggtcagcaatatctattgcgtggggtttgcaaaggcattttacgacggcctgaaagcccagggtgaggaagtgtgcaacctggtcagatgcgcatggctgggctcccagcggtatggagtcgtactatggtcgggggacattgcttccacctttgacagcctgagaaaacagctgaaggcagggcttaacgtggccatgtgcgggataccctggtggaccacggatatcggcgggttcatcaatggggatccggagtcggaagaattccgggagctgatgattagatggtttgaattcggcgtattctgccctatattccgccttcacggattcaggcttccctatccggtaagggatatattgaatccggacggttactgcggttcaggaggtcccaatgaggtatggagttttggtgaggaggcctatgaaatcatccgccggtatatgtatgtcagagaagaattaaagccgtatatcatggggcagatgaagctggcctctgaagacggaacaccagtcatgcgtcctttgttttacgatttttgcggtgataaaaatgtatatgacataggggatgagtatatgttcggaccggaccttctggtggccccggtggtggagctgggagccagaaagcggatggtctatctgccggagggatgcaggtggaaggacgcgggaacgggcatggtatatgacggcggaacgcggattgaggcagatgcgcctctggataccattccattgttcctgaaggaggatgccaggctgtccctgcagatgaaaccaagcaccgctgaaaccaggcaccgcggatga

SEQ ID NO: 2 - DNA, 2073 bp, Clostridium bolteae
atgaatgaacaaaaaaagagtatattttccaatcatgagattatgtgcagggcccttaaggattcctttattaaactgaatccaaggacccagataaagaatccggtcatgtttatggtttttgtatccgccattctgacctttgtgatgttcctgttttctctggcaggtatcagggacgctgcgccgggttatatactggccatatctgtcatcctctggtttacggttttattcggtaactttgcggaagccatagcagagggaaggggaaaggcccaggcagatgccctgcgtgcaggcagaaaggataccatggcatccaggattccttcggctgaccgcaagagcgaggccgtcagggtgaaatccacggaactgaaaaaaggggaccttgtctatattaaggcaggggaacagataccggcagacggcgacgtggtggaaggcgctgcgtcggtggatgagagcgccattaccggcgagtcagctcctgtaatccgggaaagcggcggtgacagaagtgccgtcacaggaggcaccacggttatatccgactggatcgtggtgcgggtcagcagcaatccgggcgagggcttcatggataaaatgattgcaatggtggaaggggcttcccgcaaaaagacacccaatgagctggcactgcagatttttctggtggcattgtccattatctttgtgcttgttaccatgtccctgtactcctattccgtgttctcctctgtggaggcaggagcagccaaccccacatccatcaccaatctggtagcgcttttaatctgtctggcgcccactaccattggcgctctgctgtctgccatcggtatcgcgggaatgagccgcctgaaccaggccaatgtgctggccatgagcggcagggccattgaggcggccggagacgtagatacccttttgctggataagacgggtaccataacacttggaaaccgccaggcagacgcctttattccggtggacggctacaaggaaatggagctggcagatgcggcccagctctcatccctggcagacgaaactcctgaggggcgcagcattgtggttctggcaaaggagcgcttcggaatccgcgcaaggaatatggaggagcttcaggcctccttcgtgcccttcactgccaagaccaggatgagcggcattgactacaatggaaatgagatcagaaagggcgcggctgacgccattaaagcctatgtggaccggcatggaggcgcgttcagcagggaatgcgaggacatcgtaaagcggattgcaaaccagggaggaacacctcttgtggtggcaaagaacggacgcgttatgggcgtggtggagcttaaggacattgtgaagcagggtgtgaaggaaaagtttgcggatttaaggaaaatgggaatcagaaccattatgattaccggcgataatccgctgaccgctgcctccattgcggctgaggctggtgtggacgattttctggcagaggcaaccccggaggccaaattagacatgatacgggattaccaggccaggggccatctggtagccatgaccggcgacggtaccaatgatgccccggccctggcccaggcagatgtggcggtggccatgaatacaggcacacaggcagccaaggaagccggaaacatggtggacctggattcatcccccaccaagttgattgagatagtgaagataggcaagcagcttctcatgacaaggggatccctgaccaccttcagcattgccaatgacgttgccaagtattttgctatcatcccggcactgtttatgggattgtatccgggactgtcagccctcaatataatggggcttcacagtgcaaacagcgccgtgttctcggctatcatatataacgccctgattatcgtggccctgattcccctagctcttaagggagtcaggtacagggaagtctctgcggcccggatgctgtccgggaatctcctggtctatggactggggggaatcatcattccgttcatagcaatcaaggcaatcgacgtgctgatcacggccgcagggctggtggtgtga

SEQ ID NO: 3 - DNA, 2361 bp, Clostridium bolteae
atgtcgttaacaaaagtaggcgaaaaacatttttctgtggtaaaccactgcgtaccccgtattgacggggtggataaggtaacgggaagggcgcgctacgcagcggacatatatatggaaggaatgctttacgctggcgttttaagaagcccctattccagtgccagggtagtgtccattgatgccgcgaaagcaaaagcgattccgggcgtggaggctgttgttacctgttttgacatgccccgcaccagaagctgggcaggatacatgtatctgacggataccatccgttactccggcgactgtgtagccatggtcgcagcccagtcaaaggagctggtggatgaggctctggaggcgattcatgcggagtatgaggagcttccgggggtgtataccatcgaggaagccttaagtgagggcgcctttgcggtccatgagaaatatcccgacaatatttttaaggattccgtgttccatatccgcaaaggagacccggacacagcatttgaaaaggcggatattgttctggagagggaatacaggacccagtacattgagcactcctatattgagccggaggcatgtatctgttacctgaatcccaatgacggcgccatgaccgtacattccgcttcccagaatcccttctttacaagaaggtatgtggcggatgtgctgggagtgcccatgaaccaggtccgcatggtccaggagaccctgggcggcaccttcggaggcaaggaagaaggagcaggactggtggcaggaagatgcgcctacctgtgcagcctgacgaaaaagccggttaagttcgtgttcaacagggaggactccttcctggaatccgctaagcgccatcccttccgcctccgctacaaggccggaatcacaaaggacggacggatcgtggcctggcagggcgagcaggtggataactgcggtgcctacaacaaccagacccagttcatgaactggagggcaaatgtccattcagcaggcccttatgagattgataatatcaagacggatacatacggtgtgttcacaaacaatgtacactccggcgccatgagaggctactcatcccctcagctgatttgggcgcaggagcagttcatcgaggagctggccatggcctgcggtatggatgaactggaattccgccgcaagaaccttctccacgacggagctctgacagccaccggcgtacccgtggaacactgcgtgatccaggatatcatggacgccaccgcagagcagaccggttacaaggagaagcacgcggcctacttaaaccagcctgagggaagccgtaagcgcagaggcatcggcctggccgtttgccacaggggttccggcctgggagctgaatctccggacgcttcaggatgtatgatgatctgcaacgaggacggttccgtgatgattaattccggtctggcagagaacggccagggattaaagacagcctatgcccagattgcggcagaagccctgggtgtgagctatgaggcaatccgcttcttcggcaccgacacccattccatcccggactgcggcatgacagtggcttccagaggaacggtcatgggagcacagtccgtcagaaagacgggagagaagctgaagggagtcatgatccagaatgccctggagcttcacagccttccgctggaggaaatcgagaaggcatacggccttaagaagggaaccctggattacagcaagctgacagcagatcaggtggagcttttagacagccagttttatttgaagaaatatccggatgtgaaggtccccttctccggcgtctgcaacgcctgtctctggaccggcaaacagatggctgcctttgagtggtttaagccccaggatctgattcaggaccacgaaacaggacagggaaaagcattccccacctttgcttacggctgcatcgtggctgaagtggaagtggatatgaagaccggctacgtggatgtgctggaggtaacagccagccacgacgtgggtaccgccatcaatccggctcttgtaaagggacagatttacggaggcattgtcatgggccagggctttgcggtgacagaggacgtggtaaccggaaagcgggggcagaagacaaagaattttgacagctacattcttcccacctccatggacgctccgaaaatgaacatcaatatatatgaaaaccaggatccggcaggaacctatggagccaaatccatcggggaaccagccaccgagggcgtaggggcagccattgccaatgccatctttaacgccaccggccgccgggtctatgaaaatcctgcagacttagagacagtattgctgggacataaattacagtag

SEQ ID NO: 4 - DNA, 1569 bp, Clostridium bolteae
atgatatttttgttccaggcaatgctttgtgatgacaatgaaatcatactggaagggttatcccggcagattgactgggagggactgggcatctgcctttccggcactgctgccgacggacaggatgcctggaaccagatgaaggataatccgcctgacatccttatcaccgacatccgtatgccttatatcgacgggctggagctatccaggctggcaaaggacttaaacccaaacatcgtgcttctcatcatcagcgcgtatgatgactttgaatatgccaggacagccatgcatctgcgggccctggattatatactgaaacccattgatctggatgccatgaaccgcatactgacgaatgcggtttcccactgccggcagttccaccacgacaagcgtctgatggccacacagctgctgcgcaacatggcggtccaggaggcggccggccccgagggcattgccttaaacgagctggaccttgagcctgattcatggtgctgcttcctgcaggtggagctggacgatcacagcttaagcaagctgtccgacgacatccgttatgcgtcagagcgcaggttttcggccctgagccagattttgtttggtgacagctcttatctgctggaatcccatcagtacagctacagcgtctgcctcacctcccgctccaggatggaactggccgcccggcggaaaattctggtggacacgatacgcaggcagttcccccatgagggaagctactgcgatgtcagcattgcctcgggcagcattgtccagggcatccgcctgctccacaaaagtgtacagacctgccatgaagcaggcaagcttcatttcatcaagggttccaatgcggatatcttttacgaggaggtggagtcttatatctacaatgagccggaggacagccagggatatcccataccggacaccaggcttattacttttatcaaggaacaaaataaggaagggattacaggagagctggagcaattaaaaacatggctctatcagaagggaagcgagagctatctgtatatgacattttccctgggaagcttctatacccatctgatgaaggaattggggaaatcaggaatcaaccttcaggatatatttcagaatcccatcgaagaattcaaaaaagtggcagccggcggtacactggagtccagcatcgaaaacctgaagcagaacctgttcaaaatctgcgacagcatacgcatcaacaaaagccgttacggaaagctcatagaccaggccatcctgtacatccagaaccactatatgtcctcctccttttccattgatgaggtagcgggagccgtatgcttaagcacctcctatttcagcactgtatttaagagcgagacaggaattacatttacggattatctgattaaggtaaggatggaaaaagccaggggactgcttgagaataccagcatgaaaatgtatgaaatctcatccagggcaggatatgaaaatgcggcctatttcagcgccgcattcaaacgatattatggaaaatccccctctgagttccagagccggaagtag

SEQ ID NO: 5 - DNA, 1710 bp, Clostridium bolteae
atgtcggttttaaggaggaaacttatgaaacatacaaaaggaactgcggggagaagggcaggcagatttctggccctggctttaactgcggccatggtcctgtcatcggcaggatgtgcgggcaagggcggcagccagccgtcgggccaggcggaatcaggccaggcggcagcgggccagacccaggcagcggccgctggcagcgggaagattgtcaatatcggagtgaccagctctctcaatacgctgaatcccctgctgatggacggcgtggagatgaataaatatgcaacaggtcttatgttcctgcccctggtggaactggaccagaacatggaatttgagggaatgctggctgattccgtgacagctgaggacgagagaaatttcctggtgcacattgacgataaggccgtatggtctgacgggactccggtcactgcggacgacgtggtgtacacggctctcaggctgtgcagcccggtcatcggaaacccggctatgatgtattatgtatttgaaggcgtgggcgaggacgggtttgtagaagaaggggccgaccatgtggaaggcattaccagggtggatgataaaaccgtgcgttttaccaccaaggcacccatgtcgctcataacctttaacagctcttatgcccgctatctcatgccccttccaaagcatgtgattggggatatagacgagaaggcgctgacgtcagacccatggtttagccgcccggacgtggtgagcggtccctataaggtgacagagtttgaccgggaccactacgtgtcttatgaggccaacaaagactactggaagggtgctccgaagattgagcgcctcaacataaaaatcgtggaaggcagccagctttatgccgggcttaagtccggggaaatcgacattacccagaacaccatgagtaccattccactggaggactatgagagcgtggcggcgctggagaacgtggaggtttcctacggagaccccattaccaaccagtccgtattcatcaatacagccagaatcaccgatacaaaggtgcgtcaggccatgctgtacgcagtggaccggaaccagcttctggagcagctcttaaagggcaacggagaagtggcggacggtttcctgtcatcagccagcccgtattttgacagtaccctggtgcctgtttcctatgatccggaaaaggcaaagagcctgctggcacagagcggatgggaccagagcaaaagcatccgtttctgcattgactcaggcgacagtacctttgtgaacgctgcttctgttatagcagcccagtgggccgcggtgggcatcaaggcagatatccagaccatggacatcaatacgctgatgagcactgcttccagcggtgattttgatgtgctgtccgtacagtatacgtatcctccggtggatccttacgcggatgttgcctggctcttaggcggccagggcagctggaccggctataccaggccggaggtggaggaagccctgtcaaatgtggccctgacaaacgacaaggaccagttaaaggagctgtacgggattgtagaccggagcgtccaggaggatgtacccatgttttcggcctacattatcaagaccatggcagcggccaataagcgcctgaccggggttaagcccagcgtctatggcttcttcaatcatgtggagcagtgggatgtatcccaatag

SEQ ID NO: 6 - DNA, 1257 bp, Clostridium bolteae
atgatacgaaaactcagatggaaattttcagccatcatgatgaccattgtcgcttttctactggccgtcattttcataacgctgtactacacaacaaaagcaaactacgttcagcggagcatgggcaccctgcattccgccatgctggaaaattatccgggcagtatgcgggaacaggcagggcagccgccctctgcgggccagcgtcctccctcccgcccccgcaggcaggaacttcctctgatggtggttgatataaggcagggcaactatactgtagtaaagaaccagcttccagatatagaaagccaggaggccgaaaccctgatatccctggcggaaagcaagggcggtgagtccggtaccttaaaagacctgcacctgcgttttctccggggaaaaaccaagcctgaccaaacagtgcggtatgtattcgccgatatatatgaggaacagaattcactctattggcaggtgattcactcttccattatcggagcaagttcgtttgctgtctttttcctgttctccatccttctctccggatgggctgtgaaaccagtggagattgcctggcagcggcagcgccagtttgttgcggatgcctctcacgaattaaaaacacctctcaccgtcatcctctccaatgccgatatgcttgaaaaagaccgcgatataccgaagggacaaaaccggcagcggataagccatataaaggctgagtccctgcggatgaaacagctgatagaaagccttctcgccctggcccggagtgactcaggacaggagtctgcggtctgcgcaccagttgacctgagctttattgtaaacagcagtcttatggcctttgagcctctggcttttgacatgggtaaacacatcacctatgatatcgaagctgcacttcatgtaaatggagatgataaaaaactccggcagctgacagacattctccttgacaatgcctgcaaatacagtcaggataacggctccatctgtgttaccctgaaaaagaccagcgcaaaagaggcgctcctcactgtctcagatgagggggcacctctcacgaaagaagaaatcaaacacctgtttctccgcttttaccgcggagacactgcccgcagcaatatccccggctacggcctcggactttccattgcccaaagcattgtatctgagcatggaggaaagattgaggccagcacggatggtttcgcaacaaactcatttatagttcggctgcccatacaggaataa

SEQ ID NO: 7 - DNA, 3006 bp, Clostridium bolteae
atgggattgacaaggtttgtattaaaacgtccggtggccacggttatggcattgctttgccttctggtattcggtatttcttccgtatttaatgccacgctggaacagatgccggacacggatcagcccatgctgattatcatagcgtcttattccggggctggtcctgaggatatagatgaacttgtgacccagcccatagaagaccaggtggggaccatagagggcgtgaaaagcatgagctccacttccagcgaaaacagggccatgattatgctggaatatgattacggcaccgatatggatgacgcatataatgatttatcccagagtctggatgcattgagccgccagctccctgacgacgcggagacctctgtcatggagatgaataacaatgcgggaaccaccatgatgctttccatatcaaatccttcccaggaggatttgtacgattatgtggaccagaccgtggtgcctttgctggaacagatttcctctgtggcagaggtggaggccatgggcggtaagtcggaatattataaaattgagcttcaatccgatgagatggcccagtatcaggtgaccatgagcgacgtgtccactgctatgagcacggcaaatctttcctacccatccggcgatgctgtatccggaaaactggagctttctgtttcaacgtccctggagcatgagaccatagaagctctgaaggaagtccccatcaccacctccagcggaaaaattgtgtatctggaggacattgccaaggtttatgaggcagaggagagccggggaggtatctcgcgctacaacggccaggacactatttccatttccatcaccaagcagcagagcagcacggccatggatgtgtcatccgaggtccaggaggttatcgaaagcctggaggcggacgacgagaacctgaatatcaggattgtcagggacagcgcggacagcattctcagctcccttaaggatgtggcccttaccctggtgctggcagccgtgatttccatgattatcatattcattttctttggggactataaggcgtccctgattgtaggaagctccatacctacctctatcctggtgtccctgattctgatgaccagcgccggtttttctctgaacatcattaccatgagcggtctggtgctgggcgtgggcatgatggtggataactccatcgtggtgctggagagctgtttcagggccatcgagacagaggaggacaagggccttctgggatatgccagggcttccctgtcaggtacaaacattgtgctgcagtccattttgggctccacggtgactacctgcgtggttttcctgccgttggtatttctgcagggtatgtcgggacagatgttcggctccatgggatacgttatcgtgttctgtatgctcgcctcctttttgtcggctattaccattgttccccttacatatatggcgtataagccccaggagaggatgcaggcgccgatgtcgcggcccatggagcggatacagaacggataccgccgcatcatgcccggacttttaaaccacaaggccattatcatgattgcatctgtaatcctggtgattgcagcctattttctggccagcgggatggaaaacgagcttatgacagcggacgatacgggaacggtcagtgtttccatcgaaacaaggccggggctgctgtcggaaaatgccgatgccatgctgctgcaggcagaggagattgtccaggggcatccggatgtggaatcctacatgctgcgttataacaatgacagcggtaccataacagcctatctgagggacaacagggatatgagcaccgacgaggtagtggagcagtgggagacagagatggcggatctggataactgtacggtgacagtggaggcatcctcgtccatgagcttcatgagcaggaaccggggatatgaagtcatccttaacggaacagattacgacgagctccaggaagtcagcaacaagattgttgccgagatgacagccagggacgatgtgatgaacgtccattccagcatagaaaatacagcgcctgtggttaccgtgaaggtggacccggtactggcggcagcggaggggcttactgcatcccagattggttcccaggtaaagcagatgatggacggcgaagaggtgaccaccctggatgtggacggcagggaggtcagcgtgatggctgagtacccggaggatgagtaccgcacggtcagccagatgaaggatattatactctccaagccttccggaggctatgtggccctgacggatgtggcggaaatctattataaggacagcccggcttccatttccaagacggataaggcatatgagataaccattacagcagattatacagggggaaatgtccagtccgccatagacagcgaggtcataaaccccaacttaagcggcaccatcaaaaggggcgtcaactccatgaaccgaatgatgcaggaggaatttgcagccttgtaccaggcgattgccgttgctgtgttcctggtatttgtggtactgtcagcgcagtttgagtcaccgaagttttccttcatggtaatgactaccataccattcagcctcattggctccttcgggcttttgcagattacgggggtcagcatcagtatgacgtctatcctgggcttcctgattctggtcggcactgttgttaacaatggtatcctctatgtggatacagtgaaccaataccgcatgaccatggatttaaagacagccctcattgaggccggcgccacacgtttaaggcccattatgatgaccagccttaccaccatcctttccatgattcccatggccctggccataggggacagcggttccaccacccagggtctggccattgttaacatcggcggactcagcgtgggcgtggcggtggctctgttcatactgccaatctactatgcgcttatgaacggtgataagaaacgggttgtactggatatttaa

SEQ ID NO: 8 - DNA, 2835 bp, Clostridium bolteae
atgggacgcacagagggcggaagaaaattccggcctgagaaaggaatggcctctatgcaggattactttacggataaagggaagacagacattctgcgcagcacccgcacaggactgtgggaaatcatactctgtcagggcagggagcctgtcatgcacgcggacagtgtcatgctggaacttctggggctggacgctgcgccggcaccggaggagtgctaccaggtatggtataacagaatccaggatgaatacaaaggagctgtgcaggagaccgtgtccaaggcgattgccagtacccgggcagaggtgcaggaagtccagtataaatggaaccatcccctgtgggggcctatatccgtgcggtgcggcggcatgaaggatcaggaatgggaggatggaatccgcctgcggggataccaccagaacatcacggataccatcatgttccagaaggaatatgatgcggtcatccagaccctgagcggacgctacaggggaatcctgctgtgcgatttaagggacggctcctataagataatcaaggctgcggaggatttcaaggataatctgacgaaatatacggatttcagggaatttctccgcggatattcacggtcctgcatcagaccggaattcagaaacaggattgaacggtttgcggaatatgaatatatacaggaacagttcctgtcaggggaaaagcagatagaggaattgtaccgtatccgaagcggaagctggcagcgggttatggccataccgtttgcgcctgaatccgacttaaaagccagagctatcctggcatttgacatacaggacggcgaggtggagaaacggatggacgaggtaacggccagagtggctgtatccacgatttatactcttgtcctgagcctggacccaacaagtcaggagtacagctgcctccattacatgggagaccggctgaagatagcgcctaagggaatgctcagcgaattactcagccaggagatgccgtcccttccccgggaggacaaagaaaagcttgaacagatctgttctcctgacagctacagggacacagaatccctggagggcattctgagaatccgggaccgggaccggaagcttcattattaccgttactatggggttcccatccatatggaactgggcgaccggattctcataacagggcggaatattgatgccaggcaggaggtggagctgcgggagagcgtgctgaccaacctgtgccagtgctactattccatctatctgtttgatttggagcacgatatagaggaggcaatctggcaggaggaaatcattcgcaggcgccaggaatttcccaagggttccatggctgtgtattatgagaaattcgtccgctgtcatgtctatgaggaggaccaggaaaagatgcggcggggtggaagcccgggggttctgaggacgaaccttacaccggagcagccggtgtacgatgtggatttccgccgggtatatccggacggtataagatgggtgaggtccaggttcagcattgcggagaccgcagacggcgttgtcaccaaggtcattttcgccaatatgggcattgatgagcagaagcgcaaggagctggaggaggaagctgagaataagaaaagcctgtttgcagcatacgaatcagccaccatggccaacgaggccaaaagtaatttcctggcccggatgtcccatgacatacgcacgcccatgaacgcaatcatagggatgacggcgcttgcagcatcccacacagaccagccggagcgggtaagggactgcctggaaaaaatcagcatctccagcagccatctgctgtccctgattaatgagatactggatatgtccagaatcgagaaggggaagctggagcttttggaggaaccctttcatctggaaaccatgctggataacatatattccatcatcaagcccactgccatggagaaaaaccatgacataaccttcagccggaagggcgtgatccatgagtcgcttataggggacgccaaccgggtgaagcaggtgcttttaaacctgattaccaacgcggtgaaatacacgccggacaacggaatcatccgagtgacgaccgaggaagtccccatggggaaagcggggtgggcctgctaccggtttgtggtggaggacaacggcatcggcatgtcagaggaatatatgaagcaggtgtttgaaccattttccagggccgtcgtgcctgtggtgcaggagcagcagggaaccggcctgggcatgtccattgcccatggcatagtgtccaccatgcagggggacatacatgtcgagagcagggagggagagggaagcagttttacagtcaccctgaatttcagaatccagggaaaggaacaggaaagggcaggagatatgagagactgcatccgggatgatgacatggactgtgcttccctggcgggaaggcggattctcctggtggaggacaatgcccttaacatggaaattgccagggccatactctgtgaacacggcctggaagtggatggggcagaaaacggacaggaagcatatgagcgcttcacctcctcagcaccaggtacatatgaggcagtgctcatggacctgcagatgccggtgatggacggctgcaccgcagcccgcatgatccgggcaagcagccacccccaggcccgaaccatccccattattgccctgactgccaatgcctttgccgaggatgtggcaaaggcactgaccagcggaatgaattaccacatagcaaaacccattgattttcaccagctgtttcatgcgctgaaacaattcatgaccaccagttaa

SEQ ID NO: 9 - DNA, 1008 bp, Clostridium bolteae
atgaacgaattagtgttctttgaaataccaaaacagaatttaaagattcaaattgtcaaaaaaagtgatgagattttggaacagataaggaaagaatctgccgagacagcggtgatgccggatgtggctcagtactacacggatatttattttccaaaagcaccttcagacaggccctatacattttcctccatcgtgctttcttcggacggcaaaatggcctatggggataatccctccggaccgctcatagcaaaaaataactttctggacccggacggctccctgggagatttctgggtgctgaatgtactgcgggcctatgcggacggaatcatcataggcgcccgcaccctgctcagtgaaccgggcatcacctgccatgtatatgaggaacgtctgaccaggcagcgcagggaagtgcttgggaagaagtaccagccctgcggcgtgattgtatcgttagacggtacggatattccctttgaccattatattttcgatgtagacccaaaggaagagtataaactggtgatagccacgtcccccaggggcgccgaatacataatggccaattccccgctgaagcatcctgtaattgggccctttaagacaattgaggatgtggatcatgcggatttgggtgagctttacacagattttaacgcgttcccggttatagtgacgggccagggagagaaccccgatacaaaggtgctcatgtatgcccttaagaaatgggggctggaaaagctctgtatcgaggcgccgtcctactgcacccatttgctgcagcagggaatgctggatgaatactttatcaattattccatggtatttgcgggcggccaaaaatcgccgggctatgcatcggaattcgggcacatggatcatccccacgcagattttctgacactgggaatccatgaaagcaatttcatatttacccgtcagaaaattcgttacggtgttacaaatgagacggatttgtcgggatataagtactga

SEQ ID NO: 10 - DNA, 1017 bp, Clostridium bolteae
atgatgtacggttttcagaatgaggatttcttaaaaactttaaatggagcagtggctcagatcggtgagattaataggattgcggataaggtgagtgatttgggatataaaaacatctatttggttggaacgggaggcacctatgctatcatcagtccgctggcatacatgctaaagacaaactccactctggtatggtatcatgaaattgccgccgagctgctggccgcaaagcccagatcactgaccagagattctctctttatcacggcctccttatcaggaaccaccaaggaaaccattgcggcggcagagtatgccagaagcatgggagccacagtgatttcttttgtgggggacaggaccgctcctctggctgctgtctcggattatgtggttgagaatgctgcctgcaatgacaatttggtggaggagctgcatatacagttttttgccctgggagccagactgatgctgaaaaacggagagtttcctcagtacgaacggtttgtggaaacacttcggaagatgccggaggtactgttaaaggtgcgggagcagaacgacgaacgagcacttgcttttgcagaaaagcataaggatacaggcttccatatgtgtgtgggagccggcaatacctggggggagacatattgctttgccatgtgcgtgttggaggaaatgctctggattcctaccaaatccattcatgcggcagaatttttccacggcactgtggagatgacggataagaacatgagctttatgctttttaaaggagaggacgagacgcgcccactggttgacagggtggagaactttgtcaggaagtattcggatgtggtgcaggtatgggataccagggattatcctctggaggggattgacgccgatatgaggaagtatgtctcccccatggtcatgtccacccagttagagcgtgtcagcgctcattttgaacatgtgaaggaccacagcctggatatacgcagatactacaggacggtggagtattaa

SEQ ID NO: 11 - DNA, 4542 bp, Clostridium bolteae
atggaatccaaacagaaacagccaggactgtatgaaccacgttttgagcatgataactgcggcatcggcgcagtggccaatataaaggggataaggagccaccgcacagtggaccaggcccttcatattgttgaaaatctggaacacagggcaggaaaggacgctgagggcaagacaggagacggcgtgggtatcatgctccagatttcccacggattttttaagaaggtgactgaacacctgggctttcagataggagacgagagagcgtatggcgtgggtatgtttttcttcccccaggatgaactgatccgcagccaggccatgaaaatgtttgagattattgtgcgcaaagagggtatgaccttcctgggatggagagaggtacccactgcgcctgaaattctcggcaggaaggccgtggacgtgatgccctatattgcccagggctttgtgggcaagcccgccggaatgaaggcaggactggattttgacagaaagctttacattgcccgccgtgtttttgagcagagcaatgaagacacctatgtggtatccttaagcagcaggaccattgtatataaaggtatgtttctggtgggtgagctgaggctgtttttttcggatctccaggatgaagattataagtcagccattgccattgtacattccagattcagcaccaacaccaatcccagctggatgcgggcccatccctaccgccttattgtccacaacggtgaaatcaatactatccgcggcaatgtggataaaatggtggccagggaggagaacatggaatccgagtatttcagatacgacatgcacaaggtgctgcccattataaaccaggaaggctctgattccgccatgctggacaatgccctggaatttatggttatgagcggcatggacctgcccctggccgtcatggtcaccatccccgcgccctgggaaaacgacaagtacatggacagcgaaatcaaggatttctaccggtattatgccaccatgatggagccatgggacggacctgcttccatcctgtttacggacggcgacgtggtgggggctgtgctggaccgtaacgggcttcgtccctcccggtattacataacagaggacggctatatgatactggcctctgaggtgggagccatagacattgaccagactaaggtggtgaaaaaggaccgcctgcgccccggaaaaatgctgctggtggatacaaagcagagaaggcttattgatgacgatgagcttaagcactactatgcgtcccgcaacccatacggggagtggctggattccaacctgtggagcataaaggacctgccggtgccaaacaaatgcatacccgccatgaaggatgaagaacgtctgaggcttcagaaaacatacggttacacatatgagcagtataagaccatgattctccccatggctcttaacggggcagaggcagtgtccgccatgggtgtggacagccccctggccgtgctttccaagaagcaccagcccttattcaactattttaagcagctttttgcccaggtgaccaatccgcccattgacgccatacgtgaggaaatcgtgacatccacaaccgtctacgtaggcgaggagggcaatattctggaggaggccgcaaaaaactgcaaaatcctaaaagtggagaatcccatcctgacagagttggatttacttaaaattaagaacatgaagaagcctgggttcaaagtggaggtaattcccattacctactataagaatacctccctggaaaaggccattgaccgcctgttcctggaggcggacagggctcacaaggacggtgccaatatcatcatactctcagaccgggatattgatgagaaccacgtacccatcccctccctgctggctgtatcagccctgcagcagtatctggtaaggaccaagaaacgcaccagcgtggctctgatactggaaagcggcgagccaagggaggtccatcattttgccgccctgctggggtacggggcctgtgccgtcaacccctatctggcccatgagtccattcgttccctgattgattccggcatgctggacaaggactattacgcggctgtctgcgactatgatctggctgtgctccacggcattgtgaagattgcctccaagatgggcatttccaccatccagtcctatcagggcgcccagatttttgaggccatcggcatctcagaggatgtggtggataaatattttacggacactgtgagccgtgtgggaggtattacattaaaggacattgcgggggatgtggacgtccttcactccgctgcctttgaccctctggggctggatgtggatttgaccctggaaagcgcgggcagtcacaagtcccgctccggtgaggaggatcacctttataatccgctgaccatccatctccttcaggatgcagccaggtcgggtaattatgatatctttaaacaatatacggcccaggtggacagagaagataagatgtaccatctgcgctccctgatggattttaagtttcctgaggacggaggcatcccgctggaacaggtggagtctgtggaatccattgtcaggcgttttaagacaggggccatgtcctatgggtccatctcccgggaagcccatgaatgcctggccatagcgatgaaccgtattcacggcaaatccaacacaggagagggcggggagagcctggaccgcctgattcccgggccggcagggaacaaccgctgttccgccatcaaacaggtggcttccgggcgttttggggttaccagccgatacctggtaagcgcccaggagattcagataaagatggcccagggagcaaagccgggcgagggcggccagctgcccggaggcaaggtctatccgtgggtggcaaaaaccagacactctaccacgggagtaagccttatatcgcctccgccccatcatgacatctattccatcgaggatctggcccagctcatatatgatttaaagaattccaataccagggccaggatatccgtcaagctggtatctgaggctggagtgggaaccgtggccgccggcgtggccaaggccggggcccaggtaatcctgatctcagcctacgacggagggacaggagccgcccccaggaattccatttacaacgcaggacttccgtgggagctgggtgtggcagaggcccatcagaccctgattatgaacggacttcgcgacaaggtgattctggagacagacggaaagcttatgaccggaagggatgtggcaatggcctgtatgctgggggcggaggaattcggctttgccacggcgccgttagtgaccctgggatgcgtgatgatgcgtgtctgcaacctggatacatgtcctatgggcattgccacccagaacccggagctgaggaagcgtttcaggggcaaaccggagtatgtggtgaacttcatgctgttcatagcgcaggagctgcgcgagtacatggcaaggctgggtgtgcgcactgtggatgatctggtggggcgtacagaccttctaaagaggcgtgagaaccttccccttggccgggccaatcaggtggatttaagaaggatactggataacccttatgaaggtcagaaggtggccggatacagcgggaaacaggtctttgatttccgtctggaggataccatggatgagcaggtgtttttgagaaaatttaagagcgctcttggaaacggccagaaaaagcgcattcaggtggaggtgaccaatgtgaaccgtgccctggggaccatattcggctccgagataaccaggaaatacccggaagggctttctgacgatacatttaccgtcagctgcagcggaagcgggggacagagctttggcgcatttatcccaaggggactgaccctggagctggcaggggattccaatgactatttcggcaagggactttcaggaggcaagctggtggtatttcctccgaaaggcgtgctctttcaggctgaggagaatatcataatcggcaatgtggccctatatggagccaccagcggaaaggctttcataaatggaatcgcaggggagcgcttctgcgtccggaattcaggtgccaccgctgtggtggagggcgtgggagaccatggctgtgaatatatgacaggcggctgcgtggtggtgctgggagccacgggcaagaacttcggggccggcatgagcggcggcatcgcctatgtgctggacgaggaccgcagcttttacaagcgcctcaataaggagctggtatccttcgaggaagtgaccggcaaatatgatgtactggaactgaaaggcctgattgaagaacatgtggcctgtaccaactctctgaaaggcaggcggatcctggagcatttcagtgaatacctgcccatgttcaagaaggttgttccccatgattaccggcgcatgatgaatgccattgtgcagatggaggaaaagggactgaacagtgaacaggcgcagattgaggcattttacgccaatttaagagggtaa

SEQ ID NO: 12 - DNA, 3945 bp, Clostridium bolteae
atgaaggacatcagttatgaaatattagatttattcagacaatacggaagcagtcctgagggcatcaggaaggccctggacagccagtccgggccggaggtgctccacgccctgtctgacataagggagaatcttctggagtggctggattatactggctgcggggaagtgcttcagattggttcaggctatggcgttctgacaggactgctggcctccaggtgcacccatgtggcagtgatggacgaagcagatgaaaacctggctgtaaatcaggagcgcaacaagatttacaccaatatcacatatggctataaggcaggggctgaggcaggacagccggagccgtcatttgaccttgtggttatggccggactcagaaaaggccaggaaatacaggacgcagctgcctttggcgcctcctttctgaaacaggaaggccgtctggtcattgcgtgtgaaaatgcattggggctcaggtacctggcaggggcagaccatgaggaaggcttctgtaccagaaaacaggcggaggaagcctgccgggaagcagggcttgcccgggcggacttctattatccggtgcccgaccacagaatgcccgtatcactctactcagaccggtatctgccgggaaagggagacatcaccagcccgtctgtgtcctatgacggtccgcggtatgcctgcctcaatgaaggggaggtatatgaccgtctgattgaggaaaatgactttggccggtttgccaattccttcctgattattgcatctaaggacggccggcaggagaaaaccattttcgccaagtataaccgtaccagaaaagaggaattccgcatccgcaccaccatgggggaactggacggagagcgccgggtggagaaggctgcccttgaaagcgcaggaagataccacatcctttccctgaaaaataagtgccgtcagttaaggcagctcaaccccagggtcagaatcctggagccggagatatccgcagacggcagcaaggtggagtttggtttcctggaaggcattaccctggcagaacgtctgggccggtgcatcagagacggaagggcgcctgtggaggaaattaaggctgcgcttcagtttctttatgatgtggcggaggatcagattgttccctttgccgtgacgccggagtttacccggacctttgggccggttccggatatagatgatgtttcttataaagtaagcaacattgacgggctctttgagaatctgatgattacacaaaaggacggggatgagaaactatactgcctggactatgaatgggtctttgatttcccggtccctgcccgctttgtacagtaccgcaatctggcttatttctattataaataccagggattgatgtcatatgccggcctggaagaatttttacaggagtttggcataggaagcgagatggcgtctgtgtacgcatccatggaggacgccttccagtcctatgtccacggggacgctgtccagggatacctggtgaattaccagcagaaagtgacgaccctgtctgagcttaaggagacggaccaggctctctcccaggcaaaggaccgtatcagccagcttcaggcagaggtggaggaaaagaaccagcagatccgcaaagagcaggaggtgcagcgcctgaccaataaccatgtggcaaatctggaagtgatgattaaggacctgcgccatgaaatcgacgagctgggcaagctggcaacctatctcaacgggcatgaagcccttgtgttcaaggcccggcgcaagctgggagcccaggtcaacaaagcatttccaaggggaacccgcaagcgcaagatactcaactactgctttaacacagtgaagcacccggcgcgttacggaaggctgtacgccaccaaagagggacgcaaccagatagaaggcgattttaagattggcgaggattatctcaaatacggcaggctggtattccccagggtaccgggcaagggaggatatgtggactctggcagcggcgaaacgtgggacggcccaatggtttccatcgtgattccctgttataatcaggtccactatacctatgcatgtctccagtccattctggagtttacaaaggatgtcacctacgaggtcatcattgccgatgatgtgtccaccgatgcaacggcagagctgggccggtatgcagaggggcttgtaatttgcagaaatgagacaaatcaggggttcctgcgcaactgcaaccaggcggcaaaggctgccagaggaaaatacatcatgttcctcaacaatgacaccaaggtgacagagggctggctctcttccctggtgaacctgattgagtccgattccaccattggcatggtgggttccaagctggtgtacccggacggacgcctgcaggaagcaggaggcattatctggagcgacggttccggctggaactacggccgtctggatgatccggacaaggcggaatacaattatgtaaaggatgtagactatatatcaggggccgccatccttctgagcacagccctgtggaagcagattggcggatttgaccagcggtttgccccggcttactgcgaggattcggacctggcttttgaggtgagaaaggccggatacagggttgtataccagcctctctccaaggtaatccactttgagggcgtttccaacggtacagatgtaaacggaaccggcctgaaacgataccaggtggaaaacagtgaaaagctgaaggagaaatgggctgaggaattcaaaaagcagtgcgtcaacaccggaaatcccaatccgttcagggccagggagcgcagccagggaaagaaaatcatcctggtggtggaccactatgtgcccacctttgacagggacgcgggatccaagacaacctaccagtacctgaagatgtttctgaaaaagggctatgtggtaaagttcctgggagataatttccttcatgaggagccctataccaccacccttctgcaaatgggaatcgaggtactctacggagacacatacgcagcaggcatatgggactggttaaagacaaatggagacgagatatcatttgcgtatctgaaccgtccccatattgccaccaaatatgtggattttataaaagattacaccaatatgaaggtgatttactatggacacgacctgcactttctgcgtctgggaagggaatatgagctgaccggggatatcaacatcaagagggaggcggattactggaaatccgtggagctgaccatgatgcacaaggcagctgtttcctattatccttcctatgtggaaatcaacgccatacacgccattgacggaagcattcccgcaaaggccattacggcgtatgtctatgacacctttctggataacatacaggatgactttgcagagagggaaggactgctgtttgtaggcggtttcgcccatccgcccaatgcggatgcagtgctgtggtttgccagagaaatattcccgcttatacgcagggaactgccggatgtgaaattttatgtggccggatccagggtgacagatgaaatcaaggccctggaggagccgggcaatggaatcatcatcaagggttttgtaagcgaggaggagctggcgcagctctacggccattgcaaggtggtggtggtgccgctcagatacggagccggcgtgaagggtaaggtagtggaagctatatacaacggagcgcccattgtgaccacatccacaggggcagaggggattccctttgcggacacagtgctggaaatagaggaccaggcagagctgtttgccggaaaaaccgttaaattatatcaggacaatgaacgtttaaaccagctttgccgcaggacccaggattatattaaaaaacactacagtctggacggggcctggaaggtggtggagggagactttcgttga

SEQ ID NO: 13 - DNA, 1986 bp, Clostridium bolteae
atgaaatgtaccaagtgtggagcagagcaggaagcagatgtgaaattctgtacccagtgcggggctccgatggaacatgaggatcagacaccggaaaacaacggcccggagccggcagacaaggaaccggcgtccggcgcggaggcagtaaagtcggaagaaccggcatccggtgcggaggcagtaaagacggaagaaccggcatccggtgcggagacagtaaaagcagaggaaccggcggacgaagcagaggcagtaaaagcagaggaaccggcggccgaagcagagaatgtaaaaacagaggaaccggctccggcagcagtgactgtgccggaagagccccagccaaataagaagtttatcaagatattggctgcggtcatcgcctttgccgctgtcattgccgttgcagcgctggcctatgtgaagatgaccacaaaggatccaaagcaggtggtcattgacgcttttgaaaatgtattcccggaaggacaggtttacccttctgaggagctgttcggcctgaaagactttgctgagacagtgaagacagcagacagccagggcggcctgacacttaagatggacagctgctcggatgcgacagtcaatgcttatgcaggaagcggcctgcgctttgaggcaaaggatgacaagaccaacggcaggagcttcttcaacatgggagttatctacagcggaatggaccttgccaatctgaacgcatattacggggatgataccctgatgcttgcggttccggagctgtccgccaaggtgtttaccgtggacctgggagagggactggcagaccgtattaagaattcgcctaccgtgggacctctgctggagcagaacggcgtggatgtggaaggcatggctgtttatttcacagagctgatggacgaggctgaaaaagcacagacagaaggcagacagccctttgacgtggaggcgctgattaaccgttataaagaaggatgcaaggcccaggagaatttcaaggctgccctgacagttgaaaaggccgctaagggaacctacaccatagacggcgcccaggtaagctgcaagggatataatgtgactgtcagcaaggattccatgattgaattccttcgtcagtcctctgatttcttccttcaggacgagaccctgaaagcagattttatgcgtcagctggagaccaccgttaagatgagcgagcttatgggcggaaccatgtcagggaccggaaccatgtccgcggaggagatgcagcagcagtcctacgaggaggcaaagaaaatggtggaccagatgatagaatatctggacaaggcgctgactgatgtaaacatgacggtttatgtggataagaagggacgcctggcagcagtggaaggctccaccaatctctatgttgaggatacagatgtttctgaagagggatatattgcactgacctttagctgccagcttcagggcggcgcctatctgactcagaatgccctggccagcattacgctggaggatgccacggatacggtgagcattgatatggtgaagcagggaagctacgataaaagcgtgctgaccagcgacctttccctggatttgactgttcccggtgatgagacctataactttacatacaccagtacatatgattccaaggacggaagctaccacctgtcaggcgaggtaggaggaaatggctcacagcttgtgaagatttccgctgaaggcgcagtggaccagctggaaaagggaaaatccgtccatgtgaacattgattctctggagacatccattatggatgattccgtgaatgtggttctcagcggtgaatactactatcagccgctggaaggcgaaatcagtcctttagagggcgagaccatggatgtgctgtctgccacggaagaggattggaccaatgtagggatggaaatgctgtttggcgtcatgggattaggcagccagatgggagtatccatgtattaa

SEQ ID NO: 14 - DNA, 2346 bp, Clostridium bolteae
gagctgtggggatggacaggaggatacccggtacggcagcgaaacgtgatttacgaaaaccatacccggggaagagggagaataaatatgaagaaacggatggtaatagggctgtttctggcgctggtgctgatatctgctgcaaccggatgcacggccgtttgggataccggggccacagaggataagaaacagagcggcgcgcagccggctgaggagccggttgtgctgcatgtgtacaataccatgggtgagaatatcaatacggagcaggcggaagcctatatccaccgcacgatgcccggagttaaaattgagagcacatatgaaatagcgccaaagatggagaatgcccagctggcagcggtgcgcagcggaggcggcccggaaatcctctatacacaggattattatacctatgtccagagcggttatctgaaggatttgacctccgaaccatttttgaagaactacatgatcagcgccttaaatgatgcggaggtagggggtaaggtatatgcccttccggttggaaacgggtatatctcagggctgatggtgaacagacagctcctggcggatatgggatatgatatgccccggacacaggaagagtttatagggctctgccgccggattcaggagagaagggaggagaccggggtacgggcctatgcctttgggatgctttacaatgacgcagcagcagtggtggccatgccctttcttctggatgcgtacacggacagcgaatatgtgcagtggctgaatctgtaccggaataatccggcaggggtttcctttgaaaatccggcatttgcccgtgtccttaagggaattgatgagctggaaagcatggggctgtatgagaacggcgacttcctgatgagcagcaaacagaatctgcgggaggtggttcggggaaacgcagtcatgtgttcggtgagctatgtggactacgcggttcattttgaagagaagctcagggatgtgaacggggtcccaagctttaaaatagaaaaggacggcaaacaggtatgggtgaaggccgaggactttgtattcataccatatatgggaagaaccagggaggatcgctggctggccaccaacggggactggtatctgggaatcaatgcaaacataacagacgagactgtcctcagggcctgccgcctgtatctggaatatgtggcctccacagagtttgcgccggaatattacagtgcttcggttcccgtgggcgctaccacctactaccggcgggatgacacattaaattatgattattttcagaatacccatcctgaattttaccagtgccttacagaacactccattgtgaaaaatccttaccagttttacggttcggatttgtttacctttgccctgcgccattacctgtgcggacagaactattatgcgggtctggaaggcgccagctcctacatgaagattggcggcacagaggggatgctggaggcgctggaagaataccgcactacagggaaaaaccgttaccaggtcccggaccatgtggtcgggaagacagataagacatacaattatgtgcgtatattttcccgctccaatgaatcagctctgggaaacctgctggctgatgccctgcgccagtacacgggcgcagatctggccgccatcaatgcaggaactctgacagcggagcttgaggaaggggagataacagagtctgatttggccacctccatgctctacggcctgaacaaccatgtggtcactgtgcgctgcaagggcgcgaacctgatatccatactttccaccaataacctgaccgatgcggtgagagcggaccagtccagtgtgttcggcggcatggtgattccctccggtttcacctataccattacctacgaaccgctggaggataatgcgtatgggggacaggcggaaatcagcgatgtccgcctgtcaaacggagaaacgatagaccctgacgcctggtatacggtggcgaccacggattatgagctggggggaagcgacggctgggacgcgtttacggtgttaccaccggacaagccggctcagctgcctgaggggattgccctctaccagacctttgaccctggaaatgagagcgcatgcaggttatttgacctgagtacggacacctatgacgagcagtatcagcagataacggactgggccagaaatcagcccaacatcattgacgcggtgattgcctatattgagagccatagtgaaaacggagtgcttgagccggtcaccatcgacggaaggatccggattgtcaatatgccggaggggctggatgtggagaaaaacaagatccgactggattga

SEQ ID NO: 15 - DNA, 1464 bp, Clostridium bolteae
gtggaggatatgaccagacgaaggatactgacaggatgggccataggattgctgttgggagtgatggctgccggcactgcattgggtgcggagtccggatggaagacagaggacggagttcttaaatttgtggacaacaagggtaactatgtgaccaatgaatggaggacacgggacggaaaatcatacttcctgggcagcgacggggagattgagaagagcacctggatagagaatacatattatgtggacgacaagggagtcatggtgaagaattcctgggtccacacagacggcaaggacggcctgaaggaagagggctggtatttcctgggcaagaacggcaagacagaggaaggctggaagaacgtaggagacggccggtacaactttgacagcgacggtaagatgcgcacgggctggttctacgagggcgataatatctactaccttggcggcaaggacgacggtgccatgagacggggctgggtatgcctggaatttgatgaggatgatctgcctgagattggggatatctccaaggaatataagaaggcagatgagaattcccggtggtttttctttcagaataacggtaaggccaaacgctctcttaccggcaattatgaccaggagaccattcacggagaaaaattctattttgaccggaacggtgccatgctgacgggctggcatgcggtgaaggagaaagcggacagcgatgatgccacaggcatcagccgtttcgtatacctgggcggtaaggacgacggagccattgcaaagggacagtggaaacagctgtctgagcatcccggtgattccgacgacggggcagccatcttaaagaagggggatgaggagcttccaagggaaggggataaggagtggtattactttgagaacaacggcactcccgcctaccttaaaacaggcatctccaccatgaatgccgccaccatccgggtggatggcgaaaattattttgtgaaccagtatggatgcagaaggaacggactggtcaagatagtatccggcggccatgtgttggtgggatatttcggagaaaaggggactgacggcaggatgctcaccggcaggaataccggtattgctgacgatgacggcaaacgctgcaccttctatttcaacacctcgggatccaacaagggagctggcttcagcggagaaaaggatggattcctgtactacaacggtttgctggtgacagcggacggggattcccagtacgaggtctatcaggtggacggcaaatattacctggtcaatgaatccggtaaggtacagaccaatgagaaggcttataagagcgatggggattatgtctatttggttgaggacagggaagtttactatacggatgacaacgggaaaaagacgaagaaggcagacagcagcgccacgcttccggatttcacctgtgatcaggtatatgagctttga

SEQ ID NO: 16 - DNA, 2142 bp, Clostridium bolteae
atggaggataagggaaagaaagctgccggccccgcagacggcataacatgggacaaaaaaacaaactgtatcgaccatctggccctgcccggcaccattcacctggtacccatggattacgtgggaggatacgcggtcaggccggggttctatgagatcaacggagccaccgccatacccgggggagtcaattttacagtgtattcccatggagccacagatattgagcttttgctgtttcggcggacagaggaggagccttatgcggtcctgccctttccaaagcattaccgcatcggcaatgtgtactccatgattgtgttccggctggatatcggtgaatttgagtatgcgtaccgggtggacggcccatatgaaccggaaaaagggcttatatttgataagaccaggtatctgctggacccctatgccaaggcggttaccggacagagccggtggggggaaccgctgccgggatgccagcactataaggccagggtggtcagggatgactttgactgggcggatatggcccagcccctgacccccatggaggatttaatcatttatgaacttcatgtaaggggatttaccatgcacggatcctcagccgtacttcatccgggaacctttgagggattggtggaaaagcttccctatctgctggagctgggcgtgaacgtggtggagctgatgcccatatttgaattcgacgagatgcaggattaccgggaggtggacggccgtaagctttataattactggggatacaacaccgtaagctttttttcgcccaataccagctacgcggccggtacagagtacaaccgggagggcaatgaacttaaaaacctgatacaggtgttcaaccagcacgggatagaggtctatctggatgtggtattcaaccatacggcggaagggaatgaaaacgggcccttcttttcatttaaaggatttgacaataatatatattatctgctgactcctgagggatactattacaatttcagcggctgcggcaatacattaaactgcaatcatcccattgtccagcagatgattctcaactgcctgcgctattgggttacggcgtaccggattgacgggttccgctttgatctggcctccatcatggggcgcaacgaggacggcacgcccatgagcaagccgcccctgcttcagagccttgcctttgaccccattctgggggatgtcaagctcatagccgaggcgtgggatgcggacggtctttatcaggtggggaccttcccgtcctggaaccgctgggcagagtggaacggcaggtacagggacgatatgcgccgccatatcaagggggaccagggcatggcgcaggcggctgccctgcgaatcgccggatccagggatatatatgcggaccatgacaggaagaacgcatccgtgaatttcattacctgccatgacggttttaccctttacgatctgttttcctacaatgtaaagcacaacgaatcaaacgggtggaacaatacggacggcgccaatgacaacaacagctggaactgcggcacagagggggaaacaggcgatcctcaggtggaagccctgaggcggcgcatggtgcgaaacgcctgcgccctccttatgtgcagcaggggaatccctatgtttctggcgggagatgagttctgcaacacccagttcggcaataataatgcctattgccaggacaatgaaatttcatggctggactggggacggctggggaagtatagggatatatttagtttcttccaatatatgatacggttccgtaagacccaccgcctggtgcgcgccaatgtgagcggcggggcctgcggctttccggatgtgagctttcacggagtaaagccctggtgcagttcctttgcggagtacgagcgctatgtgggagtcatgtttgccggccgggaggagggaaaaggccctcagaccgtgtacattgcgtccaatgcatattgggaggagcttgatgtggagctgcctgtactaccggacggaatgaaatgggagctggcggcagacacctgggaggatacgccttgtccgggtcccctgagggcagacggattcaggattcgtcccagaaccgtggtggtgctggtgggaaaatag

SEQ ID NO: 17 - DNA, 1608 bp, Clostridium bolteae
atgagtatcttaacagccacattattgtcattgttatacttttggggaaatagtgcatttgttctgggtgtaaactggtggaccgtcatgaggccccttgtttccggcttcctggccggcgttatcctgggagaccctgtaaagggcgccatggtgggagcccagattaacattctttatctgggattcatcggagccggcggagcccttcccggtgatatctgtctggccggcgtggtgggcaccaccattgccattacgggcaatcttcctgtggagacagccatggctctggcagttcctgtgggactgctgggaaccatcatatgggtggtgaagatgacggtcaatacggcctgggtccgggtagcggaaaaaatgtcggcaaagggggacaccaggtactattggatacccaatatcgtgctgccccagctgctgctgtttctgatgtcctttataccctgtttcctgatggtatattttgggacagattatcttaagtctgtcatccagtttttgggagaaaacatagtgggcgtccttaccaccatcggcggcatgcttcccgcagtaggtattgccctgaccttaaaatccatatttaagggtgagtccgtggtattctttttcttcgggttccttctggtccagtattttgggctggatatgatatctctgggattttcagctgttgtattcaccctgatttatatgcagttaaaaggccataagctgagcgccatgggcggcagcctgtttggggcagagggaaataatgagaacaagtatgtacttttggacaagaagacaatacgcaaatcctggctccggtggattatgttcaatcaggctaactataattatgagaggatgcagggaaccggtttctgtcacgccatggtgcctgtcatcaataaactctacccggataaccaaggaaaacgcgcggaactgatgcagaaccatatgcagttctttaacacggagcctcagtggggggcctgtatcattggcctgaccgctgctctggaggaaaagagggcccagggctctgaggagattacaggggataccatcacatccattaaatccggtcttatgggaccgctggcaggcatcggagataccattgacggaggcgtggtgacgccgctgctccttacattattcatcggcattaccaatacaggcaacatcatgggggttattggctacattatagtggaagccctgtttatgtggaccatatactggcagtcctacaagctgggatatgaaaagggcagcgatgccattgtaaccattatggaaagcggtctgattaaccagctcatactgggcgcatccattatggggtgcctggtgcttggcggactggtaggcaattatgtgaccctgggattaaaacttatggtccctgtgggcggaggcgtcatgttcaatatccaggaacagctgtttgacgtgattctcccgggagcgcttccgctgctgctgacccttggcacatacaaactggtaaagaagggctggtcgtctgtcaatattatcatcctggttgcggtggttggtctggcaggcggacttttaggaatctttgcataa

SEQ ID NO: 18 - DNA, 3777 bp, Clostridium bolteae
atgagcgtaagacgaatatttgtggagaagaagccagcttatgcagtaaaggcaggggagcttcgtgaagaactggaaaattatctgggcatccataatgtgaaaaatgtgcgggttttaatccgctatgatattgagaatctgtcagaggagacctataagaaggcgctggtgactattttctcagagccgccggtggatctggtttacgaggaggaatttaccaggaatccgggagacctggtgttttccgtggaatatctgccgggacagtttgaccagagggcggattcggcagagcagtgcgtaaagcttctgaaggaggatgaggagccggttatccggtccgccaccacctatgtggttacggcgcccctgaccgcagaacaggaggaggcgatcaagagcttctgcatcaatcccgtggacagccgtcaggcggatgaggagaagccggaaaccctggtgacggaattcgaggttccggaggacatactgtattttgacggatttgcggattcttcagaggaggagctgaaggctctttacggtaccctgaacctggccatgacctttaaggacttccttcatatccagaattattataagaaggaagagaacgggggaccgtctgtgacggagatccgtgtgctggatacttattggtcggatcactgccgccataccaccttttccacagagcttaaaaatgtaagctttacggacggcgattacagagagcccatggaggaaacctataagcagtacctggctgaccgggaagtgatttataagggaagggacgataagtacgtgtgccttatggacctggctcttatggctatgaagaagctgaggagcgagggaaagcttcaggacatggaagtttctgatgaaatcaatgcatgcagcatcgtggttccggtggagattgacggtgtaacagaagagtggctggtgaattttaagaatgagacacacaaccatcccacagagattgagcctttcggcggcgctgccacctgtctgggaggagcgatccgcgatccgctgtcagggcgtacctacgtgtaccaggctatgcgcgttaccggcgcagccgaccccaccaggccccttggggagactcttaagggcaagctgccccagagaaagattgttaacagcgcagcccagggatattcctcctacggcaaccagattggtctggcaaccggttatgtgaaggagatctatcatcccggctatgttgcaaaaagaatggaaatcggagctgttatgggcgctgctcccagaaaggatgttatccgcgagacctctgatccgggggatatcatcattcttttgggcgggcgtacgggccgcgacggaatcggcggcgccaccggttcctccaaggttcacaccacttcctccatcgaggtatgcggagctgaggtacagaagggaaatgcgcccacagagcgcaagattcagaggatgttccgcaggcctgaggtcagcagaatcatcaagaagtgcaatgacttcggcgcaggcggcgtatcggtagccatcggagagctggctgccggccttaagattgatttggacaaggttcccaagaaatatgcgggcctggacggcacggagatagccatttccgagtcccaggagcgtatggcagtggtggtggatccaaaggatgttaaccggttccttgggtatgctgcagaggaaaacctggaggcagtgaccgtggcagtggtgacagaggagccaaggcttaagatggactggcgcggaaagaccattgtggacctgagcagggcctttttggacaccaacggggcacatcaggaggcggacgtgaccctggaggttccaggccgggcaggcaacctgtttgataaggcagatgtggctgacgtcagggaaaaatggctgggcatgctttccgatctgaacgtgtgctcccagaaggggctggtggagcgttttgacggttccatcggtgcaggttccgtgttcatgccttacggcggcaggtatcagctgaccgagacccaggctatggtggctaagcttcctgtgctgaagggacatacagatactgttaccatgatgagttacggctttgacccaaggctttccagctggagtccataccacggcgcggtgtatgcagtggtttcctccgttgcaaagatcgtggcggccggcggcgattacagcaggattcgtttcaccttccaggagtatttccgcaggatgaacgagaacccatccaggtggagccagcccttctccgcacttctgggcgcctacagcgcacagctgggctttggtctgccctccatcggaggaaaggacagcatgtcaggcacctttgacacggaggacggtgaaatcaatgttccgcccaccctggtttcctttgccgtggatgtgaacagccataagaatgtgattacccctgaattcaagcgtccgggcagtaagattgttgtgttccggattgcaaggaatcaatatgacctgccggactacagccaggttatggacggttatggaaagatatttgaagatataaaggcaggccgcattatatccgcctatgctgtggagggcaatggccttgcagaggcagtgagcaagatggcattcggcaataagctgggtgtgaagattgagcacaatgtggacccaagggatttctttgccgctgcatggggcgacatcgtgtgcgaggtgccggatggaatggtgggacagctgtccatatcctataccgttatcggtgaggtcactgacagaggtgcatttgagtacggaaacgtgaccatttccatggaagaggcattagacgcgtggatgactcccctggaggacgtgttccccactgccgcaggcagggaggcaagaggagaggaggctgcactggaagagaagctgtatcacagcggcgcagtgtatgtgtgcgaccataaaatcggacagccaaccgtatttattccggtattcccgggaaccaactgcgagtatgacagcgccagggcctttgagcgggcgggagcaaaggtggttaccagggtgctgcgcaacatgagcgccgaagatatccgccagtctgtggacgaatacaggagagagattgcaaaggcccagatcgtcatgttcccgggcggattctcagcaggcgatgagccggagggttctgccaagttctttgccactgtgttccgcaacgcagtgatgaaggaagaaattgagaagcttctgggcgagagagacggactgatgctgggcatctgcaacggcttccaggccctgattaagctgggcctcctgccggagggtgaaatcaaggagcagggaccggagtcacctacccttgccatgaataccattggccgccatgtctccaagatggtatataccaaggtggtatccgataaatccccatggctggccggggccggactgggcagcgtatactgcaatccggcatcccacggagagggccgtttcgttgccaatgaatcatggcttcacaggctctttgccaatggacaggtggcaacccagtatgtggacgaccagggcagatgcaccatggacgagtactggaatcccaatggctcttatatggccatcgagggcatcaccagccccgatggaaggattctgggcaaaatggcccattccgagcgccgtggcgaggcagttgccatgaatatttacggggagcaggatatgaagatatttgagtctggggtgaggtattttgggttgtag

SEQ ID NO: 19 - DNA, 3102 bp, Clostridium bolteae
atggatgcagtaaaaaaccgtgatgatttattaagcataaaagaagaatatctgagacggcaaaagtcctaccggcgtcaggtgctggtgtgcggcggagcagggtgcatatcctctaactgcggggaagtaagggatgcgcttataaagtcagtgagtacatataagctggatgatgaggttaaggtcatggtcaccggatgtatgggtacatgcgccatgggtcccgtcatcctggttgagccggagggaatcttctacacaaagatgaatcctgaaaaggcagaggacgtggtggccaggcatcttctgaaggatgaggtgtgcgaggaatatacatattttgacgaggacgagggagtccatgtgccgaggatggaggatattccgttcttcaagggccaggtacgtgtggcgctgagaaactgcggacacatggagtatgcttccctggaggcatacatatccagggacggatacggcgccctggcaagagcactgtcggagatgacgccggcccaggtggtggaagagatgaaggctgccggcctcagagggcgcggcggcgccggattccctaccggagtgaagtgggaagcaggtatgaaggctgtgtctgaggacggacgcaaattcatggtctgcaatgcggatgagggggatcccggcgcatttatggacagaagcatcctggagggcgacccgcacagcattatcgagggcatgatgttaggaggatatgccataggagcctccaagggttatgtatatgtgagggcagagtatcccatagcagtggagcggctgggcaatgccattgaccaggccaggaaagcgggcattctgggagggaatgtgatgggaagcggtttttcctttgacctggaaatccgtatcggcgcaggcgcctttgtctgcggcgaggaaacctcccttctggcgtccatcgagggaaaaaggggagagccaaggcagaagccgccgttcccctttgaaaagggcttgtttgaaagtcccaccatcattaacaatgtggaaaccctggcaaatgcagcgcccattattctgaacggctcacagtggtacaggggattcggcacggaaaagagcgcgggcacaaaggtatttgccctggcgggagatattgtcaatgcaggtattatcgaggttcccatgggtacgattctgggagatatcatatacaagattggcggcggaatcattgggggcaaaaaattcaaggccattcagtccggcggtccctccggcggatgtctgaccaagacacatctgaacacgcctgtggattatgaatccctgtccagcctgggggcaatcatgggttccggcggactcattgtcatgaatgaggatacctgtatggtggatacagcgcggtatttcatggactttatctgcgatgaatcctgcggtaaatgccttccctgccgcaacggcaccagaagaatgctggaaatactggagcgcatcaccgagggaaaggggcagcctgaggacctggagcttctggaggagctggccggaaccattcagcagacagccatgtgcggcctgggacagacagcgcccaatcctgtcctgtccacccttaaatatttccgcagcgaatacgaggcccacatctatgagaagcattgcagcgcaggcgtctgcgccgagcttcagacctcaccctgccgcaatgcatgtcctgccaatgtatttatacccggatatatgtccctgctggcagccggcagaacagaggacgcgtaccgcctgattcggcaggataacccgttcccggcagtgtgcggacgtgtctgtacccatccatgcgaggaccattgccggcgcgcccaggtggatgagcctctggctatctgcagcgtgaagcgtttcatcggagattatgcgctgcgggatgagtacaatgtgcctctggttgaacccagaccggctaccggaaaacgtatatccgttatcggagcaggtccttcaggccttacatgcgcttactatctggcgaatatgggccatgaggtacatgtgtatgagtcagaatctgtggcagggggcgttctgtactggggcattccggagtaccgtctgccaaaggccgtgctgcagaaggagattcatgccattgagaggagcggtgtgcagattcacctgaataccaggataggatctgacattacctttgaggatatgaagaaacagtcggatgcagtgtacattgcttccggaacccaggtatccaggctgcttgatgtgccgggagaggaccttaagggcgtggaaagcgggcttggattcttaaagcgcatcggccttaagaaggatatgtccgtgcccaacaagctggtggtaatcggcggcggcagcacggccatggacgtggccaggaccgcggtgcgtctgggaacctcagaagtaactgtaatttaccgcaggtctgagaaggagatgcctgccggaaaggatgaaatcatcgaggccagggaagaaggcgtgaagctgatcgccatgacgtcaccggtggaatttctgggagcagaaggtaaggtgacaggcattcatctggtccgcaggaaagagactgattatggaagcgacgggcgcaggcgcacggcccatattccggattctgactttttcctggagtgcgacggcatcgttacagccatcaaccaggatgtggatcatcaggtttaccgcaccactcatgtggaggtggctaagaacggtaagctggatatcggcaggtttacatctgagacaggagagtcaggcgtgtttgcaggaggcgatgtaagtccatggggcgccaatgttgtgattcacgccattgcggacggcaagaaagctgccatgaagattgatcagtaccttggaggcaagggcgagctgaatatgggcgagtggtttgatatacctgagatagcggatattgaagtcaatgaacctcataagcgtttcccgaccaggtgtctgtctgtggaggagcgcaaggacaatttcagggaagtgaactgcggattccacaagctggatgccatgggcgaggctctcaggtgcctgcactgcgacaggagatag

SEQ ID NO: 20 - DNA, 2571 bp, Clostridium bolteae
atgagaagctatgtttttatatccataacagctttatatttctatacctttcttatgctggcttttatgtcggctaagaaatcacggctgattcgtgattttatcgctgtgctgggcgccatgattctgtggaccggcggttcccttttgatgaggcttcgggcctggccgtcctatgagctgtggtttcatctttcgctggcaggaatcagcttggtgccgtgtgcgtttttctgctttatcagggatttctgcggccataaggcgaaaagctcccacaggatgtggctggtgcttatccttctggtgaacctctataatatatggacaggaaacctggtccagccgcctgctatcgagtggaatggagccagcgccgtgtttgtctatcatatggactggcgtgccagcattatgtacggactctgcttcctggtaatcatacatacggccgccatcatatggagcagccggaaaaacagggccctgaaggccaaggtggtaccgctgctgtcaggtatactcctgctttttgcaggcaatatggctgtgcctctgttcaatggatttcccattgatatactgtcaggggtgctgaatgcaggggtgatgttttatacgctttattccaggcatgtgttccgcatgaccctgctggtatccagaggcaactgctacatcattgccatggcagtaagcgccctggccttttacaatgtggcccagaccctggacggcatcatccgcagggatataccaatgctggcccctttcagcgtcatgattgtggctactatgaccatgctggtcacactgctgatttacatggtggccaaaggattttttgaccggatttttattaaggaggaggtgagccagacagaacggctcagcgaatacaccgccattgtgtcccaatccctcagactgactgaaatcctgaatgccctggtgaacgtcataggaaatactctgcacacaaggaagatttatatttgcatcagggattcccaggggaattatccggctgtattcagcagcagtcccctggatgacaagaatttttctctggccggcagcgcgccgcttatcaactggcttaaaagccatgattcctgtctgctgcttaaggatttccgcaggaccgtggaatataagtccatgtgggaggaagaaaaataccagatggaggtccttaagattgagtgtattctgcctcttaaggatgggaacgacctggccggactggtgcttttaggaggcagggagaagcggggaaagatgcgtacccaggggtattccgaggaggacatcatattccttaactccattgaatccgtaagctccattgcggtgaagaactccaggctctatgaaaaggcatatgaggaagccagaacagatgagcttaccggacttttgaaccggaaatatttctgccagacactggaggaaaattacgaaaaatgcaggcgtacctccctggcccttgtcatcttcaacgtagatgattttaagctgtacaaccagctttacggcaatcatgagggagataaggcactggtgcatattgcgcgtatcatacaggggactgtgggggataacggctactgcggacgctacagcggcaaggaatttgccgtcatcctgcctgattatgatatctattcagcgcagaacctggctgagaacatttcgcggcagatccagaatatgaatctggactgtacagacacttacttaaagcccctgactgtcagctgcggaatctgcgcggctccgtacgcagccgcgtccatgaatgagctcatatccaacgcagactgtgcggtataccatgtgaagcgttccggaaagaacggaatccgggtatactcggacggaatcatcggggtgagggatacagacgagggactggcaaagaagcaccgaagcatgtattctgagtatgctcccaccatctatgccctgacagctgccattgacgcaaaggaccattatacattccagcattccaagaatgtggcctattatgcccatgccatgggacaggccctgaaaaccagcgaggaataccaggagattcttaaggagtcggccctgcttcacgatatcggaaaaatagggataccggaaaacatactgaataaaaccggaaaattgacggatgaagagtacagtaccatgaaacgccatgtggaggcatccgtggaaatcatacgccacctcccctccatggattatgtgattcccgctgtcctgggacaccatgagcggtatgacggaaggggatatcccaggcgcatcgcagggaaggatatacctctggcagcaagaatcctttgtattgcagattcctttgacgccatggtatccaagcgcagctataagcccagcatgtcggtggaattcgctgtcaatgagctggaacggggcgcgggaacacagtttgatccggagctggtgccggtattcatcggcctgctgaaggatggaatgatcaggcctgcgctgaacgatgggaatgacgtctgcagcagggagccggaagggacggatgcagagatttaa

SEQ ID NO: 21 - DNA, 2292 bp, Clostridium bolteae
atggcgacaataacaggatttatagagcggattaagttccgcaacgaagaaaacggctatacagtaatgagcgtcacggatcagagcgacggggaagaagtcatcatggtaggcaatctggcttatgcggcagaaggcgacatgatagaagccagcggccatatgacccagcacccggtgtatggagagcagcttcagatagaaagctatgagatgaaaacaccccaggatgaactgtccatggaacgctatcttggctccggtgccatcaaaggcatcggggccgctttggctgcccgaatcgtgcgccatttcaaggcagacaccttccggatcatggaggaggagccggagcgcctgtccgaggtaaagggtgtcagtgagaaaatggccatggccatagctgagcaggtggaggacaaaaaggatatgcgccaggccatgatgttccttcagaattacggcattaccatgaacctggcggccaagatataccaggagtacggtcccacgttatacgggattatccgggaaaatccctaccgtctggcagatgatattccgggggtgggctttaagatggctgacgagatagccgagcgggtgggaatctttacggattccgattaccgcattaaggccggtattctgtacacccttctccaggctactgccaacggccatacctatcttccccagaccgaactgtttgcccaggcatctgagcttttaaaggtagagccgtctgccatggagaagcatctgatggatatgcagatagaccgcaaggtggtggtaaagccgtctgcccagggcccactggtctactcctcccattactattatctggagctcaatgcagcccgtatgctgcatgacctgaacattaagggagacattccacaggccgaaatcaaggccaatctcctaaagatacagcagcaggagtccatacacctggatgaactgcaggaaaaggcagtatacgaagccgtaaacagcggactgttagttatcaccggaggccccggtaccggtaagacaaccaccatcaatacaatcatccggtactttgagatggaggggatggaaatacttctggcagcgcccacgggccgggcggccaagcggatgacggaggcaacaggatatgaggccaggaccatccaccgcatgctggaactggtcccggtgggaatgcccggcaatgacgcccctgtgatccccggcgcgccaaggtctggaaagggagcccagagcatgggaatgcattttgacagaaatgaagaaaatcctctggatgccgatgtcatcattatagatgaaatgtccatggtggacatcagccttatgcattccctgctgcgggcagtaaacgtgggcacccggcttatcctggtgggggatgtggaccagctccccagcgtgggtccggggaatgtactgcgggatattatcgagtccggcagctttaatgtggtaaagctgacccacatcttccgccaggccgcccaaagcgatatagtagtcaatgcccacaaaatcaatgccggagagccggttgacctggcaaaacgcagccaggatttcctctttatccgaagggacaatccggatgcggtcataagcgcggtcatcaccctgatccagaagaagctgccagactatgtacacgccaatgcctttgatatccaggtcatgacgcccatgcgaaaaggcgccctgggcgtggagcgtttgaaccagatcatgcagaactacctgaatccgccggataagtccaagaaggaaaaagagtcaggcggaaccatttaccgggtaggtgataaagtcatgcagataaagaacaactaccagatggagtgggaggtccgcaacaagtacggcatacctgtggacaagggagcaggaatctttaacggcgacgttggaatcatccgggagatcaatgattttgcggaactgctcaccgttgaattcgatgagggcaagatgatagagtacagcttcaagcagctggaggagctggaattggcctatgccatcaccatccacaagtcccagggaagcgaatacccggcagtcatcatccccatgtacaatggtccccgcatgcttatgacacgcaatctcatatacacggccgtgacccgcgcccgctcatgcgtgtgtctggtgggacagccggacgcattttacaccatggcgtcaaactgtgtggagcagaaacggtattccgggcttaaaagcagaatcggggagatatatgcgcagccggattccattggctga

SEQ ID NO: 22 - DNA, 4218 bp, Clostridium bolteae
atggaggagcttatgcaagaggatacccttaaacaattcctgccagccactgaaagctggtttaggaaaacattcggagaacccaccaaaatacagagagaggcatggcccgccattgctgacggaaagcacgtgctggtaagcgctccaaccggtacaggaaagaccctttcagctttcctggtgttcatagaccagttgggcggactggctgagaggggggaacttaaggaggagctgtatgtgatatatgtgtctccccttaagtctctggcgggggatatcagggaaaatttacgcaaacctttggagggaatcggagcggaagctcacggggaaagcaaagcggaaagcagaccgagtaatccatccatagggcagattcaggccgccatccgtaccggggacacgcctcagaaagagcgccagaggatggtaaagcatccgccccacatcctgattatcactcccgaatctctttatctcatgctgacatccaaatccggccgacaggtgttaaagactgcaaaggcaattattttggacgagcttcacgccctcatagacaccaagaggggggcgcacctgatgctgtcagtggccaggctggataaactttgcggccgcaggcttcagagaattggcctgtcagccaccattgagccgctggagcttgcggccgcctacctgtccccggaaccggccgttatctgtgcaccttccatggataaacaggtggatatacaggtcattggtacggctcctgctgtgggaaggcggaaggatccggtatgggaagagctgggaatggcagtataccgccagtgcttaagctgtaagagtgtaattgcattttccgaaggaaggcgttatgtggaaaagctggcatactatgtaaatctgttgggcggggacgggtttgccagagtccaccacggaagtctgtcaaaggaacagagggatgaggtggaacgggatttaagagaggggaggctgagactgttatgtgccacgtcgtccatggaactgggcattgacgtgggggatgtggaacaggttctgcaggtcggatgtccccgcaccatttccagcaccatgcagcgcctgggccgggccggccataatccgggccgggtcagcgtcatgtatatgtatcccaggactgcgtccgaatcagtatactgcggcatgaccgcgcaagtggcccgccgtggaggcgtggaacgggctaatcctccgcgtatgtgtctggatgtactggcccagcatttggtttccatggcttcgggagagagctacagcatagatgatgtgatggatgtgctggagcgttcgtatccattttaccaggtgaccaggaaggatgtggaggacgtccttgccatgctggcaggagattacgaacacagccgggagataccggtgcgtccgaggattttgtatgaccggattcacggccgggtggctggggatgtttacagccgtatgctggccacggcagcgggagggaccatacccgacaaagggatgtacgcagccaaaacagaggacggggtgaagttaggagagctggatgaggaatttgtctatgaatccaggatcggggaccggttcatgctgggctcctttggctggcgtgtggtccgtcaggataaggactctgttatcgtgacccaggccccggccgaaggcgccagacttccattctggaaaggggagacaaagggaagagatcttagaaccagtcttgcctttggccgtatattaggagagctggagaaggcatgccgtgacggagagctggaaaaagctctggagaaactgggattagacgagtctgcgtcggtccatgcgtccggatttataacacgtcagattcaggcaacagaaggactgcctgatgacagaaccatagtggtggagcattttaaggacagtacaggaagccaccaggtcatggtccatgctctgtttggaagacgggtaaatggtccgctgtccctcgtcctgcgtcatatgatacgcaataccatggggatggatgtggggagtgtggatgaggaggatggctttcttctgtatccatacggcagtgagcaattgccggaaggacttttattccaaatcaacccggaccaggtacggccgatgctggaagcaatcctgcctgatacgcctctgttcggcatgacattccgctacaatgctgcccgcgccctgatgatgggcatgaaacggaacgggcgccagccgctttggatgcagcgtcttaagagcacggaaatgttaagctctctgatggaccagccggaccatccgctgattcgtgagacaaaacgggaatgtctggaacaccagtgggatatcagcggagtgatggagatactggccaggatccgatccggcttcattacggtcagagaaatctggctggatgtcccttctcccatgtctctgcccttccagtggcaggcagaggcagaagagatgtatgagtattcaccggtgacgcctaaaatccgccagaccgtgcaggaagatttgaaaaaagcattgcttaagcccacaccagaggaactgtccaggggatggtcacggagaaaaatgccggaaaatgaggaggaactccattcgcttctcatgatggagggagatttggaggcaggagagctggatatacctgctgactggctggaggccctggcccggcagggactggcctgttatgtggagccgggaatctggatagcggcagaacatgaggacgaatatataagggcattgcagcagcaggatgaggaagccgcaatgcacatcgtccggcgcatgctctattaccgcggcggtcagactgcggtggatgtaagggaacggtattttctgtctgaggaaatgacagaggcgcttttagataaactatgccgcagcaaaaaagcagtggaggaccagggcgtatactatcacgaaaagctctatgagagggccagggaaggccatatacgcagcctgcgcagtcagacagccacacagcccgcatctcattacgccgcgctgatggctgccagggcagtgacacattccacggcagaagaacaattaagggaagccgtggaaaaaggatgcagaaagccatgccctgtacgcttttgggaaaatgtgtactttgccaggcgggtggagcggtatggagccagtcttctggaccggctgctggcccagggggactatttctggagaatgtcgccggaaggaaccctttgtttttgcagctatgaggatatagactgggaggcatctgccggggcagaggcagcagggcttaagggcgatgagcttctcatgtaccaggagttaaggcgcagaggagccagtttccttaaattccttacaaaaataccaaaggaaggcagcgcccaggaagtattgttaagtctggctgaaaagggcctggtatgtgcagacagttttgtgcctgtaaggcaatggcagaatcaggacaaggtaaagaaagctgctgtgagacaacgtgtgaataccagggtcatggcactgtcagctgggcggtgggatatagtaaggccggtaagaaaatatggaccggaggattggctggagcagttttttgatgaaaatatgattctgtgccgtgagacttttagaaagtctgtacaggctgtgtcagactcgccctatgtcctgaccggagaagatggaaaaaaatgggagtggagctgggcccaggcattggaaattcttcgtatctgggaatatacaggccgcatccgcagaggttattttgtagaggggatgtcaggagcccaatttgtccgcagagaggattatgatgccgtgactggcgcattgagggagccggatgaccatacggtatggttaaacggaacagatccggccctggtgtggggaaaagttctggaactacctgaaaaatgtggatttctggcagtggccggaacagcggtggccctgaaggcgggaaagctggctgctgtaatggaacgccagggcagagtactgcgtatttacgatgcagaagatatgaaggaagtgatggcggaatttgtccgtgcgttcaagcagggagccatatatccggaacaaaagaggcttgtattgaaagagtatccgtcggaggcggcagaggctttgcagcatgcaggatatatgcgggaaatgaaggattatgtaatatataagtag

SEQ ID NO: 23 - DNA, 2412 bp, Clostridium bolteae
atgagtagcggtttccgggacggggaaattggtacggatcagaaagaaaaatgcagggataggatttgttgcatggaaactggtaaaaacgataagatacttgcaatcatcataggggcggcagggctggctgtcctggctgtgacggtgttcggggtgctgctctggggcccattagagccggtgcttcggaatactcggacccttcttatgatggcagaggtggtccttgtgtttttctggaacctgttctgtctggccggcgggagagggagaaagccagggacaggttcacacaggggtgtcagggctctgggactggcagcgggaatcgtgctgtttacctggtgccaccgtattttcctgcccctggcggtatccggcatatatatggcggttctcatactggcagggagacagcttctccggctgttcttagaagaaaggcagctttccgctcccattccctttttgcagcgtacatccatgtgccttgtgctgggaagcgccctgtggatggttttggtatgccttgtatcccttacgggacatggcgggctgatgctgtggaggggactggccgcagtcatggccctgacggccgtggtcctggaaatcctttggggacgcagaaacaaacaggttttacccggggcatggctgaaggctgtgaagaacagtgcagataagggaagaagtgagagcatggcccaggccgccttacttgccttcatcattaccatggttctgattcaggcgggccgcatgaacattgaactggactatgattcacttcactacggcctgcgctccgcctatgtactggataacggaaagggaatttacgagaatctgggcatgattaacctggtttatacctacagcaaaggcctggaagtcctggttctccctctgagcgggactccaacctatggatttgtcctggccttttctctgtggtgtaccgtggggattctcctcctggcagcagatatagtgggaagatactgcgggcaggtaaaaggaatcctggcagcagccatccttgccgctattccgggaatcatgaatatggcggccactgcaaaaagcgataatattacgctgctgcaccagctcatcatttatgactttatctgcttcgcactttgggatggggaacaggggaagaaaagcagttctgccaaaagtataccctggctttccatggctgtcagcacctacctgctgaccctggtgtataagcccacggccctggtgttttcaacggctctgggcggagtggcccttgtgtgtctgtttcttacccgccgtttaagggttggagacaggagaggcttttgcctccttctgataccgggagcagcggcggccggattgtggtaccgcacatggcttcttaccggcgtgcctgttacatccatatttgccggattttttgagaaggcgggatgcagggtgaaatatccctatacctttaaccatgtgattggagatccgtctgccctgactgcgggagaaaaatgttcacggctgtggtcgcgggtatggggaatcctgtttgcccctgtaacagaggatatggcccatgtaatcattgcatggggaaccggaattgtgacggtttttcttgtcatctggcttgctgtttcctggaaggcggggagacggggcctccggcatcccctgaatctctttgactgtatcctgattccggttctggcccttggttccctggcaagcatctatactctgtatcaggtggacgggaattatttcatcctgttttatgctgttctggttatcagcgcgctgagaatgggatgggggcagaactggggacccgcagtcagacggtccctgtctctggtgctggttttattttttgcagtgaatacagcggtgacctgtaccactggctgggccggagtgccgggctttacgcctgtgagcctgcgtcatatgggctattacgaccaccgcagggaaatgctggacagaagggccagagagggcagccttaccctttcctgtatgtttacacccaggagccgtgtccttgcattcgggaggcatcccagggtcctggatctgccgtgcagcgtccagagctactacgatgtaaccggaagcggaggaaatgtatatctggtaaagcggctggcatactttgaggagtttctgagatatgccggtacggagtatttcttcgtggaagccggatacctggcaggacaggacagggccctgcagatgattgaggatatgattgcggagggaagcctttctgatattcactatgaatggggaaatatgacggccagggttacgcttgacgccggaccgccggatgattcccaacaggcccttgaggagttcagggaaaactacagcatgacggaacttgattga

SEQ ID NO: 24 - DNA, 1467 bp, Clostridium bolteae
gattataggggctttaccatgcacaggatttggggccactggcccttggaaagagagagtaaattcgtgattcatcagtatataaataatggttatcatattgtcctggatgtcaacagcggatccgtccatgtggtggacccggtggtctacgacgccgtgcagctggtttcacagcggattccggagatggaagcgcccgctgccctgccttcagatgtgaaggaagaggtaagggtctgtctgaaggacagatacagccaggaggatatagaggaggcgctggatgaaatcggtcagctgattgaagcagagcagctccttaccaaggatatttacagggattttgtggtagactttaagaagaggaagacggtggtgaaggcactgtgcctgcacattgcccatgactgcaatctggcctgccgttactgctttgcagaggaaggcgagtatcatggacgccgcgccctcatgagctatgaggtgggaaagaaggcactggatttcctgattgccaattccggaaacagggagcacctggaggtggacttctttggcggcgagcccctgatgaactgggatgtggtgaaacggctggtggaatacggccgttcccaggaggaagcccaccacaagaaattccgttttaccctgacaaccaacggtgttctgctaaatgacgaggtaatggaattctgcaaccgtgagatgagcaatgtggtgctgagcctggacggacgaagggatgtcaacgataagatgcgccccttccgtaacggcagcggcagctatgacctgattgtccccaagttccagaagtttgcggacagcaggaagcagatgaattattatgtccgcggtacattcaccaggaacaatctggactttgcagacgacgtgctccattatgcggatctggggtttgagcagatgtccatggagccggtggtggctgacccgtcagaggattacgccatcaaggaggaagatatcccggccatcttaaaggaatacgaccgcctggccctggagtatatcaagcgtaaaaaggagggaaggggattcaacttcttccattttatgctggacttaaaggcaggaccctgcgtggctaagcgcatggcaggctgcggttccggcactgagtatctggcggtgaccccctggggcgatctctatccctgccaccagtttgtgggcaatgaaaaattccttatgggcaatgtggacacaggtgttgtgaacacggatatcagggatgagttcaagacctgcaatgtatacgccaagccggggtgcaaggactgctttgccaggttctactgcagcggcggctgttctgccaacgcgtataacttcagcggatccatcaacggggcatatgacattggctgtgagatgcagaagaagcggattgagtgcgccatcatgattaaagctgctctggcagacgatgaggaataa

SEQ ID NO: 25 - DNA, 1608 bp, Clostridium bolteae
atggcagcacctgtaaataaaggagttttcacaaaaggagtttgtaataatatgagcattttaaacgtagagcatttaagccacggtttcggggaccgtgctattttccaggatgtctccttccgcctgttaaagggtgagcacatcggcctgattggggctaacggcgaaggaaagtccacctttatgaacatcattaccggcaaactcatgcctgacgagggcaaggtggagtgggccaaaaacgtgagggtcggttatctggaccagcatgctgtgctggaaaagggcatgaccatccgtgatgtgttaaagaacgccttcgctttcctttttgagatggaagagcatatgaaccagatttgcgataagatgggggaggccggcgaggaagagatggccgccatgatggatgagctgggaaccatacaggaccttctcatggcccatgatttctatatcattgattccaaggtggaggaggtaggacgggcccttggcctggccgacataggactggacaaggatgtgacggagctctccggaggccagcgcaccaaggtactcttaggcaagcttctgttagagaagccggacattctgctattggacgagcctaccaactacctggatgtacagcatattgactggctgaaacgctacctgcaggagtatgaaaatgccttcatccttatctcccatgacattcccttcctcaacagtgtcatcaacctgatttaccatatggaaaaccagcgactggaccgctatgtgggcgattatgacaagttccaggaagtatacgcggtaaagaagtcccagctggaggccgcctataagcgccagcagcaggaaattgcggagctggaggatttcgtggccaggaacaaggccagggtggccaccaggaacatggccatgtcccgccagaaaaagctggataagatggatgtcattgaacttgccagggaaaagcccaagccggaattccatttcctggaagcccgcacgcccggtaaatatatttttgagacaaaggatttaatcatcggttatgacgagcctctgtcccgtcctctcaatctggtgatggagaggggccagaaaatcgtgctggtaggcgccaacggcatcggcaagacaactctgcttaagagcattctgggccttacacctgccctgagcggcagtgtggagctgggcgactacctgtccatcggttactttgagcaggaaatggcgcccggcaatacaaccacctgccttcaggaaatatggaccgaatttcccgcctatacacagtaccaggtccgctccgccctggcaaaatgcggcctgaccacggaacacatcgaaagccaggtcagggtgctcagcggaggcgagcaggccaaggtccggctctgtaaactgattaaccgggaatccaacgtgcttctgcttgacgagcccaccaaccacctggatgtggatgcaaaggatgaactgaaacgggcccttaaggaatatagaggcagtatccttttaatctgccatgaaccagagttttatgagggactggcaaccgatgtgtgggactgtaaggaatgggcgctgaagctgtcctag

SEQ ID NO: 26 - DNA, 2547 bp, Clostridium bolteae
atggaaccaaatgtatttgacaaggttcatgaagtagaccttaagaaaaccatggaacagtcctatatcgactatgccatgagtgttatcagcgccagggccctgcctgatgtcagggacggccttaagcctgtacagcggcgtgtgctgtattccatgatagagctgaacaacggtccggataagccccatcgtaagtgcgcccgtatcgtcggtgatacaatgggtaagtaccacccccatggagacagctccatttacggagcgctggttaacatggcgcaggagtggtccacccgttatcctctggtggacggacacggaaactttggttctgtggacggcgacggcgctgcggccatgcgttacactgaggcccgcttaagcaagatttccatggaaatgctggcagatatcaataaagataccgtggacttcgtacctaacttcgatgaaactgagagggagccccttgtccttccatccagatatcctaacctgctggtaaacggcacatccggtattgccgttggtatggccaccaatattcctccccacaatctgagggaaatcatcggagcagtggtgaagatgattgacaacagggtggaggaggaccgtgaaacctccctggaggaaatcatggagattgtaaagggacctgatttccccaccggcgccaccattctgggcagaaggggaatcgaggaggcttaccgcacgggacgcgccaaaatcaaggtccgcgccgtgaccaacatagagaccatggccaacggaaaatccagaatcattgtgacggaacttccctacatggttaataaagcacgtctcattgagaaaatcgccgaccttgtcaaggaaaagaaaattgacggcattacctacattggagatgagtccaaccgtgaaggcatgcgaatcaacatagagctgcgcagggatgtaaatgccaatgtaatcctgaaccagctgctaaagcacacccagctgcaggacaccttcggtgttattatgctggccctgatcaataaccagccaaaggtgctgaacctgcaccagatgctggaggagtacttaaagcatcaggaagaggtagttaccagaaggacccagtatgatttaaacaaggcagaagaaagagcccatatattaaagggattgctgattgccctggataacattgacgaggtaatccgtatcatccgcggagccgccaatgtggcggatgccaagaaccagttgatggagcgcttcgggctttccgatgcacagtcacaggctatcgtggatatgaggctccgtgctctcactggtttggaacgtgagaagctggagaatgagtacagggaacttcaggcaaagatagaggaattgaaggcaatccttgcggatgagaagaagctccttaccgttatccgggatgaaatcatgattatctctgataaatacggggatgaccgccgcacagccattggatatgacgatgatatgtccatggaggacctgattccggacgaggacaccatcattgccatgacccatctgggctacatcaagcgtatggatgtagataatttcaggagccagaacagaggcggcaagggaatcaagggcatgcagaccattgaggaggactatatcgaggaccttcttatgaccaccaaccatcactatatgatgttctttaccaataccggacgcgtgtaccgtctgaaggcatatgagataccggaggcaggacgtacagccaggggaacggctattataaaccttcttcagctgatgccggaggagaagattacggccattatccccatgcgtgaatttaacgatgacaaatatctgttcatggctaccagaaacggcatggtcaagaaaacacctatggtggagtatgagcatgtgcgcaagaacggactgcaggcaattgtgcttcgggacggcgatgagctgattgaggtaaaggcaacagataacagccaggatatcctgcttgtcacacgcaagggaatgtgtatccgtttcaatgagaccgatgtaagggtgaccggccgggtatccatgggtgtcattggaatgcggtttgaggatgacgacgaagtcatcggaatgcagatgcagagccagggagacagccttctggtggtttccgagaacggcatgggcaagcgtactatgattactgaattcagcgcccagaacaggggcggaaagggtgttatctgctacaagtgtacggataagaccggttatctggtaggtgccaagctggtaaatgacggccgggaaattatgataataacaacagaaggcattattatacgcatgacggttgacgatatctccgtgattggacgaaacacctccggcgtcaagctcatgagcattgatcaggattctgacatcaaggtggcaagtatagccaaggtaagggaaagcgttaccaaggacagcaatgtatatgatgaagagtattacgaggaagagaacggggattctgaagaagagagtgaagcagatgtagattcagatgaaacggtttaa

SEQ ID NO: 27 - DNA, 4332 bp, Clostridium bolteae
atgaaattacatacaaatacccttacgcttggaatcgacattggttccacaaccgtcaaagttgcactgttaaatcaggcttcccatatagtattctccgattatgaacgccattatgccaatatacaggaaactctggcgggacttttaaaaaaggcccgtgagataaccggacccattcaggtaatccctgttataaccggttccggagggctcaccctctcctcccatctggaggttccctttgtccaggaggtagtggccgtggcctctgcgcttcaggacttcgcgcctcagaccgatgtggccatcgagctgggcggtgaggacgcaaaaattatttatttcaccggaggcatcgaccagagaatgaacggaatctgtgcgggaggcaccggttcttttattgaccagatggcggccctgctccagacggacgcttccggcctcaatgattatgcagaacattataaggccatataccccattgcggcccgctgcggtgtgtttgcaaaatccgacatacagcccctgattaatgagggcgccaccagggaagacctggctgcctctattttccaggccgtggtcaatcagaccatcagcggtctggcctgcggcaagcccatccggggaaatgtggcgttcttaggcggtcccctccacttcctgcctcagcttcgggaaagcttcatccgcaccctgcgcctgacgccggagcaggttattgcgccggatcactcccacctgttcgctgctgtgggggcagccatgaatccccaggataaccaggaggctattcccctggagaccctgattcagagactgtcctcaggcattaagatggattttgaggtcaagcgcatggagcccctctttaaggaccaggaagactatgaccggttctgtgcccgccatgccagcaaccatgtaaagagcggggacctgtcctcctatgaggggtgctgctacctgggcattgacgctggttccaccaccaccaaggctgccctggtaggcgaggacggcacactgctgtaccgtttctatgacaataacaacggaagccctctggccactgccatccgggctatccgggagataaaggaacagctgcctgaaaccgcccgtatcgcctactcctgttccaccggttacggcgaagccttgttaaaggcagccctgatgctggatgagggagaggtggagaccatatcccactactatgcggctgctttctttgagccggatgtggactgtattctggacatcggcggacaggatatgaagtgcatcaagattaaggacggcacagtggacagcgtacagctcaacgaggcatgctcctccggctgcggttcctttatcgagacctttgccaggagcctgaactacagtgtggaggattttgccagggaagccctgtttgccaaaaatcccacggacctgggcacccgctgcacggtattcatgaattccaatgtaaagcaggcccagaaggaaggagccaccgtggccgacatttccgcgggtctggcttattccgttattaagaacgcattatttaaggtaattaagataacaaatgcttccgacctcggagaacacgtggtggtccagggaggcactttctacaacgatgccgtgctcagaagctttgaaaaaatatcaggatgcccggcagtacgcccggacatcgcaggcatcatgggcgcctttggcgctgccctcattgccagggaacgctatcacatggccagtgaaccggagacctccatgctctcccttgaaaagatcatcggccttaagtacagcacctccatgacccgctgcaagggctgcaacaaccactgtgtgctgaccatcaaccagtttggaagcggacgccgctttatctcaggcaaccgctgcgagaggggtcttggccttgaaaaggccaagaaagagattcccaacctgtttgattacaagtaccaccggatgtttgactacgaatccctgcccatggaccaggcggaccgcggtacggtaggcattcccagggtgctcaacatgtatgaaaacttccccttctgggctgtgttctttaagaagctgcgctaccatgtggtgctgtctccccagtccaccaggcagctctatgagctgggaatcgaatccatccccagcgaatccgagtgttatcctgccaagctggtacacggacatgtgacctggctcattaagcagggcgtaaagttcatcttctacccctgcatcccctatgagcgcaatgaaagcccggacgcaggcaaccactacaactgccccatggtcacctcctatgcggaaaacattaaaaataacgtggaggcgctggccgaggaaaacgtgcgttttatgaatccctttatggcgtttaccaacgaggagattctcaccgatacccttgtaaaggaattttccaggacattccagattccggctgccgaagtcaggatggctgcccatgccgcctggcaggagctgactgcctcccgcgatgatttgatgaaaaaaggcgaggagactctggcctggctgaaggaacacggaaagaggggcatagtcctggccggcaggccctatcatgtggaccctgagattcaccacggtataccggagctgattacctcttatggatttgccgtcctcaccgaggattccatatcccatctgggcagggtggaacggcctctggtggtgacggaccagtggatgtaccactcccgcctttacgctgctgccagctttgtaaagacccaggataatctggatctgattcagctcaattcctttggctgcgggctggatgcagtgaccacggaccaggttgccgatatcctgacccattccggcaagatttatacggtgttaaagattgacgaggtcaataacctgggagctgccagaatacgtatccgctccctcatcgcagccttaaaggtaagggaccagagacattttgagcgcagggtggtgtccagcgcctatcaccgggtggtgttcaccaaggagatgaagaaggattacacccttctctgcccccagatgtcgcccattcattttgaccttctggagccggctatccgctcctttggatataagattgaggtattgcagaaccacaaccgaaacgcagtggacgtgggactccaatatgtaaataacgacgcctgctacccgtccctcattgtcatcggacaaatcatggacgccctgctgtcaggcaaatatgacctggaccacacggctgtcctcatgagccagaccggcggcggctgccgcgcatccaactacatcggcttcatccgcagggccctggaaaaggcgggaatgccccagataccggtcatctccgtcaacgccaacggcatggagacaaatcccggcttcaccttcaccgtgcctctgctgacaaaagccatgcaggccattgtgtacggggatatcttcatgcgggttctctatgccacccggccctatgaggcagaaccaggcagtgccaatgcccttcacatgaaatggaaggcccgctgcattgcctccctgtccaagaaaaacgcggccatgatagaattcggacgcaatataaaggggattatccgggattttgacgctctcccaaggctggatgtaaagaagccaaaggtgggcattgtaggggaaatcctggtgaaattctcacctctggccaacaaccacattgtggagctgctggaatccgagggtgccgaggcagtgatgccggatttgatggatttcctgctgtattccttctacaacagcaactttaaggccgagcacctgggctccaaaaaatccaccgccagactgtgcaacgcaggcattgccttgttggagtatttccgcaggacagccaggaaggaactgacggccagtatgcattttacgcccccgtcagccatcaacgagctggcccagatggccaaaggcttcgtatccctgggcaaccagaccggcgagggatggttcctgaccggcgaaatgctggagctgattcacagcggcgtaaacaacatcatctgtacccagcccttcggatgcctgcccaaccacatcgtcggcaaaggtgtcatcaaggaactgcgccggaattaccccctgtccaatatcattgccgtggactacgaccctggcgccagcgaagtgaaccagttaaacagaatcaagctcatgctggccacagcccagaagaacctgaaaacagagagttcccgggaggaccgcggaaacggaaggcgccccgtggctgcctacagcccctgcctgggaaccatgtcgcatacataa

SEQ ID NO: 28 - DNA, 2283 bp, Clostridium bolteae
atgggaatcataggacagagcataccggtccgcgacgcggccatgaaggtaaccgggcagttcaaatatacggctgacctggagttccccggaatgctccacgctaaaatattgttcagccctgtgccccatgccagaataaagaagattgatacaagcagggcagaggcactggagggcgtccgcggagtggtgtgctatttaaacgccccggacacaaagtataacagctgcggggaagagattgacggtcacaaaacggaacgggtatttgatgatacggttcggtatgtgggagataaggtggcggccgtggcggcggatacggtaaagattgccgaacaggcagtgaagctaatccaggtggaatatgaggaacttcccttttatactgaccccggagaggccctgaaggagggcgcgtatcccattcacggtgaaagcaatattatttttccggtggatatgggggccggcgatgtggaagcgggctttaaggcagcggattatatatatgaaggtacctattccacgcctgccatccaccacagcgccattgagacacatgcatccattgcggtttatgacagcagcggcaagctgacggtctatacgcccagccaggatgtgttcggatacaggaagaacctcagcaggattttcggacttcccatgagcagggtgcgcgtggtaaatcccggcatgggcggcgggttcggaggaaaaatagatacaataacagagcctgtgacagccctgctggccatgaaaacagggcgcccggtcaagctggtttacaacaggcgggaggatattgtgtcgtccaggaccagacacggaatggaaataaagattaagaccggtgttaaaaaagacgggaccattctatcccaggatatgcaggtcataatcaatgccggtgcatatgcgggcgggaccatgagcattgtgtgggccatgagcggtaagttttttaaaaaccacaagacgcctaatatccggttcagggccactccggtttataccaacactcccattgcaggcgccatgaggggctttggctctccacaggagttctttgcccagcagtgccagatgaataagattgccagagacttacatataagcataattgacatgcagttaaaaaacctggttgaaccggatgggtttgaccagaggaacgggcagaggcatggaaatgcaagacccattgactgtgtgaaaaaggggatggagctgttcggctgggaggaggcggtgaaggaacaggaggaatccggggcggcaaagggcaggtaccggattggagtgggaatggcagcggccacccacggaaacggagtgtacggcgtgtgtccggacacaaccggcgtgatacttaaaatgaatgaagatggttcggttgtcatgttcaccggggtcagcgacatgggcaatggttccgtgacaacccaggcccaggcagtggcccaggagctgggaatcagcatggaccggatagagtgtatacaggcagatacagatgccaccatgtatgatttgggaaattattccagcagaggtacgtatgtgagctgcaatgctgctgtgaaggcggcagggaaaatcaggcaggaattgctgaaagaggcggcccagctgctggaagaggaacagcagaacctggaactgaaggacaacggggtttgtgtgaggaacaatcctgaaaagaaggcctccctggaggaagtcatcacgcacgcaaggaaagtgaaccagagggatatatgctgtgcggacacatttgcctcctatgccctggccatgtcttacggcgcacattttgtaaaagtatcggtggatacccggaccggcggggtaaaggtcctggaatatacggcggtgcacgatgtggggaaggcgctcaatcccatgtctgtggaaggccagatcgaaggcgcggtgcagatgggacttggatacgcactctcagagggaatcataattgacagcgggggaaaggtaaaaaacactacctttaagcagtaccatattatgaatgccggtgagatgccgcctatcaaggtggggctggtggaggagacagaacccaccgggccatatggggcaaagagcatcggggagtgttcggtggtaccctcagccggggcaattgcaaatgctgtggccaatgcaatcggatgtgaggtgcaccgtctgccgttaaaaccggatacagtgcttgaactcctggcccgggaaaatgagacagttgaaagaagggatggaatcaccttatga

SEQ ID NO: 29 - DNA, 1401 bp, Clostridium bolteae
attgtgaaaaaaacaaaaaagattgcagcagctgtcctggccatgactatggcagcaggccttgccgtcaccggatgttccggaaagggaggaagtacggacacagacccggcggccgcagagcagtctaaggaaacagctggaagcgccggcgagtccaaggatgacgcagctaaggctgacgacggcgcacttcaccttacattttattacccggttaatgtaggcggttccgcagcgcagctgattgaaaaaatatgtgcggattttaatgcagagaaccccgatatttttgtggagcctgtctatacaggcaattatgacgataccgtgacaaagattcagacagccatgcagggcggaacgcctccggatgtgtttgtaagtcttgcaacccagcgtttcaccatggcatccacaggcatggccatgcctcttgacgaactgattgaggctgacggggatgagggaaaagcttatattgatgatttccttccgggcttcatggaagattcctatgtggacggaaaaatttactccataccattccagagaagcaccatggtgctgtattataacaaggatgccttcaaggaagtgggcctggatccggaagcgcctcctaccacctgggaggaactggctgaatacggccagaagctgacaaatgacggccgctatggagtgggaatcgcgctgaattccggttccgcacagtgggcatttacgggcttctgcttgcagaacagcaccgacggacagaacctgatgagcgaagacggcaagagcgtatatttcaatacaccggagaatgtggaggcgcttcagttctggctggatctccagaatgagtataaatgcatggcagagggaatcgtacagtggaccgacctgcccacacagttccttgcaggtgaagtggccatgatttaccacaccaccggcaacatggccaatatccacgacaacgcggactttgatttcggaacagccttccttcctgcccataagagagtgggcgcgccaacaggaggcggcaacttctatatctccagcaatatttccgaggacagggtgcaggctgcatggaagttcatcaagtttgccacctctacggacagagcggcacagtggagcctggatacaggttatgtggctacaagacagtcatgctttgacacggatctgattaaggattattacgcagaggttccccaggcatctgttgcttacgagcagctgccgtacgcaaagcctgagcttactacatacaatgcggcagaaatctggagagtgttaaatgacaatatccaggcagccgtggttggcgatatgtctgcccaggaagcgctggacgctgcccaggagcaggcagaggaagttttgtcagagtaccaatag

SEQ ID NO: 30 - DNA, 1611 bp, Clostridium bolteae
atgcagaaaggagtccttatgttcgatttagactttattctcacctcgctgggatttattgtcccggtcattctggtcatcatcatcattacccaggggtacgtcaaggcgccgcctgaccacgcctacatcatttccggcctgcgcaagcagccaagggtgctcataggacgggcaggcatcaaaattccgttttttgagcagctggataaactgtaccttggacagattacagtggatatcaagaccgatgaatacatcccaaccaacgatttcatcaatgttatggtggatgcggttgccaagatacgggtggctgacgacgacgaacggatgaagctggctatgaggaacttcctgaacaaagagccggcaaacattgccgccgacctgcaggactcccttcagggcaacatgcgtgagattatcggtacgcttacactgagggccattaacacggaccgtgattccttctctgaccaggttatgattaaggcttccaaggacatggagaagctgggtattgacatcctttcctgcaacatccagaacgtgacggatgaacacggactcatccaggatcttggtatggataacacctccaaaatccgcaaggacgcatccatcgcaaaggcagaggcagaacgtgatattgccattgcccaggcagctgcggacaatgccgccaatgacgcaagggtggctgccgagaccgagatagcccagaagaacaacgagctggccatcaagaaggccgaactgcagaaggcgtccgatacaaaaaaagcggaggctgacgctgcctacgagattcagaaacaggaacagcagaaaaccatccagaccgccacggtcaacgcccagattgccagggctgaacgcgaggccgaactgcgtaaacaggaagtactggtacagcagcaggcattggaagctgagatcaacaaaaaagcagatgcggaccggtatgccattgaacaggctgccgctgccggcctgaccaagcgccagcgcgaggccgaagcaaagaagtacgagcaggagcaggaggccctggccaaaaaagcccaggctgacgcggaacagtatgagcgtgaaaaagacgctgaggcgcagaaggccattgctgaggcacagaagtattccatggtccaggaggcagaaggtatcagggccaagggcgaggctgaggctgccgctatccgtgccaaggcactggctgaggcagaaggtatggagaaaaaagccgaggcttatcagaagtataataaggcggccatggctgagatgatgattcaggtgcttcctgacatcgccgggaagattgcagagcctctgtcacagattgacaagattacaattatcggaggcggcagtgattcggataacggcgtaggggccattgccggcaatgtgcctgtggtcatggcaaagctatttgaatccatgaaagaaaccacaggcgtggacctggcagaaatcatgaaggcggatacatatgacgccaaggtcaaccggaacgtgaacctgaccggcgcccctgatattatccttggaagcgggcagaaggcccttcatcctaatccggattcggataatatccagccataa

SEQ ID NO: 31 - DNA, 2013 bp, Clostridium bolteae
atgaaaattggaatccggattaaaatgtttttaggtatcatggtacctgcattgatggtatttctgctgtcgggagtgctgatcagcgtgtctgtggggaaatatgccaaggtgcaggccagagaaaagctgacatctgattctgagtccgctgcccatgaagtggatactttctttaccggacatttaaaagcggttgagcagtccgcccaggaagctctggttatagatttcatgcatgaactgagaggcagccaacgggccagcgcagctccccgctatgatgaggtgatggcggccatggcggtgcgtcaggccctggattcatctaccatactgggggtctggctggctgataccgattccagccagctttttcagccggacggctttatcagtgatccgggttgggacgttacgtcaagaccatggtttgagtgcacaaaaacaaagaagcctgttatgacggagccgtacattgatgttaatacgggactccctattgtgacggcggcggcacctgtgattgaccgtcagagcggagaagtatatggggcttccggcacggatattaacctggatacccttcagcagcggatcaatgaggtgaagttagggcagacaggatttcttgtgctcatgagcggatcaggaaatattctctgctacccggacacagaacaggtggggaaatccatttcagaaatcaatatctcagatgaagtaaagcaggctgtacagaacggattgaccggggattatatatatgaaatagacggaacccggtattacgggaatcttaccagaatagacagcgcggggtggtatgtattctccgccatgccggagacggaagcgcttcagggcttttatacggtcatgcgcatgtcggcggtcacatttgcaggcagtatggtccttatggcggcggctgttctgctgatctccaacggcattacacgtcctatgaaaaaacttgctgatgctgcacaccggattgcggatggggaactgaatgtggagacgggcgtgcgctcaaaggatgaaatcgggcaggttgcctccgccatggagcgcaccgtgtcaaagcttaaggactatattgaatatatcaatgagaccaccagggtcctggatgaaatcgctgacggcaatcttcagtttgaactggaacttcagtacgaaggagattttgcgaaaatcagggatgctctgatgcggatccggactacgctgaatgatactctgggaagtatccttcgcacagcggaacaggtgacggccagttcgggccaggtagcggacagtaccagcagccttgcggatggaaatgccaggcaggccagctccgtggaagagcttgccgccaccatcaatgaaatatttactcatgtagattccaatgccaggcgcaccgaagaggtcagcgggcgctctgcggaaatggaccaccgggttgcgctcagcaacacacagatgcaggagctggtgaaagcagtaagggatatcagcaataagtcgggcgagatagggaagatcatcaaaaccatcgaagacatagcattccagacgaatatactggctttaaacgcggcagtggaggcggcgcgggccggtgaggcggggaaaggttttgccgttgtggcggatgaggtgcggaatctggcaaataaaagcggcgaggcggctaagaataccacatctctgatcgaagagtctctccggtccattgataacggacagaagatcgccaatgagacggcacagtcactggggaaggtggttaccagcgcacaacagatcgcggaggcggtggaggacatatcaaaggcttccacggaacaggccaaatccctggatcaggtgcgcatcgggatcgaacagatatcaggagtggttcagacaaatgccgctatggtggaggagaacgctgcaacaggaggcgaactttcagaggaagctaagaaactttttgatttgatttccagattcaggacggacaggaagatgtaa

SEQ ID NO: 32 - DNA, 1893 bp, Clostridium bolteae
ttgattgacagccagaaggaggcgcttacattggaggcaaaagagagtacgagaaccaggattgggttctccaggatggaaaagaaatatgagtggaaggaccatgtaatattcatgggtattctgcttgccatggcagtgtgggtcaacagaggaatcgaaataaagggtttatatatggatgacctgtacttctggtcctgctacggggagcagagtttccttcagtatgtgtttccggtgggcagcacccggttccgctttctgtattatctggccgcctggctggagatggcagtggtcaggaatcatgtgggttggttcgtgccctttaacatcctgttaaacgcagccgtgtcctggagcatatatttcatcggccgaaggctgtccagggcaaagggaatcggcttcctgtgcggctccatgtttttaatcagccgcatggcctattaccagattggacaggtgctggggcttatggaaaccatggccctgtggatggctgttatgattctctggtatttgttccggtatctcaatgagaaggacagccatgtatacttctacctttcctgtgtgctctattttggggtatgctttgtacatgaacgctatatggctctgtttcctctgcttcttctggtcctgctgtttaagaggagcaggaagctgtgggaatggggagccggtctgttatccttccttctggtccaaatcattcgcgcctttaccatagggagtattctgccggcaggcacaggcggcacccaggtggcagataccttcagcctggcggacaccttcaaatacgccctgagccagattgcctatgtgttcggcatcaatgcaggaccggaacatctcaatggctgcccatgggggcagagtcccctggccataaaggggctggtgctcctggcggatgcctgcatcgcggttattgttctggcattcctggtgaagcttgtaagggagaagcggaaggagtaccgtgttcagatgctgaagaacagcactctgttcatcctgtttaccgggctgtgtattgcgtcctccagcgtcaccatacgggtggagatgcgctgggtgtatgtatccctggtatccgcccttttattcctggcttatatgtacggggaactgacagagggagtaaagccggagctgtatctgaaacggctttggccatggggggcagcctttgcctgctatgtggtattcatgcttccggtggagctgtattaccgggcggactatcccaagctgtatctctggcccaaccagctgcggtataattcgctggccgaggagacctacggaagatatggggacggcatattcggcaaaaccatttacatcataggcgacagctatgagatgagcgatttcacggccagaacctttttcaaggtgtttgacagggaacggtcagcagaaggaaccagggtggagttcatagaaaatatccgggatatcggtctggtggatgacaggatgctggttctgcgggaagacccggatcatgagggattccaggatatcacggagattgtaagggaaatgaagctccaggtggattacggctactacagcgacggctggatggatgaacatgccagcctgacggtcatggccggtgagacaggcgtgattgacctggaggtggtatatccgggaatcatgagcggcggcgaggctgtcaggattacaatggataaggaggagccgcgttatctgccggtgcggtccaatgttgtaaatacaaccattcaggccgagccgtggcagatggtgcacctgacctttgaatataatttctttatgcagaatgcccaggaacaaaggggagaggaccggctggcggcgatagtgcatctgacggtcagataa

SEQ ID NO: 33 - DNA, 2481 bp, Clostridium bolteae
atgaaaaaaatattgcaaaaagcagggattttgttcctgatatttataggagcgctggtagtttattttatcagtgccagaaacacgatggaaaaagaatcagctgtatatacatctatggaagaaccgtctttgccagtggtttatacccagctgggcggtcaggaaatcaattgcctgcatggatacatgcaggatatggggaatcaggcagccagggagagtatctctgtgctgcctgaagaccgtgggctgaatatccggattgaagagtatggaaataccattacaggcatcagttatgaagtgagaaatcttactctggacaggctggtggagaggacagaagtggaagactgggtaagcggggacggaagcgtcagcgcggtgctcccgattcaaaacctgctggccagaaatgagacatatctcctttcaattaccgtgtccacaggagaaaaggagttgcattattacaccagaatcatgtggccggataacgcttatgcgtcagatatggtcagactggcccaggagtttaccaggaagagtctggactataatcaggcaagagatttggtatcctatctggaaaccaatgacacagaggataacagctcactggggcatgttaccatcagggccagcttcagccatttaacatgggacggcctggatgtggagatggtgggagagcctctgatgactctccaggagtttgacggcattatgggacaaatccagattcggtatcaggtagccattaatgaggaagacggaacacgttccatggttgacgcagaagataattttaccatgaaatggaatgagcagagaatctacctgatgaattacgaacgcaatgccaatgaagtgtttgacggaggtcaccagtctttttcaggtaaaaagattcttcttggaattacaaatgacaacaaagtaagaaccatgaagagtccaaaatccaagtatgtggcatttaaaacaggaggagatctgtggtgctataactatgatgataagaaggcggtgtgcgtattttcattcagaagcaattcggacgacggtgtgagaagcaattatgacaggcacgacataaagatattgtccatgcaggatgacggctctatggattttctggtgtatggatatatgaaccgggggaagtacgaaggacggatgggagtggtatattaccactatgataaggaacaggatacggtacaggaaaagttcttcctgcctgcatctgaatcctatgatatggtgaaagcagacattgataaactgtcctatctcagcgagaatgacatgatgtatattatgcttcagggtactgtgtacggtatcgatctcaagagcaatgaatccctggtagtggcccaggggctgacagagggaagctatgctgtcagcggcgatgccagccggtttgcatggcaggaaggccagaacctctatgaatccgaaaaggtccatgttatggactttaatacttcccagaaacaggaaatcgtaggggaggtaaatgattatgtcagagtattgggatttgttggaaatgatttgatatatggactgagcagttccaaggataagtggattgtcaatggccgcatgaagggtatgcctatgtatgcaatgtacattgtcgatacgcagatgcaggtggagagtgaatacagaaaggacggcatttatataacggatgtagttgcacaggatggacggattcatctgaaacggcttgtgccattgggtgagaaccaatatctgtatcagaatgaggataccattgtatgcaaccagagggttgagaaggaccccttggagggaatcggctggtttgcctcccaggataagggaaaggtttattttgtacaggcagattcggaaatacacggaaatgaggtccgtacatctgccccaaaggcattttcttatgaatatacaagtgttctggatacaggaagcagtgcttccgcatcatctgataacagcatgatattcagggcatacggaggcggacattatttaggttcatccagaaccttcagccaggcagtggagatggcctatgggcagatggggtatgtgacggacagcagccagcatattgtgtgggacagaatcaacagacagcccatacgcaatatcaaatccccggtggatgaggccaggaaggtgacaaaatatctggattcatttgacggaagccacgtctatgaggatggacttattctcattgacgcaggaggatgcagcctgagccagatactgtactatattgacaagggtattcctgtgattgcctatgtggaatcaggccagtacgtgcttttatccggctacgaccagtacaatgtgacgctctatgaccctcagacccaggagacacagaagatggggctgaatgatgccacagagtatttcaagaacctgcagaatgatttcctgtgtgctttggcagtggagtag

SEQ ID NO: 34 - DNA, 1527 bp, Clostridium bolteae
atgagtatggagagaccgggaaagaacatatggagccatctgagcctggagaagaaaatactgctggccgtgacccttatgatactgacattatttataagcaacatatttatctatctccaggtaaacaagattgccggcaagatggatacggtatatgccagcaatgtaaacctaagcgagctgtcagaggccctggagcatgtgcagaaggacatgggagactatgtgtccgtaaagagctcggacagccttgagagctattacaaaagccagcaggaataccagggattgttagaacgcctgaacgataagaccattgacaagccgggaaaaatcctggaaaagaacatccgcatgatgtcggaatcctatctggatatgacccaggatgcggtgcaggccaagcgggggcggaacgtggagcggtacagggaggcatatgagagggcccttaccctctatcagtacatcaacacgcgtatatcggagctcaatgagctgcagtttaaaaacaactctgccagctaccagaccatgagggaggcccttcgctacatggaggtgttcaacatggtaatcctgatgattgtcatgctggcagggcttatggtgctcaggatgctggtaaaggatatggtaacgccccttaccagtctggccaggaccgccaatctggtggggcaggggaactttaatgtaaagatgccggatacggattccaacgacgagattggcattgtcaccaggaccttcaaccagatggtaggaagcctggaggaatatgtggctaaggtaaaggagggggctgagaaggagcaggagcttttggagcgggagctcctgatggaaaaccacctgaaggaagcccgccttaaatacctgcagtcccagataaatccccattttctgtttaattccctcaatgcgggggcccagctggccatgatggaggacgcggaaaaaacctgcattttcctggataagatggcggaatttttccgctataatgtaaagaaaggattggaggatgccacggtaggggatgagacggctgcggctgaaaattatatctacatactgaatgtgagatttgcaggggacatacagtttaaagaatccatagaccagcgggtattggatgtgaagatgcccagcatgatactgcagcccattgtggagaatgcggtcagacacgggatccgcggcatggaagagaatgggacgattcttcttacggttcatggatgcagggactccatccgcatcagcgtacgggataacggtaagggtatgagccgagagagaattcttgaggttatggaaggcagaaagcaggaaacaccggatgacggcgattccacgggaatcggcctggacaatgtggtcagccgtctggagctgtattatcagcaaaaggggctggtccagattgtaagcgaaggtcccggaatggggaccgaggtcatcatccatattccggtgaaggaggagattggacatgtttcggatattactggcagatga

SEQ ID NO: 35 - DNA, 1863 bp, Clostridium bolteae
atgggtgaaaaagtcaggatacttggaattgctccctataagggattggtaacattaatgaaacggtacgcaggccaaagggatgatatccagctgacagccatgctgggcaatgtggaaacaggactttccctggcaaaggaacattacaggaactatgatatcatcatctcaagggccaataccgccagccgcattgcgaaaggcgtacccatccctgtgattgacattggaattgattattatgacgttcttctctgcctgaaaacagcggagaatacaaaaacaaaatttgcagtcctgggattccgttccctgaccaccattgcaaaaagcatatgtaatgttcttaagatacctacagatatattttccatcaacaccacgtccgaagccagctcccttctggacaaactaaaggagcagggttacaagaccgtcatttgcgatacggtgccctacaactatgccaagctgatcggcataacccctatccttctcacctccagcatggaaagcctgaaagccgctgttgaccaggcagtctatacctggcagacccacagggatttataccactccctgtcccttatgcaccagctcttagacagcagcgccaaccgcttcctggtgctgtcccggacaggcgaatgcatctacaccacgctggaggatgagatcgcggtccccatacaggcaaagctccagaatgaactggagcaatgctgcaccggacggaagcgttccttctttattacagtaaacaaccagatgtactccatcacctcccatctggtggatgagaccctgagcccctacatcatcttccatatcatgcgctccgagattcccctggcctactcaaaatacggggtgaccatcatggacaagcaggctgcggagaacagctttatggacagcttttacagcaatacggagctggccagagaaatccttaccaataccgaggatgcggctccgtctccgtcccctctgagccttatgataacaggggaaaccggcacaggaaaggaccgggtggctcatatctactatgcaaagagccccttgtgtgacaacccgctctacgtcatcaactgctctcttatcagcgataaaagctgggacttcatcaccaaacattataactcgccctttacggacaacggaaataccatctacatttccaacctggactcattgcaaaagcccaagcagaagcagctgctctccatcatactggacaccaacatgcatgtgcgcaaccatctgatattttcctgcacccagaccgcgggaagcgccaccccccacgtggtctttgaatacaccaatgccctggggtgcattctggtgcctatcaaaccactgagggaacaaaaggaggacatcatctcatctgccggtctctatatcaataccctgaaccaggaactggggcggcaggtggtgggggttgacgatgaagcggctgcgctcttggagcaatacgagtacccttacaacagaacccagttcaagcggatattaaaggaggccgtcatacggacagacggcccctacatctgcgcaaaaaccatacaggaagtaatccagagggaaaatgttctgttttccggatttccgttcccggtccatgcatgctccggctccaccaaagaggacgcggatgccgttccgggaaactccaggctggcggtttcccatccctccccattctgcctgaataccagtcagtccctggatgagatgaaccgggatatcgtgcactatgtcctgaatgcctgcaaaggcaaccagaccgcagcagcaaaaaagctgggtatcagcaggactaccttgtggcggtatctgaaccggtaa

SEQ ID NO: 36 - DNA, 2385 bp, Clostridium bolteae
atggaagctggccctctaaagaggcaggaaaatggaaaagaggacggatttatcatgaataatatagtaggtaaaagcgttacccgtgttgacgcttacgcaaaagtcacaggagaggcaaagtatacatcggatctggaaccaagggactgcctgtgcgccagggtggtccattccaccattgccaatgggcttgttaagaggtttgaccttgaggacgcccttaaggtgccgggcgttgtgaaaatcgtcacctgttttgatgtgccggattaccagtttcccacagccggtcatccgtggagtgtggaggccgcccaccaggatatcggggacagaaagcttctgaaccggcgcgtcaggctctatggggatgacattgctgccgttattgcctcggatgatgtggcctgccagcaggcggcccgactcataaaggtggaatatgaggaatacaaaccaatggtcacagtggaacaggccatggcagaggatgccacgcctctccaccctgatctgagaaaggacaatgtaatcgtccattcccatctcaccatggggccagaggattttacctttgaggaagggctcagggaggctgaggagaagtacggaaaggagaatctggtggtcctggaacgggagtaccacaccccgcgtatttcccactgccatattgaactgccggtatcctgggcttatcaggagccggggggcaagataacagtcacgtcctccacgcagattccccatattgtgcgccgtgtcatttcccaggcattgggactgccggttggaaagataagggtcatcaagccctacatcggcggcggcttcggcaacaaacaggatgtgctctatgagcctttaaatgcctatctgaccacagtggtgggagggcgtccggtccgcctggaaatcagcagggaggaaaccatttacggcaccaggacccgccatgccattgacgggaaatgcagggccctggccacaaaagacggaaaaatgcttgccaggaagctggaagcctatgccaacaacggcggttatgcgtcccacggccacgcaatctgcgccaactgcggcaatgtattcaaagatatttaccaggaccggctgggggctgagattgactgctacacggtatggacctccactgccactgcgggagccatgaggggatacggtattccccaggcagcctttttatcggaatgccttacggacgatgtgtgccgggcaatcggcgcagcccccctggctttccgcatggaaaactgcatgggagagggattcgtggaccctgccaacggtattaccttccattcctacggccttaagaagtgtatggaggaaggggcgaagtacattggatgggaggagaagcgcagggcttatgccaaccagacaggccctgtgagaaggggagtgggaatggctatcttctgttataagacaggggtatatcccatttcactggagactgcctccgccaggatgatactgaatcaggacggctccatgcagcttcagctgggagccacggaaataggacagggcgctgacactgcattcagccagatggcagctgagacaaccggcatatccctggaaaaagtgtatattgtatccacacaggacacagatacagccccatttgacacaggggcgtatgcatcccgccagacctatgtgaccggtatggctgtcaagaaatgcgcgcagcagctgaaggccaggattctggattatgccgggtttatgctgggaggccgcccggcagaagagatggacgtggctcacgatcacatcgtggagaaggccacgggaaaagagcttcttgacatggaaaccctggctcttaccgccttttactccctggagcgctctgagcacatcactgcggaggtcaccaaccaatgcagggacaattcattttcctccggctgctgttttgtggaggtggaagtggatatgcccctgggacaagtgacggtaaaggacattgtaaatgtccatgactccggaatgctgatcaaccctgagctggcagaggcgcaggtgcacggcggcatgtccatgggcctgggatacggcctgtccgaggaattcttatataatgacgccggcaggcctctcaatgataatctgctggattataagattcccacagccatggatacgccggaccttcatgtgaagtttatccagcttgaggaccccaccggcccttacggaaataagtccctgggagaaccgccggccatcccggtggcgccggccctgcgcaatgcagtgctccatgccacaggcgttgccatggataccatacccatgacgccacagaggctcatagaggcatttcaggcaaagggtttgatatag

SEQ ID NO: 37 - DNA, 3219 bp, Clostridium bolteae
atgccaaagaatcctgatatcaaaaaagtactggtgcttggatccggccccattatcatcggacaggcggcagaattcgattacgcaggcacccaggcctgccgttccctgaaggaagagggaattgaggttgtgcttctcaactccaacccggcaaccatcatgacagacaaggatatcgcggaccgcgtctatatcgagccccttaccgtggaagtggtggagcagcttatattaaaagagaaaccggacagcgtgctgcccaccctgggcggacaggcaggtcttaacctggccatggagctggaggatgcaggtttctttaaagaacacaatgtgcgcctgatcggcaccacggccctgaccatcaagaaagccgaggaccgcgagatgttcaaggagaccatggagaaaatcggtgagcctgtggctccctctgatattgtggaggatgtaaagcatggtctggagattgccgaaaaaatcggctaccctgtagtgcttcgtcccgcatacactctgggcggttccggcggcggtattgccgccaatcctgaacagtgcgctgaaatactggaaaacggactgcgcctttcccgtgtgggacaggtgctggtggagcgctgcatcgccggatggaaggaaatcgagtacgaggtgatgcgcgacggcgcaggcaatgtaatcacggtttgtaatatggagaacattgaccctgtgggcgtccatacaggagacagtattgtggtggctccctcccagaccctgggggacaaggagtatcagatgctccgtacctctgccctcaacatcatcagcgagctgggaatcaccggcggctgcaacgtgcagtacgccctgaatccggacagctttgagtactgtgttatcgaggtaaatccccgtgtaagccgttcatcggccctggcaagcaaggcaacgggataccccatcgccaaggtggctgccaagatcgccctgggatataccctggacgaaatcagaaatgcggttacaaagaaaacatatgccagctttgagcccatgctggactactgcgtggtaaagatgccaaggctgccctttgacaaattcatcagcgcaaagcgcaccctgggcacccagatgaaggccacaggagaggtcatgagtatctgcaccaattttgaaggcgctctcatgaaggccatccgttctctggaacagcatgtggactgcctgctgtcctatgattttacggacctttccgacgaaacactggaagaagaattaaacagggtggatgacatgcgcatctggagaattgcagaggcgctgcgccgcggattcacctatgagcagatacacgacatcactaaaattgatttctggtttattgacaagctgggcattctggtggagatggaggacgccctgaaggcagtgggcgcaggagaaaagagtctgacggcagagcttctggcagaggccaagagaatcgagtatccagacaatgtaattgcaaggcttacgggaacctcccaggaggatataaagaagctgcgctatgacaatggtatccgcgcggtttataagatggtggacacctgcgccgctgagtttgcggccgagacaccttactattattcctgcttcggaggttttaacgaggccgagcagaccaccgggcgcaggaaggtgcttgttctgggttccggcccaatccgtattggacagggaattgaatttgacttctgttctgtccacagtacctgggcattcagcagggaaggctacgagaccattattgtcaacaataatccggagaccgtcagcacggactttgatattgcggataagctgtattttgaaccccttaccccggaggatgtggagagcatcgtggatattgagaagccggacggcgcagtggtgcagttcggcggacagacagccatcaagctgacggaagccctgatgaagatgggagttcccattctgggtacggctgcagaggatgtggacgcggcagaggacagggagcgctttgacgccatcctggagcagtgcaatatcccaaggcccgcaggacataccgtatttacggccgaggaggcaaaggaagcagcccataagcttggatatccggtgctggtgaggccatcctacgtgctgggcggacagggtatgcagattgccataagcgatgaggatatcgacgaattcatcggcattatcaaccagatagcccaggagcatccgattctggttgacaagtatatcatgggcaaggaaatagaggtggatgccatctgtgacggcaccgacatcctgattcccggtatcatgcagcatatagagcgtaccggtatccactccggcgacagtatctccgtgtatccggcccaggacatcacccagcacaatatcgacaccatagtggactacactgagaagctggcaagagccctccacgtaaagggcatgattaatattcagtttattgtggacggtgacgacgtatacatcatcgaggtgaatccccgttcctcgcggacggttccctatatcagcaaggttaccggcatccccatcgtgccgctggcaacccggattatctgcggtcataccatccgggagctgggctataaaccgggattgcagcccgcagctgattatatagccatcaagatgcctgtgttctcctttgagaagattcggggcgccgacatcagccttgggcctgagatgaagtccaccggcgagtgcctgggcattgcaaagacgttcaatgaagcgctctataaagcatttgagggagcgggaatccgtcttccaaaatacaagaaaatgattatgtccgtgcgccacagcgaccaggaggaggccgtggatattgcccgcaggtttgctgctgtgggatatcagatatttgccaccaggggtactgcacggacactgaataagaacggtgtaaaggcttacgaaatccgcaagctggagcaggaatctcccaacatcctggacctggtactgggacatcagattgacctgatcatcgacattccggcccagggcgcagagcgcagccatgacggtttcatcatccgccgcaatgccatcgagacaggcgtcaatgtcctgacctccctggatacggccaatgcgctggtaaccagcctggaaaaccgggccaaggagctgaccctgattgacattgccacggtaaagaacgcgtaa

SEQ ID NO: 38 - DNA, 3159 bp, Clostridium bolteae
atgaatggaacggaggaagacgttatgtatgacaaagtccccacagaccttaagtttgtggaacgggaaaaagaagtggagaagttctgggaagcagagcacatctttgagaaaagcattaaaatgagggagggctgcaagccctatgtattctatgacggaccgccaactgccaacggcaagcctcatatcggccatgtggagacccgtgtaatcaaggatatgattcccagataccgggccatgaaggggtatatggtgccgagaaaggccggatgggacacccacggcctgcctgtggagctggaagttgagaagaagctgggactggacggcaaggagcagattgagcagtatggtctggagccgtttatcaaagaatgtaaggaaagcgtctggaagtacaagggcatgtgggaggatttctccaacaccgttggcttctgggctgatatggacaatccctatgtaacctatgacaacagctttatcgagtctgagtggtgggctcttaagcagatttgggacaagggtcttttgtacaagggctttaaggtggttccctactgcccgcgctgcggcaccccgctgtcctcccatgaggtggcccagggttataaggatgtaaaggagcgttccgccattgcccgctttaaggccaagggagaagacgcatatatcctggcatggaccactacgccgtggacccttcccagcaacctggccctgtgtgtgaaccccaaggaagactatgtaaaagtaaagacaggcgacggctacacctactatatcgctcaggccctggcagataccgtgctgggtgaagactatgaggtgctggaaacttacaagggcaaggacctggagttcaaggaatatgagcccctctatgactgctccgtgcccctgtgcgagaagcagcacaagaaagcctactatgtggtctgcgctgactatgtaacactgacagacggtaccggcatcgtacacattgcacctgcctttggtgaggatgatgccaacgttggccgcaagtacgaccttccctttgtgcagctggtggacgccaagggcgatatgacggcggatacgccttttgcaggcacctttgtgaaggatgcggaccccatggtgttaaaggatctggagtccagagggctgcttttctcagcccccagcttcgagcacagttatccccactgctggcgctgcggaacccctctcatttactatgcaagggagtcctggttcatcaaaatgactgctgtgaaggatgacctgatccgcaacaacaataccattaactgggttccggattccatcggcaagggccgcttcggggactggctggagaatatccaggactggggtatttccagaaaccgttactggggcaccccgctcaatatctgggagtgcgagtgcggacaccagcattccatcggaagcatcgaggaattaaagagcttatccgacaactgccctgatgaaatcgagcttcaccgcccatatattgacgttgtaaacatcaagtgccccaagtgcaataagcccatgaagcgtgtgcctgaggtgattgactgctggtttgattccggagccatgccctttgcgcagcaccattatccctttgagaacaaggaactgttcgagtcgcagttcccggcccagtttatctccgaggcagtggaccagaccagaggatggttctattccctccttgctgagtccaccctgctgttcaacaaggcgccttatgaaaatgtagttgtcatggggcttgtgctggatgagaacggacagaagatgagcaagtccaagggcaatgcagtggatccctttgatactctggcagtccacggcgcagacgccatccgctggttcttctacacctgcagcgctccctggattccaaagcgttatcaggataaggcagtgaccgagggacagcgcaagttcatgggtaccctttggaacacctatgctttctgggtgctgtatgccaatattgacaattttgatcccaccagatataccctggaatacgacaagcttccggtcatggaccgctggatgctgtccaagatgaattccatggtaaagacagtggataacagcctgatgaattaccagattcctgaggcggccagatctctccaggagtttgtggatgacttaagcaactggtatgtgcgcagaagccgtgagcgcttctgggcaaagggaatggagcaggataagattaatgccttcatgaccctgtacacggcccttgtgaccgtggcaaaggcggctgctcccatgattccgtttatgacagagcagatttaccagaatatcgtgagaaaggtggatgggaatgcgcctgaaagtgtacacctgtgcgatttcccggaggtgaatgagtcctggattgatgcggagctggaatccgacatggatgaagtgctgaaggtggttgtcatgggacgtgcggccaggaatgcggccaacatcaagaaccgccagcccattgcccggatgtatgtgaaggccgaccatgagctgtcaaggttctatgtgcagattattgaggaagaactgaatgtgaagcaggtgattttctccaatgatgtaagggaatttacctcctataccttcaagcctcagttaaagaccgtgggaccaaagtacggcaagctgttaaaccggattcgtcagactctgaccgatatcgacggcagcgccgccatggataccctgaatgagaagggacagcttacctttgactatgacggacaggaagtggtgctgacaaaggacgacctgctgatcgatgtttcccagaaggacggctatgtgacagaggaagacaactatgtgaccgttgtgctggataccaacctgactcctgaactgattgaggagggctttgtgagagaactcataagcaagattcagaccatgcgcaaggaggccggatttgaggtcatggaccacatcagcgtattccaggatggaaatgagcggattgcagaactgattaaggcccatgcggacgagatcaaaacagaggtcatggcggaccatatcagcatcggcgccatgtccggctttgtcaaagagtggaacattaacggcgaaaatgtaatgctcggtgttgaaaagaccatgaaataa

SEQ ID NO: 39 - DNA, 1461 bp, Clostridium bolteae
atgaaacaactgtatgatgtaatcattattggcggcggtgtggtgggcagcgccattgccagggaaatgtccagataccgtctgaaaataggcgtattggaaaagaacctggatgtttgctatgagaccagcggccggaattccggtgtggtccatggcgggtttgcttatgacacaggttcgctgaaggccaggctctgtgtggaaggcaatcaattcatgggacaactggcagaggagctggattttaagttcatccgctgcggtaaggtgctggtaggcaatacggcggaggatatggaaacactgaaacggaccatccggcagggggaggaaaatggtgccgcaggcctggagctaattggaaaagaacggctccatcaattggttccggctgtggtaggggaatttgccatgttttcggctaacagcggaattgtggacccttttaattataccatagccctggctgagaatgcccatgccaacggagcagcgtattattttgaccatgaagtgacaggaatacggcgggacagcgaaggaaattatatacttacgacgccaaaaggtgaattccacacccggtgggttgtgaacagcgccggactgggctgcggcaacatttccgatatgctgggcatccgcggctataaggtgattggttccaagggggattacattattctggacaagcgtacaggatatcttcttcccatgcctgtatatccggttcccagcaatacttacatgggaatccacgtgaccaacactactgacgggaatgtcattattggacccaacgcagagatggtaacagattttacatactatggcgtgcctcaggaaaatatggattatctggctaagagtgcttcggacctgtggccatgtatccataaaaaagattatatccgcaactattccggtattctgcctaaatgggtggatgaggacggggttatacaggattttaagatagagataagggatgacattgcgccccgcgccattaatctggtgggcatcgagtcccccgggcttacagcggcagtgcccattgcccgtcatgcaatcagtcttatggaagagagggagaaacttacgccgaatccagggtttaatcctgtgagaaaaggaattcctcattttgcggagatgacaaaagaagagcaggagcagatgatacggcagaatcctgattacggccaggtcatttgccggtgcgaaaaggtaaccagggctgaaatcctggcagccattcataatccattgggagttgacaccatggcaggagtcaaatacaggacccgctccatgatggggcggtgccagggaggatactgccagatgcggattgcgcagatgatagaagatgaattgggaaaaaaggtaacagaagtcaggtatgccagaaaagattcacagatgtttttcggcagagtgcgggaggaggcgtag

SEQ ID NO: 40 - DNA, 555 bp, Clostridium bolteae
gtgcctgtagtttttgaaaggggaatcaatatgcctgcaatatttcaaaagattgataaaatcaggcctgcatatgatatgacatacagggttgtactgttcctttgcaagctgcttctggtagtggatatccttatcaccaccatggctgtggcaggaaggtacatttcgttcattcccgatcctgcgtggagtgaagaggttgttctgacctgcatgtcctatatggcagtgctatcggcagctcttgccatcagaagaggcgcccatatccgcatgaccgcatttgaccggtatctgcccgccaaggtggtaaagagccttgatatcatcgctgacctggcagtgcttgcgctggcggtaatcatgattacagtgggctggaagtatgcaacaggaatcggatccaaaggtacctatgtgagcatgcccaaggtttccaggttctggatgtatttcccggtgcctctggccggcgtggccatgctggtttttgaggtagaggccttatacaatcatgttaagagtttctttgtaaaggaggggatggagtaa

SEQ ID NO: 41 - DNA, 1980 bp, Clostridium bolteae
atgcctgaaaccgtgttcccgccggattcaggaaatccggcagatttcccgttgcctgtcaacaccatatatacccagggaaaggagaacctcatgcagcttacctatctgcacatccacaattttaagtctatacgaagcatggaaatccgggatatagaacgggcgctgattttagtggggaaaaataatacaggaaaaacctcggtgctggatgcaatctgcgcggtgtgcggctgttatgagattcaggacagggattttaatgaaaaccgtcaggctatccggattgatgcctgcttttccatagaggaggaggatctgcacctgtttcaccatatgggtattgtcagccagtacagacgttacgatgtgtggcgcagggtattttctgagcggcttccgtcgttccaaaacggagagctgtcctttacctttcacgtaaaccaggacggcaaggtgcggtacgaggatctttatagaaagaataacccctatatccatatggtgatgccccgcatctaccgcatcaatgcggagcgggagctgaaccagctgcagaacgaccttctgatgttccaggagaacgaggagctgcgaaggctgcgatccggcagctgtatttttgagagggctaagaaatgcaaccattgtttccagtgcatcggcctgattaatcagaagaaaccggaagagctttccgcctttgagacggccagacttctggagtttaagatataccagatgaacctgagcggattttccggaaaggtcaatgaaaatttctttaaaaatggaggatacgaggagatacagtacacgttaagctgcgatgcagaccagctttttaccgtggaggtaacggcccataaccgccagagaggtaccgtgaagccggtggagctgatgggaaagggcatgcggagtatttatatgctttccctgttagagacctatatcagcgaacagggccggattcccagcattattgtggtggaggatccggagatattcctccatccccagcttcagaaaacatgcagtgagatactgtaccggctgtccaagaaaaatcaggtcattttcaagactcacagcccggaccttttgtttaatttcagcatacgccagatacggcaggttgtattggatgatgagcggtactcggttgtacgcccgcggaccaacatgagtgagatattggacgatctggggtatggggccaatgatctgctgaatgtcagcttcgtgtttattgtggaggggaaacaggacaagagccgcctgcctttgcttctggaaaagtattattctgagatttatgatgaggaaggaaatctgtaccgcatatccatcatcaccacaaacagctgtactaacatcaagacatatgccaacttaaagtacatgaaccaggtctatctgcgggaccagttccttatgatacgcgatggagacggcaaggatccggaggaactggcatcgcagctgtgcaggtattacgatgagaggaatctggaggacgtggaccgcctgccgaaggtgacaaggaagaacgtgcttattttaaagtattattcgtttgagaactatttctttaacccggcagttatggcccgcctgggaatcgtggaaagcgaggatgatttttaccggaccctctatggcaaatggagggaatatctgtaccggattcgcagcgggcagcagctgatggaagtcctgggacgggatttctcatccccggaagatatgaaggagcacatggaagaggtgcgcacctttctcagaggccataatttatatgatatattttacggcccgttcagggacagggaaaaagagattctgagggcctacatcgacctggcgcccaaggaggattttaaggatatactgtatgccattgaccggtttgtttattttgacagcaggaaaagacctgaggatgaaaggcgggcagagaagggtatgacgtaa

SEQ ID NO: 42 - DNA, 2583 bp, Clostridium bolteae
atgggagagaacttttgttttacagtaaatggagtggaacgctgcaccagcgaggataaaccgctgctgcgctatctgagggacgaccttcaccttcattctgtcaaggacgggtgcagcgaaggcgcctgcggcacatgtaccattgtggtggacggcaaggcggtcaagtcctgcgtcctgaccaccaggcgggcagtgggcaaaaacatcattaccacggagggattaagcgacgcggaaaaggaagcctttgtgtatgccttcggggcaatgggatccgtgcagtgcggattctgtacgccgggcatggtgatggccggaaaggcgctgattgaccgcgttccggaccctactgaggaggaaatcaaggttgcgttaaagggaaatatctgccgctgtacaggatataagaaaattatcgaaggcatccagctgacggcagccattctgaggggcgacgcccggattgaggagtcactggaaaagggggatgagtacggcgtcggaaagcgtgccttccgcctggatgtgagggaaaaggtgctgggctacggcgagtacccggatgacgtggagatggagggaatggtatatgcttcggctgtccgctcccagtatccgcgggcacgggttctggatattgactgcgggaaggcagcggcccttcccggcgtgctggctgtgcttacggccgaggatgtccccaataacaaggtgggccatctccagcaggactgggacgtaatgattgcaaagggagatatcacccgctgtgtgggcgatgccatctgtctggtggttgccgagtccagggacatccttgagaaggcaaagcggatggtgaagattgattatgaggagctgaaacccgtgtgctctattcaggaagccatggcagaggacgcgcccagggtacatgagaagggaaatctgtgccagagccgccacgttacccgcggggatgcaaagaaggccctggaaaattccagatacgtggtgacccagacgtaccgtacgccctttaccgagcacgctttcctggaaccggaatgcgcagtggcctttccttacaaggacggtgtgaaggtatattccacagaccagggcgtctacgataccaggaaggaaatatccatcatgctgggctgggatccggaccgtgtggttgtggaaaacaagctggtaggcggcggcttcggcggcaaggaggacgtatccgcacagcacatagcagctctggcagcccttaaggtgcagaggccggtaaaggtggtgttttccagacaggaatccttaagcttccatccaaagcgccatgccatggaggggacatttaccttgggatgcgacgagaacggtatatttacaggactggattgtgagatttattttgatacaggagcttatgcttccctgtgcggacctgtgcttgagagggcgtgtacccactccgtagggccttactgctaccagaacacggatatccgcggcttcggctactataccaacaatccgcccgcaggcgcgttccgcggtttcggcgtgtgccagagtgaatttgccctggagtccaacatcaatctgctggcggagaaggtggggatttccccgtgggaaatccgctaccgcaacgccattgaaccgggcaaggtacttccaaacgggcagattgcggactgctccacagcccttaaggaaactcttctggctgtaaaggatgcctatgagagcaatcccggcagggccggaatcgcctgtgccatgaagaacgcgggcgtgggcgtgggacttcccgataaaggccgggcaaagctggcggtccgcgacggaaagattgagctgtacagcgctgcttccgatatcgggcaggggtgcgcaaccgtattcgtacagatggtttccgagacaacagggcttggaaaggaaatggtcaggaatatgggggccaattccgaggtggcgcctgattcaggaaccacatccggttcccgtcagaccctgattacaggcgaggctgtcaggatggctgcggctgatttgaatgaggcattgcaggaagcgggaggagacttaagccagctggaaggccgtgagttctttgcggaattctttgaccccacagataagctgggagcagatgtgcccaatccaaagagccatgtggcttacggatttgcaacccatgtggtggtgttagacgacgacgggcgggtaaaggaagtgtatgctgcccatgactccggaaaggtagtaaatcctatttccatacagggtcagattgagggcggtgttctcatgggactgggctacgccctgaccgaggacttccccttaaagaacggtgttccccaggctaaatacggcaccctgggactcatgcgctccacccagattccggatatccatgcaatctatgtggagaaggaagaactgctgtcctttgcctacggcgcaaaggggattggggaaattgccaccataccaaccgctccggcggcacagggagcttattatgcaaaggaccatgtgctgaggacaacgcttcccatggatgacacgtactattcaaagaaaaagtaa

SEQ ID NO: 43 - DNA, 1743 bp, Clostridium bolteae
atgagcaagtatctgcagaaaaaattcgccttgagcgaacagggaggaagggatctgacaaaggccatattttcctgtgctctcaccaatatggggctgatattccccatgggcattctgttcctctttatggaacggcttctgggcccgttggtggggattcaggctccttccctgggaatggccgggtatgtggcagcttgcattgtactgctggttataatattcattttctggagaatccagtatgacgccacctttgtggcatcctatacggaaagcgccaatatgcgtattcgtctggcggagaggctcagaaccctgcccatgtctttttttggaaaacgggatctggcggatttgaccaccaccattatggcggacagcgcatttattgaaaaggcattttcccattttattcctgaattcataggggccttcctatccacggcgatcataggagtgtgtcttatggcggctgactggcggatggggctggctgtgctgtgggtggttcccatatcctttcttctggcagcaggtacaagacccatggtggaccaggtggagcgcaggcagaagggaaagaaaatcgctgcttcggacggaatccaggagtgcattgagaatatccaggacatcagggccaacaaccagcaggaggagtatctgagggggctggaccagaagattctgaacgtggaatccatcaccatacgtctggaactgttaaacggcaccatggtcacagcgtcccagatgttcctgaaagtcggcatggctaccacggtactggcgggagcagctcttctgtcatcccattccatcggctttatgatgttcctcatgtttatggtggcgtccaccaggctgtacggacctcttaccggctgtctgcagaacctgtcggctgtgtactctgctttactggtggtggaacggatgaaggggattgaggagcagcctgttcagcagggaagcagggaagctgcgtacgatggatatgatattgtatttgaccatgtgggattttcctataaagaggggaaacaggttttaaaggatgtgtcatttacagcaagacagggacaggtgacagctctggtagggccctcgggaggcggaaaatccaccagtgcaaagctggctgccaggttctgggatattgacagaggaaagattacgctgggaggtacggatatcagcgggatagagccggagaccctgcttagaagcttttccattgtattccaggatgtggtcctgtttaacaataccatcatggagaacatccgtctgggacgcaaagacgcatctgaccaggaggtgatggaagcggccagggctgcccagtgtgaggaatttattcatcgtcttccaaacggatatgagacccggattggggaaaatggttctgccttatccggcggggaacggcagcggctgtccattgccagggcccttttaaagaatgcccctgtgattctcatggatgaggccacggcgtctctggatgtggaaaatgagactctggtacagcaggccatatccaatctggtcaagaataagactgtgctgattattgcgcaccggatgaggactgtggcaggcgcagaccggattgtggtgctaaaggatggttatgtggcggagcagggtacgccggaggaactgttggagaagaaagggatataccatcacatggcagaacttcagggtaagagcctgaactggagtctgtaa

SEQ ID NO: 44 - DNA, 4707 bp, Clostridium bolteae
atggcaaagaattttctggaagtatttccaaccctcaatatagcggaatccctgaaggagcttttaggcctggcccaggtggagaaggtgaccaccaccagggatagaagctctatccgcatttatctgaagagcgcaaggctgatacataaacagaatatatacgacctggagcgaggcatccgggaccagctgttcccggataagcaggtggccatcaagattcaggaaaaatacaggctgtcggaccagtatacgcccaaaaagcttttggatgtatataaggacagtcttcttctggagcttaaaaactacagcatcatcgagtacaccatgttccgcaaggccgggattacctttgagaaggaggatatcatggtcttgaccgtggaggacaccatggtgaaccgggacaggacagccgagttaaagcgcgtcatagagaaggtctttgcggagcggtgcggcctgcctgtggaggtgcgctttgcctttgtggagccacagggcagcgaccgcagaaaacagattgagcttaaaatggagcgggaggcccaggccatatactggcagaaccacagggaggagctggaagcaatgggcgcctctttctccacccaggggctggagggtcaggagctgctgtccggaaatggcggcaggtcaggccaggattcctatttggacgcaggccaggggccggagggcgctccctgggatgcacttatggcccaggctgcttccggggatgtgggagacgggagtgcgcctggagataacgggggccggtcaggggcgcctggttcgtcccaaagccagggaagcccggccagatcaggacagtctgggcagggacaatcagcccagtcaggccagggcggcggccagaagcagggctttaagggagataagccccagctcaacaaggggcgcaagggctggggacgggataaggacagcggtttcggcgacgacaagaagtactctgtcaagcgttccaacaacccggatgtgctctacggacgtgactttgaggacgagcccatggagattgagaagatcgacggggaaatcggagaggtgaccttaagaggcaaggtgctgacctgcgagaaccgggagctgcgaagcggcaagttcatcctcacctttgatgtatcggattttacggataccattacggttaaaatgtttatccgtccggagatatttgatgaggtgaaatccgccatcaatccgggcatgtttatcaaggtaaagggagtcaccaccattgacaagtttgacggcgagctgacccttggctccatcgtgggaatcaagaaggcggatgattttaccagcaagcgcatggactccagcctggaaaagcgcgtggagctgcactgccatacaaagatgagcgatatggacggcgtatccgaggtaaaaagcatcatcaagagggccaagcagtggggcatgcccgctgtggctgttacggaccatggctgcgtccaggccttcccggatgccaaccacgccctggacaagggggatacctttaaaatcctctacggggtggagggatacctggtggacgataccaaacagctggtagagaattccaggggacaggattttggggacacctttgttgtgttcgatatcgagacaacaggcttcagccctaaaaagaacaaaattattgagattggcgccgtgaaggtggtagacggcaggattacggacaaattctccacctttgtgaatccggacgtgcccattccctttgacatagagaagctgacaggcatcaacgattccatggtgcttccatacccaaaaatcgacgtgattctgccgcaatttctggagtttgtgggggatgcggtccttgtagcccacaatgcaagcttcgatgtgggatttataggccatttcgcagagaaactggaactgccctttgatcccacggtgctggacacggttgccattgccaggcttcttctgcctaatcttaaccggtttaagctggacaccgttgccaaagcccttaatatttcgctccagaaccaccacagggcggtggacgacgcgggagccacggcggagatattcgctgcctttgtaaagatgctgcgggaccgggatgtaaatgatttaaaccagctcaatgccctcagcaccatggacacggataccatacgcaagctccccacccaccatgtaatcatactggccaagaacgatatcgggcgtgtgaatatgtaccggctggtgagctggtcccacctggagtactatgccagaaggcccaggatacccaagagcctgctggagaaataccgggagggactgattattggatcggcctgcgaggccggagaattataccaggccctgcttcgcggcgctccggatacagagattgcccggcttgtgagtttctatgattacctggaaatccagcctctgggaaataatgcgttcatgctccgggacgagaagagcacggttaagtcccaggaggatttaatcgagataaataaaaagatagtggaactgggaatgcagtttaacaagctggtctgcgctacctgcgatgtccacttcctggatccccaggacgaggtataccgcagaatcatcatggctggccagggatttaaggattcggacgatcaggcgcccctgtatctcaggacaacagaggagatgctggaggaattttcctacctgggaccggataaggcccatgaggtggtgatcaccaacaccaggaagattgccgatatgtgtgagaagattgccccggtgcggccggacaagtgtcctcctgtcatcgaggattccgataagacgctgaccaagatctgttatgacagggctcatgagatgtacggggaggacctgcctaaaatcgtagtggaccgcctggagcgggagcttcattccattatcaccaacggattcgcggttatgtacatcattgcccagaagctggtgtggaagtccaatgaggacggatacctggtgggttcccgtggttccgtgggttcctcctttgtggctaccatgtccggaatcaccgaggtaaaccctctgagcccccattaccattgccccaagtgccgttactatgactttgattccgaagaagtgaagcagttctccggcatggccggatgcgatatgccggacaaggaatgccctgtgtgcggcacaccgctggaaaaggacgggtttgacatcccctttgagaccttcctgggatttaagggagacaaggagccggatatcgaccttaacttctccggtgaataccagagcaaggcccatgattatacggaggttatctttggaaagggtcagaccttccgcgcgggaaccataggcaccctggcggacaagacggccttcggatatgtaaagaaatattatgaggaaaggggaaccaggaaaagaaactgcgagattaaccgcattgtgcagggctgcgtgggagtgagaaggacaacgggacagcaccccggaggcattatcgtgcttccgctgggcgaggaaatctattcctttaccccggtgcagcaccctgccaacgatatgaccacctccacggtcaccacccattttgactaccattccattgaccacaacctgctgaagctggatatactgggacacgatgatcccaccatgatacgtatgcttcaggatctgatcggtattgaccctgtaaaggacattcccctggacagccgggaggtcatgagcctgttccaggacacgtccgctctgggaatcatgccggacgatatcggcggctgtcccctgggggccctgggcgtgcctgagttcggtacggactttgccatgcagatgcttcttgacactaagcccaagtatttctccgacctggtgcgtatcgccggtctggcccatggtacggatgtgtggctgggcaatgcccagaccctgattcaggaggggaaggccaccattcagaccgccatctgtacccgagacgacatcatggtttacctgattgcccagggtttggagcagggactttcctttaccattatggagagcgtgcgaaagggaaagggattaaagccggagtgggaggaggagatgaaagcccacggcgttccggaatggtatatctggtcctgtaagaaaatcaagtacatgttccccaaggcccatgcggctgcctacgttatgatggcatggcgtattgcctactgtaagatattttatcccctggcctattacgccgcgttcttcagcatccgggccagcgcgttttcctatgaaatcatgtgccagggaagggataagttggaatactatctggcggattataagaaaagggcggacaccctgtccaagaaggaacaggataccctgagggacatgaggattgtccaggaaatgtatgcaagaggctttgattttacgcccattgatatctaccgggccaaggcgcggcacttccaaatcatagacggcaagctgatgccttccctcagcagcatcgacggcctgggcgagaaggctgctgatgcagtggtggatgcggtcaaagacggagctttcctgtccatcgaggatttcagcaaccgttccaaggtaaacggcaccctttgttcccttatgtcggatctggggctgcttaaggaccttccaaaatccaatcagttatccttgtttgatttataa

SEQ ID NO: 45 - DNA, 2718 bp, Clostridium bolteae
atgtctcaccatatagatccggataccaggatacatattgaaattgaccatataccatgcgaggtggcgccggagaccaccatactttcagctgccgccgggctgggaatccagatacccaccctgtgctatatgaaagaactggctcctgacggctcctgccgcatgtgcgtggtggaagtggacggcggacggaaaaaagggcttgtcactgcctgttccgagcactgcaccgaaggcatggtcatttccacccgctcagagaaggtgatggaagccaggcgctttgtcctggacctccttatgagcaaccaccgggagcactgcttctcctgccctcagaacggctcctgcaagcttcaggattactgtatggaatacggtgtggagtataccagctatgacaggggaaagcgggtaaatgccccaaaggatacgtccagtccattctttgaatacaatccgcatctttgcatcatgtgccggcgctgcgtacggatatgcgaagagctgcagtgcagaaacgtaatcagcctgaaggaccgcagctttgataccatcatcaccactgcctacggcaggccctggtctgagaccacctgtgaatcctgcggaaactgcgtttcccactgtcccacaggagccctgtcagccaaggaccacaagaagtaccgcagctgggaggtcaggaaggtcaggaccacatgcccccactgcgccaccggctgccagatggatctgctggtcaaggacaaccgcatcgtgggcgcagaaccggctgacgggccgtccaaccacaatctgctgtgtgtaaagggcaaattcggttcctacaaattcgtgggctccggcgaccgtctgacccatcccctcatacgaaggaacgggcagcttgaacaggcttcctgggatgaagccctggattacatggcagaacagttcagggaaattcagaaaaagtacggcaatgacgctatcgccggtttctcctgttcaagagcacccaacgaggacaatttcgtgttccagaaaatgatgcgcgctgcctttcgcaccaacaacgtggataactgcgcccgtatctgccactctgcctctgtgaccggtcttgccatgacccttggttccggcgccatgactaatcccattgcggatattacaggagatgtggatgtgattctccttgtaggctccaacccaaccgaagcccatcccgtagcaggcactcagatacgccgcgcagtcaggcggggcaccaaactgattgtggtggatcccaggaaaattgacctgacaaatgacgcggccctgcacctgcagataaagccgggcactaatgtggcctttgccaacggtatgatgcacattatattaaaggaaggcctggctgatatggatttcatatcctcccggacagaaggctttgaaatcctggaacagattttagaggattatccccctgagaaggtggcccaaatctgccacatccgtcaggaggacctgatacaggctgcccggatgtacgcaggcgcccgcaaggcgcccatcatatactgtctgggcgtgacagagcattccaccggcacagaaggcgtcatgagcctttccaacctggccatgatgaccggtaaactgggcaggccgggctgcggcatcaatccgctgcggggccagaacaatgtacagggcgcctgcgatatgggatgcctgccaacagatttccccggctaccagaaggtggccaacccggacgtcatccacaaattccagacagcgtggagcgtggaattaaataccaggcccggtcttacctccaccgaggttttcccggcagccataaaaggcagcataaagggactgtatatctttggcgaggacccaatcgtgactgacccggatacgggacacattgaaaaagcattaaagaacctggatttcctggtggtgcaggagcttttcatgacagagacagctgcctacgctgacgtgattcttccgggcgtcagttatgctgaaaaggaaggcaccttcaccaacacggagcgccgtctccagcgggtccgcaaggctgttgaaccagcggggctggcaagggatgacatacagatattctgcgacgttatgggcaggatgggatatccctgccattatgacagtgcagcccaggtcatggatgagatagcctgcgtaaccccgtcctacggcggaatcagccacgccaggctggatgcgggtgagagcctgcagtggccctgtccattcaaagaccatccgggtacgcccatactccatgcgggcagattctccagagggcttggatatttctatcccgctgtttacaaggaatccagggagcttccggatgaggagtacccaatcctgctgaccacagggcgcatgctctaccactataacacccgtgccatgacaaaacggaccgagggcctgaatgaaatctgcagcgaatcctatatcgaggtcaacgaggaggatgctaaggcccttggcatcagccatggagacaaagtacttgtgtcttccagacgcggccggattaccagcaccgcgcgggtgggacagaaagtcagcccgcatgaggccttcatgaccttccacttcgcggacggcaatgtgaaccggattaccaacgctgcgctggacgacctggcgagaatcccggaatataaggcctgcgcaatccgaatccaaaaagcgtga

SEQ ID NO: 46 - DNA, 1401 bp, Clostridium bolteae
atgaaaggagcttatatgagccttctaataaaaaatggaaccattttgaccgccgccagtgaatttacaggtgatatctatatcgagggtgagaccatccgccagattggaacgaatctgagcgtaaacgccagccggaccattgacgcttccgggaaatacgtaatgccgggaggagtggatgaacatgtccactacggttcctttggcggacgcctcttcgagacagcggaagcggcagcagcaggcggcaccaccaccattgtggactttgccccccaggaaaaggacgtaccgcttctggacgccatacggcggcaggcagccaaggcagaacacacttcctctgtggactttgcattccatgcagtcatcatggacccaaaggaatctgtatttgaggaagtcaggcatctgccggaggtgggcgtggccacactgaaactttttatggcatacaagggcactgcattttactgtgatgatgaagccatacttagcgccatgatgaatgcaaaggacgcaggcgttaccatgatggtccacgctgagaacgcggacatcataaccattctgacccgttattacctcagccagggcaagactgccccggtttaccactactatgcccgtcctcctattgcagaggaggaagccacaggcagggccattgccctggcaaaggcagcggactgcccccttttcgtggttcatgtcagcatacgggaagccatggaggccatcaggaatgctcacaatgacggctggcccattttcggggaaacctgtacccattatctgactctgaccacagactgcctggataaaccgggctttgagggagccaaatacatatgttccccgccgctgcgtccccaagagcatgtggacgccctctggcaggccgtgcgcgagggctggctgaccgcagttggttctgaccactgcgccctggacggaggatatgagggagcaaagaaaaaaggcaccaacttttccaatatccccaacggctgtcccggagtacaggatcggctggccctgctgtggacctacggtgtatgcaccggaaaaatcacccgccggaaattcgtggagctttttgccgccaatcctgccaaggtggtgggactgcccaacaagggagatctgcgcattggcgctgacgctgatgtggtaatcttcgaccctgaatggaagggaatcatcaccaacaaagacagccttcacggtattgactatgaaccatttgaaggatttgaaatccagggacggccccaacaggtctttctgcgcggccggctggtggccgaaaacggcaggttcataggcgaacgcggcatggggcgctggcagaaatgcaagccctatggtctgtgttatgactattatcacaaataa

SEQ ID NO: 47 - DNA, 2025 bp, Clostridium bolteae
atgtggaaaaggagtctaaggcgcggggcagcactggtcctggcattggtgatgtcactgacgattacctcctgcagcgcgtctcagggaagcctgactgcccgggaaagggcccgggaaccggaatatgtcagcaaagcgggcggaaaggtccatgaagccattccctattcccggaggccatacgagcactatgacccggctgccatggaacaggccatggctgattttgaacaggcctgtgcttctgaaggccgggacgaggaagtactgaggctatacgatgccattgtggatgagtatgaccgtctggctaccctgacttatatggcccaactgaactatgacagggacgtgtcggatgagcaggctgccgcagaacaggcatataccacggacatctattccgagatgggggataaggccgcagcctgccttaagaagggtatgaactcatcctataaagaactcctgacagataagatggggattgaatatgcgccttacatcgaatattacagggaaaattccggggaactgaccgaactgaaccggagggagcaggagcttctcagggagtatgacaaactggctgccggcgattttacggtggagctggagggcggacagtggagctacagccggctggaacgggaaccggaccttgacgacgggcagtacgctgaaattgaggatgcacttgtcagggaaaagaaccgggttctgggcagcaagttccgggaactggtccaggtgcgccgccggacagcagagcttaaaggctatgacaattatgcccgttattcctttgaagctgtttacggaagggactatactcttcaggacgcagaggggctttgctcggatgtaaagacccgtattgttccccttaataatgacatctggtatatggatgtggcccaggaatcctatgactccctggaccttgtggaagagagttccgcccaggacatactggccggtgtgggaagggctgtcggctcggtgagtcctgagctgggtgagatcttccggtatatgcaggacaacgagctgtatgatatccagtccggggaagacggacaggacaggatggataataattataccgtagggcttccaagctatggcgacgcatttattttcatcaacagaaaccatacatttacggattaccagtccctgattcatgaattcgggcatttcagctcctattattataattcggtgcctgaactgttccagggttacagtgtggatgtgtgtgaggtccagtcacaggggttggagatgctggccaaccagtatgcgggggatatgtttggcgaaggggcagaggcctttgagtttgagactgttacggatatgctgtatgtgatcattatgtcctgcatgctgcaggaatttgaggaagctgtttacatgaatccggacatgagtctggaggacatgaaccgcacattcaaagagatacaggattcctattatggatgctattttgatgtctacgacgagggcgtgtgctatgactgggtggatgtgtcgcatctgttttacagccccctttactatatgggatatggaacctcggctctgtcggcccttgatctctggaccatgtccaggagggactgggacggcgctgtggatacgtatatgggacttttgaatgaaggtctggatgcgccctaccgcgacaccatgtaccgctgcgggctgagggatgtgtttgacagcagtgagctggaagccctggcaggggatgtgcgcaggattcagggactggatcaggatggtgagggagctgaggttccgtcacaggaggacccgtcacaggatatcccgccacaggaggacccggaccaggcaggaaccaactctgagggaagctctggcagcggattaagggctgcgggctttctggtgctggcaggcatctgcgtcatccttgtatttcaggttatgattttatgtaccgggtttgtaattatctggctgcttgtcaggaaaaagagagaagagtaa

SEQ ID NO: 48 - DNA, 1566 bp, Clostridium bolteae
atgaagagaaagacctggatgataagtgccctgatgtatgccatggtatttatggcatgcttcggggtactgcacgttttaaagactttaatggagccttcagggcctgtatcggttgagagcagggaaagcggggggcctgagggcacccgggaagcaaagacaggggaggaatgggaggaaccggccgggccggcattggctacggattcccaggcacaggaaccccaggatgaagtaatcaggcaggagggctataaggagtggaagaagaaatttcccggtatgtggactcctccgcaagcccctgaggaaccctacataccgcccaggctgatcctggcaacagaccttcactatcaaagcgctttagccggagacggcggggaagctttccggctgtttgtggaacggagtgacggaaaggtgatccagtatctgcctgagcttttggaagcatttctggacgaggtcatagaggaacggccctctgccctggttctcagtggcgatattactatgaacggggagcggctgaaccatgaggagctggcggcaaggcttaaaagggtccaggacgcaggcatacaggtcctggtgataccgggaaaccatgatattaataaccatgacgcttcggtgtactacggcgcccggaaagagccggctccctatattgacggacctgaattccatgagatttaccatgaatacggttatgaccaggcactgagccgggacgacagctcactgagctatgtctacgccctggatgacagaaactggcttctgatgctggactcctgccaatatgagccggataacaaggtggagggaagactgaaagacagcaccatgacctgggccgatgaacagctggccagggcaaaggaggagggagtgtttgtgatacccattgcccaccataatctgctggcccagagcaggatgtataccacccagtgcgccatggacaacaacaaagaggtgatttcccttcttcagaaatatgagctcccgctttttttcagcggacacctgcatgtgcagcgtatccgcaagcataagagcgagcccggagttccggaaggaaattacggcatacaggaaatcgtgacagatgccctcagcataccgccctgccagtatggagaggtgttatgggaggaggacggaagtatttcctatgccaccagggctgtggatgtatctgcctgggcacagaaaaacggaagcaccaatccggacctgctggattttgaagactggtcctaccggtacatacaaaagctgatcagcgatcagatacggggcgttgtgaagaacctgggggcagacgtggaacattccatggcagcaacctatgcaggggtatacattgattactatgcaggacgggaaattgacgtcaaaggtataaagagcaccaagggataccggttctgggagagaaacatgccggatagctatctgatccgggagctggacgccatgattgctgattcggacagggataataactatttcctgcttccggaggaggaaggatggataaccggagattag

SEQ ID NO: 49 - DNA, 2127 bp, Clostridium bolteae
atggataattctatgagcgatgtattgaatgtatcggagatgttcggtaaaaatgtattcaatgacgcggtgatgagggaccgtctgccaaagagtgtgtacaagaagctgaagaaaaccattgaagacggggcagagctggaccccagtattgcggatgtggttgcccatgccatgaaggactgggcaattgagaggggagccacccactatacccactggttccagccgctgacaggcgtgactgcagagaagcatgattcctttatctctgctccctccgacggtaaggtaatcatggaattctccggcaaggagctgatcaagggtgagccggacgcatcctcatttccatccggcggccttcgcgctacctttgaagccaggggatatacggtttgggactgtacctcaccggcctttttgcgggaagacgccatcggcgtgacactgtgcatccccacttccttttgttcctataagggagaggcgctggacaaaaagaccccgctgctgcgttccatgcaggctgtcaatgagcaggcattaaggatactgcgcttattcggcaacaccacagccaagcgggtcgcaccgtccgtgggcgcggagcaggaatattttctggtagacagagaaaaatatctgcagcgcaaggacctgatttacaccggacgcaccttattcggcgcaatgcctcccaagggccaggagctggaggaccattacttcggcgccatccgtgagagaatcggttcttacatgaatgatgtaaataaagagttgtggaaattaggcgttcctgccaagacacagcacaatgaggtggctcctgcccagcatgagcttgctcccatctacgagggtgtgaaccaggccgttgaccacaaccagattgtgatggagacccttaagaaggtggccggacgccacggcatggcctgccttctccatgagaagccctttgcaggcgtcaatggttccggtaagcacgacaactggtcactgaccggggatgacggcaccaatctcctgaaccccggcgacacgccccacgaaaacatccagttccttctggtactggcatgtatcatcaaggccgtggatatccatgcagaccttcttcgggaatccgcctccgatgtgggaaatgaccacagactgggagccaacgaggcgccgcccgccatcatatccatcttcctgggagagcagctggaggatgtaatcgaccagctgtgcagcaccggcgaagccacccactccaaacagggcggtaccttaaagaccggcgtagacattcttccggacctggataaggatgctacggacaggaaccgtacatcaccctttgcctttacgggcaataaatttgagttccgcatggtggggtcctcggattccatcgcctcccccaatactgtgctgaacaccattgtggcagaggcctttaaggaagcagcagacatgctggaaaaggcagaggactttgatatggctgtacatgatttcatcaaggagaccctggctgcccataagagaattatttttaacggaaatggctattcagacgagtgggtggctgaggctgagaggagaggacttccaaacatccgctccatggtggatgccatcccggccctgacaacggataaggcggtgaaactgtttgaggcgttcggggtattcacaagagctgagctggaatccaggtctgaggtggaatatgagaactattccaaagccattaacattgaggccaggaccatgtatgacatggccagcaagtctattataccggcagttatcaagtataccacacagctggcttcctccatcgcagccgtgaagggcgtatgccaggaagccgatgtaagcacccagacagagctgctgatagagacttcaaagctgctggcagagataaagacagcccttgcccgccttttggaggtgacagaaaaggctgccgccgctgagggtggtaaggttcaggcactcgtctaccacagccaggtggtgccggccatggaagcactcagagcacctgtggaccagctggagatgattgtggataaggaactgtggccaatgcccagttatggggatttgatatttgaagtgtaa

SEQ ID NO: 50 - DNA, 2109 bp, Clostridium bolteae
atgagaacagagtggaacacatttaaaggcggtgtatggcagcgggaaatcaatgtccgcgacttcattcagaaaaactacaccccctatgacggcagcgacgagtttctggaaggtcctacccggaatacaacggagctctgggagcaggtcatggagctgtcaaagaaggaacaggaagccggcggagtcctggatatggataccaaaatcatttccaccatcacgtcccacggcccaggatatttaaataaggacaaggaaaccatcgtaggctttcagaccgacaaaccatttaagcgttccctccagccttacggtggtatccgcatggctatgaaggcctgccaggacaatggatatgaggttgatcctgaaattgtggaattctttaccaagcacagaaaaacccataatgcaggtgtattcgacgcctatacccctgagatgagggcatgccgttccagccatatcatcacaggcctgccggatgcctatggacgcggacgcatcatcggtgattaccgcagaatcgccctttacggtgtggatgccctgattcaggagaaaaaggaagaaaaggattccacacgcaccattatgtactccgatgttatcagagagcgcgaggaactgtctgagcagatccgggcgctggaggatttaaaggagctcggaaatatctatgggtttgatatctcaaagccggcttgcgatgtcagggaagccatccagtggacctacctgggctacctggccgctgtcaaagagcagaacggcgcagccatgtcgctgggacgcacctccaccttcctggatatttatgctgaacgcgatttaaaggaaggacgctatacagagaaagagattcaggaattcgtggaccacttcatcatgaagctgcgtcttgtaaagtttgccagaacgccggaatacaacgagctgttctccggagaccccacatgggttacggaatccatcggaggaatcggcattgacggccgccacatggtgaccaagatgtccttccgttatctgcacacccttcagaacctgggcactgcccctgagccaaacctgaccgtactgtggtccacaaagcttcctgagaattttaaaaggttctgtgccaagacctccattgagtcctcctccatccagtatgagaacgacgatttaatgagggtgacccacggcgatgattatgccattgcctgctgcgtatccagcatgcgcatcggcaaggaaatgcagttctttggcgccagggcgaatctggccaagtgcctgctctacgccatcaacggcggtgtggatgaaatcagcggaaagcaggtaggtcctaaataccgtcctgtgaccaccgagtatctggattttgacgacgtgatggacaagtacaaggatatgatgaaatggctggccaaggtatatgtcaacgccctgaacatcatacattacaatcacgacaaatacagctatgaaagactgcagatggcgctccacgacaaaaaggtgacccgctggttcgcaaccggcattgcaggcctctccgttgttgcagactctctgtccgccatcaaatatgccagggtcaaggcggtgcgcaacgataagggcattgtgactgattatattgtggaaggcgacttccctaaatatggaaataacgacgaccgggtagaccagctggcagcagacctggtgcacaccttcatgagctatataaagggcaaccacacctaccgcggcggtatccccaccacttccatcctcaccatcacctccaacgtggtgtacggaaataatacgggcgctaccccggacggcagaaaggccggacagccctttgcgccgggcgcaaaccccatgcaccacagagacagcagaggcgcagtggcatccctggcttccgtggcaaagcttccgttcagggacgcccaggacggtatctccaataccttctccatcataccgggcgctctgggcaaagatgaccagattttcatgggagacctggaagtggagctgaacggctgcggaggcggctgtgaagcacctaccctttttgaagggctggattccgaggccgatatcgaggaatcctga

SEQ ID NO: 51 - DNA, 1410 bp, unclassified Clostridiales
atgaagatatttaacacactgagcagaagaaaagaggagtttgtgccattgacgccaggcgaggtcaagatgtatgtatgcggacccacggtgtataatctgattcacatcggcaacgcgagacccatgatcgtatttgatacggtgcgcaggtattttgagtataagggctatgatgtgaagtatgtatccaattttacggatgtggatgataagatcataaagaaagccattgaagagggcgtggacgcggatactgtctcaaagcgctatattgaggagtgcaaaaaggacatggcggccatgaatgtcaagcccgccacggtacatccccaggcaacccaggaaatctgcgggatgctggagatgatccagaccctgattgataaggggcacgcatatgtggcaaaggacggcacggtttatttcaggaccaattcctttaaggagtacggcaagctgtcccataagaatctggatgaactgcagtctggtttccgcgagattaaggtgaccggcgaggaagggaaggaagacccaagtgatttcgtgctgtggaagccgaaaaaggaaggggagcctttctgggagtcaccatggtgcaacggacgtccgggctggcatattgagtgctccgtcatgtccaaacgctatctgggcgagcagattgacatccatgcaggaggcgaggacttaatctttccccaccatgagaatgaaatcgcacagagcgagtgcgccaacgacaagccctttgcaacctactggatgcacaatgcgttccttaacattgacaacaggaaaatgtctaaatccctgggcaatttctttacggtccgtgaaatcagtgaaaagtatgatttgcaggtgctgcgtttcttcatgctcagcgcccattaccgcagcccccttaacttcagcgccgacctgatggaggcgtctaagaacggcctggagcgtatcctgacctgtgtggataagctgagggacctggaagcaaaagcagagggagcggctgaaacctgtggggaacagggcagcatggaagaggcgggcaggcttctgggcaggtttgaggaagccatggacgatgacttcaataccgcggacgccatatcggttgtctttgaactggtgaagctggctaataccacggctgatgcttcaagtaccaaggcgtatgtgtctttccttaagaaaaacatcgaaaagctgtgcgatgtgctgggcatcataactgagaaaaaggaagaagtactggacagcgacattgaggaaatgattgcggccagacagcaggccagaaaagataagaattttgcactggcagatgaaatccgcggaaagcttcttgatatgggcattgtactggaagataccagagagggcgtaaagtggaagagagtgtga

SEQ ID NO: 52 - DNA, 1269 bp, unclassified Clostridiales
atggacataaatgaattaatcatatacaggaatctggaatatcaggagctgtttcaggacatggcctgccttatgggatatgcggacagcggcagccggccggatgcattccactgcgcaggacagctggttgaactggctgtgaactatgggtttgaggggaatctctggcactgtttcctggccttctgtctggcaaataatgaaaatgcctacacaacttcctgtgaaatcacgggagccgcaggcggttccctggaccgtctggccagggaggattttaagattttcaaggcattgtttgattatgacatccacgaccttgcgcctgccggggtatgggaccagctggccagctatgagtccggtcaaaagggcagccgcgtgttcaataagaggatcagggaccgcatcgtgagcctggcggtcaatcttaaggaatccgcggatgtggaggaattccaggaccatgtggaagaattctaccgggagttcggagtagggaaattcggccttaataaggcgttcaggatagtggaaaaggatgggggacaggttgttgtcattgacccgatcatcaatgtggagcacgtgtattttgataatatcgtggggtaccagctgcagaaacagaagctgattgagaacacggaagcatttgtggaaggcagggaggccaacaacgtgctgctgttcggcgacgcgggaaccggcaagtcctcaagcgtcaaggcggtgctcaatgaatattacagcaggggactgcgtatcattgaggtatataagcatcagtttaaggcgctttccgatgtgctggaacagattaaggacaggaattacaagttcatcatttatatggacgacctttcctttgaagactatgagctggagtacaagtatctgaaggcaatcctggaaggcgggcttggcaagcgcccggacaatgtgctgatttacgccacatccaaccgacgccatctgatacgtgaaaagttcagcgacaagagggagctggacgacgagcttcacaacaatgatacggtgcaggagaaactgtccctggcatcccgttttggcgtgaccatatactttgggtccccggacaagagggaatttgagacaatcgtaaaggcattggcagaccgctatcatcttgatatgccggaacaggagctttatgcagaggccaataagtgggaactgagccacggcggcctgtcaggccgtaccgcggcccagttcatcacccatcttctcgggcggagatag

SEQ ID NO: 53 - DNA, 1983 bp, unclassified Clostridiales
atggacaagaaatgggacggcaggcccgacccggaacttctgctcaggcagaatttcccggaaggtgaatcagatgggaaaggaaaattaaagatattcttcggatatgctgccggcgtaggcaagacatatgccatgctggacgcggcgcgccaggaaaaagaagcgggaagggacgtggtggcaggttatattgaaccccatgacaggccggataccatggctcttcttgacgggctggagttcctgccccccaggaccgtgggatataagggaatcgtgctgcgggagtttgacctggatgcggccctgatacgcaggccggacctgatcctggtggatgagctggcccataccaatgcccagggcagccgccacaggaaacgctgccaggatgtgacggagcttctggatgcaggcataaacgtgtatacaacagttaatgtgcagcatctggagagccttcatgatattgttgcatccattacccatgtgcgcgtcagcgagcgcatcccggactccgtgtttgacaatgccagccaggtggaactggtggatatttcgccggaggaactgcgccagcgcctggaggagggcaagatataccacaaaaaccaggcggataaggcgaaaatcagtttctttacattggagaacctttcggccctgcgggaaatcgcgttaaggcgcaccgcggaccgggtgaaccgggaagtgatccgggagcgggatgctgcgggaaaggaatattttacaaatgaacatgtgctggtctgcctgtccccttcccctaccaacgccaaggtcatacggaccgctgccaggatggcgggcgcgttccatgccgactttacggcggtgctggtagagacagagcatttaaaacgggagcacagcaagatcagcaggagcatggaggcgaatatcagcctggccaagcagttcagggccaatgtcattacactgtacggggatgatatagtggaacaggtggcttcctatgcaaggcagaacggcatttccaaaatagtgatagggcgctccgtaaggaaacgccacatactgtatatgcgtcccaccatcatagaccgtctgattaaggcagttcccaatatggatgtctatgtgattcccgacgcaacggcagaggagcgcaggtataaagtaagcacggaccagaaacgcaaggtatgggcggatgtctttaagaccggcgcggtcatggcgttctgcaccgtatgttccctggtgctggattactatgggctgggggtcatcaatgcggccatgatttacatgatgggaaccatgctggtggcgtatatgacaagggccgggtggtgcgggctgctggcctcggtactgtcggtgctgctgttcaattacttttttacggatccgcgcctgacctttcaggcagatgcctccatttacccgtttacatttgcagccatgctggtatgcgccctggtgaccagctccctggcagccaggctcaagcgtgaggctgccaagggagagtccgagtccaggtatatgcagattctttttgatattaacaggaacctgaggaagggttccacgggggaggaaatcctggacatatgcgggcgtctggtgcgtacgcttttaaagcgcaatattgtcatatatgacacaaggaacgggaaaatggaccagatgaagatttatcctgcatctgaatccgaagattccgcccgtctcaccggcctgttcaaatccccggatgagatggcggtagctgcatgggtcaggaagaaccgccataaggcgggcgccaccacggacacccttccaggcgccagggcccgttataccccggtctataaaaacgataaggtatacgcggtcatcggcgtggaactggaaggaggcgacatgataaaccccaatgacaagaacgtccttaacatcattgcggaggaaacctcctacaggctgggggacatgggacacagatga

SEQ ID NO: 54 - DNA, 1830 bp, unclassified Clostridiales
atgaaagaaagaatgaaacaaaggcttctgtcattgctgcttgccatggcaatggtatgttcgctgacagcggggatgccggtcactgcctttggggcggaccaggacattgtggtgctttataccaatgatgtccactgcggggtagatgacaacatcggttatgccggacttgccctgtacaagaagcagatgcagcagcagacgccgtatgtcacccttgtggatgcaggggacgccatacagggcgcgcccatcggtacgctgtcagagggcgggtatctgattgatatcatgaactacgtggggtatgacgtggctgttccgggcaatcatgaatttgactatggcatgtcccggttcctggaactggccggcaggctcaactgcggttactatgcatgtaacttcatggataaggcaacaggcgccactgtttttgcaccctataagatgattgcatacggcgatacgaagattgcctacgtaggcgtttccacgccggagagctttaccaagtccacacccgcgtatttccaggacagtgcgggcaattatatctatacgttctgtgaagatgagagcggacagggcctttacaaccagatccaggcaagcgtggacgcggccaggaatgagggcgctgattatgtgatactggtgggccatctgggggagacaggggttacggacagatggagttccgtgaacgtcattcagaataccaccgggattgacgtgtgcattgacggccattcccatgagacaaccccatccatgacagttaagagcagggatggaagggatgtgatcattacccagacaggtacaaaactaaataatatcggaaagctgaccatcaggaccgatgggaccatagcgtcggaactggtttcagaggtaccggccgtgggtaccgcaagggaatatgtggtacagaaaaatgacagcctcagccggattgccaagagggagctgggttcctatgacagatggattgatatctacaacaacaacctggataagataaaggatgccaatgtgctgcagccaggcatgcgccttgtgattccgggagacagcctgataaatgaggacggcagggcaatggattacaatacggaccggttcatcaagggcatccaggatcagtacaatgagacacttaaggtggttctcggcaccaccccgtaccttctgacggtcaataacccggctgacggaaaacgcagggtgagaagcggggagaccaacctgggagatctgacagctgacgcttaccgggtacagcttggagccgatatcggcctgagtaacggcggaggcatcaggaccgacatacagcctggcagcatcacttacaatgataccctggcagtattcccgttcggcaacatgggctgtgtcatcgaggccacaggccagaagattaaggacgcgctggaaatgggggccagggattatccggaggaatgcggcggattccttcaggtgtccgggcttacctataccattgacacttctgttaagaccagtgtgaagctggatgataaggggaatttcataagcgtggacggaccatacagggtaaaggatatcatggtaaatggcgggcccattgacctgaaccggacctatacggttgcatcccataactatatgttaaagtccggcggcgacggcatgaccatgtttaatggatgcaatgtgattaaagatgatgtgatggtggatgtggatgtcctttcctcctacataaggagcctgggcggcgcagttaccgcggattatgcggacccgctggggcaggggaggattcaggttcagtag

SEQ ID NO: 55 - DNA, 3096 bp, unclassified Clostridiales
atggaagtgaagagacgtgaagacctgttaaggataaaagaagaatatctggaccggcagaaatcctacaagcgccaggtgctggtgtgcggcggcgcgggatgtatctcatctaactgcggggaagtgcgggatgcattggttaaggcagtggaaaacttccggctgtccgatgaagtgcaggtcatggtaaccggatgtatgggcacatgtgccatgggtccggtcatcctggtggaaccggaggggatcttttacacgaaaatgaccccggataaggtggaacaggtggtggcaaggcatcttctcaaggatgaaatctgcgaagaatttacatattttaacgaggaaacaggcagatatgtcccgaaaatggatgacattgatttcttccagggtcaggtgcgcattgcgctcaggaactgcgggcatatggaatatgcttccctggaagcatacatatccagggacggatatggcgccctggcaaaagcgctgtgcggcatgacgccccaggatgtggtggatgagatgaaggcatccggcctcaggggcaggggaggcgcaggcttcccaacaggcgtcaagtgggaagcaggccttaaggcagtgtcagaggacggcaggaagttcatggtctgcaatgcggatgaaggagaccccggtgcattcatggacagaagtatcctggaaggcgacccccacagcattattgagggcatgatgctgggaggatatgcaatcggtgcatccaagggatatgtgtatgtgcgtgcggaatatccaattgcagtggaacgtctgggcaatgccattgaccaggccaggaaggccggaatactgggccgggatatcatgggaagcggattttcctttgatttggaaatccgtatcggtgcaggcgcttttgtctgcggcgaggaaacctccctgctggcatccattgagggaaagaggggagaaccaaggcagaaaccgcctttcccatttgaaaagggcctgtttgaaagccctaccatcatcaataacgtggagacgctggccaatgtggcgcccatcatacttaatggttctggctggtatcatggatttggtacagagaagagcgcgggcacaaaggtatttgcactggcaggggatattgtcaatgcaggaatcatcgaggttcccatgggaacaatcctgggcgacatcatttacaggattggcggcggtatcataggcggcaagcggttcaaagccatccagtccggcggtccctccggcggatgccttaccagggaacacctgaatacctcggttgactatgagtccctatcaaagcttggggccatcatggggtccggcggcctgattgtcatgaacgaggacacctgcatggtggatacggccaggtatttcatggactttatctgtgacgagtcctgtggaaaatgccttccctgccgcaacggaaccaggcgtatgctggaaatcctggagcggattacggaaggcaagggagaacccggggacctggacctgctggaagaactggctaaaaccatacagcagacagccatgtgcggactgggacagactgcgcccaatccggtgttatccaccctgcgctatttccgcagcgagtacgaggcccatatctatgagaaacactgcagcgcaggcgtgtgcgcggagcttcagacctcgccctgccgcaacgcatgtccggccaatgtattcattcccggttacatgtccatgctggcagcgggcaggattgacgatgcttaccgcctaatccgccaggataacccgttcccggcagtctgcggacgtgtctgcacccatccctgtgaggaccactgccgccgttcccaggtggatgagtccctggccatctgttccgtgaaacgctttatcggggattatgcgctgcgtgatgagtacaatatcccgctcatagagcccaaaccagccacaggaaaacgcatatccattatcggggcaggtccatccggactttcctgtgcctattatctggcgaatctgggccatgaggtccatgtatatgaggctgagtccgtggcaggaggcgtgctttactggggaattcccgaataccgcctgcctaaggcagtgcttcaaaaggaaatccatgccattgagatgagcggtgtggaaatccatctgaataccaagattggaaccgatatttcctttgaggaaatgaaggaccggtccgatgcagtgtacattgcggcaggaacacaggtatccaggcttctggatgtgccgggagaggatttaaagggcgtggaaagcggccttgggttccttaagaggattggcttgaagcgggatatgactgttcctgataagctggtggtaatcggaggcggaagcacggccatggatgtggccaggacagcagtccgcctgggaagcagtgatgtgaccgtggtttaccgcaggtctgaaagggatatgccggccggcaaggatgaaattgccgaagccatggaagagggcgtgaagctgattaccatggcatctccggtagagttccttggggctgacggcagggtcagaggaatccaccttgtgcgcaggaaagaaacggattatggaaaggatggccgcaggcgtacggcccatatcccggattctgatttcttcctggagtgcggcggcattgtcactgccatcaaccaggatgtggaccaccaggcatataggaccaccaatgtggaaatggaaaagaacggcaagctggccattggccgcttctcatccgagaccggcgaggaaggcgtattcgctggcggggatgtgagtccatggggcgccaacgtggttatccaggccattgcggacggcaagaaggccgctggcaagattgataagtacgtgggcggtaccggagaactgaacatgggcgagtggtttgaaattcccgagattgacatagaagtaagtgaacctcataaacggttcccgaccagatgcctatccgcagaagagcggaaagacaattttaaggaagtgaactgcggctatcatagactggacgccatgggtgaggccctgagatgtcttcactgtgaccggagatag

SEQ ID NO: 56 - DNA, 1305 bp, unclassified Clostridiales
atgagtgaagttgcaatcggaacggtcatgttattcgcggcactggccatacttatgattatccgtattcccattgccttttccctggctatttcagccatgataacggcaacctatctgggaatcccatattttaacctgttccagaaaatgtccgtgagcctgatcagttttacctttatcgccgtccccttttttatcatgatggcccaggtaatgaccgacggcgagataacaaaaaagctgatggctttctgcaacatcattgtgggaagggtcaggggaggcacggcaatcgttaacatactggtaagcatgctgtttggcggcatatccggctcatcggcggcagacgtatcctccatcggggccatgctgatcccggccatgatagatgaggggtatgatgtggattacagcgttgctgttaccgttacatcctctgttgagggcgtcatcatccctcccagccagaacatgctgttctatgcccttgcatcagccagcggcatttccatcagcaccctgctaatctgcggttatgttccgggaatccttctgacactgggattgatgattccggcctacgccatcgccatgcagaagaagtatcccctgggcgagaagcattccctgaaagagaatgtaaaaatcgtcacggaggcggtcctgggtcttggcgcaatcgtaatcgtaatcgcaggaacttcctttggcgtctgttcggccaccgaggcagcggcagtggccgcagtctatgccctggtcatcaccgtggttgcatacaggaacatgaccgtgaaaaagtacgttgaggggcttaagaagtgccttcccaccatgaccatggcaatggcaatcatatccgcctcaggcgcattcagttatgtgatgtcttatctgaaggttccgcagaaccttaccacctggctgctttccctgacctctgataagatactgctgaccctgcttttactggtcatgatgctgatactgggctgtttcatggacatgggaatcctgattcttcttaccacgccgatcctgtatcccattgcaaccggggttttaggatttaatccgtatcatttcggggttgtgctggtgcttgcatatggaatcgggctgtgtacgccgccggtaggcacatcgctgttcatcggctgctccattgccaaaacgccggtggaaaaagtggtaaagggattcatgcccttttacctgtccatggtaatcatgcttctgctgctgacattcattcccgcgctttcactgggcctgccgcggctgttggggttattatga

SEQ ID NO: 57 - DNA, 2700 bp, unclassified Clostridiales
atgaactatggtaagtatgagactgaacgcaggatcaagtctctccactccaaatcaggcaaatatgcctcgcggctgttccttaatatttttaaggccctgtttgtcctgtttctattcttagcagtagtgggtgcgtccatcggttttggcatggttaagggtattattgacaatgccccctccgtagatatcttaaacattcagcccgaccgctttgccaccacggtttatgatgcggcaggcaacctgacggacacactggtcaccagcggttccaaccgcgaatcagccacatatgaggaacttccccagaacctggtcaatgctttcattgccattgaggattcccgtttcaggagccacaacggcattgatatccgctccattgcccgtgccgtaaagggcgttatcagcgacgactacgccggcggcggaagcaccatcacccagcagctcatcaagaacaatgtattttcaggcggcatggagtcgggctggggcgccaagattgaaaggaagctgcaggaacaataccttgcagtccagctggagaaaaattccggcatgagcaaggaagataccaagaacctgatcatcaccaattacctgaacacaatcaacctgggcaacaacaccctgggcgtgaaggtggctgccaaacgttattttaacaaggacgtgtccgacctgaccttatccgaatgcgcggtgctggcttccattaccaagaatccgtccaagctaaaccccatatccggacgtgagaaaaatgcggaacggcgccagatcgtactccagtacatgtatgaccagggtttcatcaccaaggaggagcaggaggaagcgcttgcggacgatgtctatgacagaatccagaatgtggataccgctaccaaggagaccaataatcattacagctattttacggacgagctgattgaacaggtcataacagcgctgatggaaaagctggattacacggagagccaggccagcaaccttctgtattcagggggacttcagatttatacaacccaggatccggatcttcaggccattgtggacgaggagatcaacaatccggacaactactctgttgcaaagtattccgtggaatacaggctgagcgtcaaccatgcggacggcacaaccgaacattattccgaagagaacctgaaaagctaccgcaagaacatactgcgggatacttcctttgagggtctttacatgagtgaggaggcggtccagtccgatattgattcctacaaggcatggctgttaaaggacggggacgaaatcatcggtgagcgccagaacctgattctgcaaccccaggcatcatttgtcctgatggaccagcacaccggggaggtcaaggcactctgcggcggccgcggcgagaagaaggccagccttaccctgaaccgggccagcaacgtataccgtcagccaggttccgcgttcaaggtcatcacttcattcgcaccggcgctggacgcctgcggcgcaacccttggaacggtttactatgattccacttacaccattggcaccaagaccttcaggaactggtggaactccggttatggttttgtgggctatcacaatatccgtgacggcatcatctattccatgaacgtgattgcggtacgctgcatgatggaaacagtcaccccccagctgggcgtggaatacgcggagaacatgggcatcacttccctggtcaaggacgacttaggagcggccactgccctgggcggcatcacaaaaggtgtttccaacctggagatgaccgctgcctatgcttccattgccaacggcggcgtgtacaccaaaccacgtttcttcacaaagatactggaccacaatggcaaggtgcttatcgacaacgagcccgaaaccaaacaggtcttaaaggattccaccgcattcctccttacggacgccatggccgaatccatgaagagcaaccggctgtttgcacggtccgggatttccatcaactccaccagtaccagggcggcgctgaccggaatgtccgctgccggcaagagcggcaccacaaccgctaacaacgatatctggttcgtaggttatacgccatactataccgccggcatctggggcggatgtgacagcaaccagaagctgaaacacggcaatgtcaacaacggaggcaccaccttccacaaggatatttggcgtaacatcatgaaccgtatccatgaaggcaagtccgacccgggctttaccataccggacagcatagagaccgcggaaatctgccgcaagtccggcaagcgcgccgttgcaggcgtgtgtacggccgacccaaggggcaatgcggtctataccgaatattttgcaaagggaaccgctcccacggaagtgtgcgacaagcatgtggccgtcactgtgtgtgctgactccggcatgcgtccaacgccctactgccccaacaagaccaccagggtctgcatggtgcttccggatggagagacaggcgcaacagacgattcagcattttccataccgggttactgtaacatccatacggatgtttccaccatcatcaatccaaacccggatgagaccggtgaagacagccccattgtctcacccatcggacccggctaccagccatccacgtcagcgccggccacagagggttacggaccggggaatataccatactaa

SEQ ID NO: 58 - DNA, 1989 bp, unclassified Clostridiales
atggagataaaaagagaatgcgcacagtatttggaggaatactataaggagctgtttttcggcaatgtgaataagcggtacagggccatgacggccgtggaattgaggaaacgcttaaagcgtctcaccgaggcgaatataaagccccttgaaaaagccaatgagctgagcgatgtccatgccatgctgtccaaggtctgcgcatatctgatgcacaaggagggaaagctgccgccgggaccggctgtccaggagtgggaaaagaattgtgccagcatgaaggaattctgcggcgcccttgccagaaaggacctggagtatttgtccggcctgtcactggaggaactggagcatgtgctcaggatgcagggaatccgccgttacctgctgaccaactccctggaccgggcctaccagctgttctatataccaaagaccatcaaaaagggaatccgggaatccgtgaaccagaagccggaggaggagtatccgggagccagggagatgaagcgcaggttcatccttcatgtaggtcccaccaacagcggcaagacacatgatgcgctggaacggctgaaggagtgcggccacggggcgtatttcggccccttaaggcttttggccctggaggtctacgacaagcttaattctgaggggcttgcatgttccatgataacaggggaagagactctggaggtgccaggggccgtgtgccaggcctgtaccgtggagatgctcaatgaccatgattattttgatattgttgtggtagatgaatgccagatggttgcggacccataccggggacacaactggaccagggcggtcctgggactgagggcagaggagatacatctgtgcatggcgcctgaggcagaggatatcattgtgcagatgataaaacgctgcggggaccagttccgggtggtgcgccacaaacggaataccaggctgaccctggagacaaagccgtataacctgaaacgggatttgagaaaaggcgatgccctgattgtattttcaaagaagtcagtgcttgccctggcagcccatctggagaacgagggaacccactgcagcgtcatatatgggagcctgcccccggccaccaggcgggaacaggtgcgccggttcctggcaaaggagaccgatgtggtggtaagcacggacgccatcggcatgggcctgaacctgcccatacgcaggatcgtgtttgtggagaccaggaaattcgacggggtgggcaaacgtaccctgaacccggaagagattaagcagatagcgggccgggccgggagatacgggctttatgatgaagggttcgtcactgccatcgacgagctggaagtgattcgggacgggctgtccaggcttcccatacccatcatgaaagcgtatgtgggtttcccggaacagctgctcaacctgccggctgagattgacaccctggtaaaaatctgggcatccatggatacgccttccatctatgagaaaatggaggtggacgagctgctgtccctgtacatgacatttgaacatgtgcatcaggatgacatggacacatttaccaggcaggagatatataagctgataacatgctccattgacatagataataagatggtcatggacctgtggaaggattactgcagggattacagggatgcggatgaattggaattcccctacagccctggcgacgacctgtatgacctggaaagttattataagatgctggacctgtatttccagttttccaggaaggcagggcttccggtccagaccggaaacctcaatgaggagcggcgtcacaccgaggaagaaatcagccgcatcctgaagacagaatgtgccagctattcccgcaagtgttcagcctgcgggagggagctgtcatgggattatcccttctccgtatgtgagaaatgttttgagcgggggaagataaaccgtgcccacaaccgcgggggacggcgccgcgcatcatag

SEQ ID NO: 59 - DNA, 2250 bp, unclassified Clostridiales
atgcagaaatactgcaatttaaacctgggatggagatttaaagaggggtttgaggaagaatacataacaggcgggaaggatgaggagggcaggctggtccatgtgccccatacggtgaaggaggttccctatgactgctttgaccagaccatgacctgcatgatatccacctatatacgcagcttccagcttcctgacatggcggggaaacgcgccctggtttcatttgagggggtttccgcctgctacgatttatacataaacggtcataaggcaggcagccataaaggggcttactccatggcgttgtttgatattacggaatacgtcacccagggtgggaaccggatggtcctttgcgtggattcccatgagagaagtgacgtgccgcccaacggttcaaccgtggacttcctgatttatggaggcatatacagggatgtgaccctgtatatccaggaagaaacatatgtgaagcaggttctgttccgctacagcctggaccatgggacggcggtcctggagccggaactcctgatacgcagccatgggccggaaaggaatctgtgggcagtgacttccctgcaaaaagatggggtccttgtctgggaaaacaggcagaagatacaggtttcaccggatactgccagcatttcccttaaaccggggcaggtgggaccggtaggactgtggcagccggaggatccccagctgtaccaggccggcgttgaactgcaggatgaagacggccggtgcgtggattgttttcagaccaggatagggttcaggacaatccaagtggagccggatggattttacctgaatggaaaacggacaaagctgattgggctgaaccgtcaccagtcctatccctatgcgggatatgccatgggaagacgggcccaggaaaaggacgcctgcctgttaaaggatttcatgggacttaacatggtgcgctgctcccattatatgcagtcacggtacttcctggataagtgcgacgaactgggacttatggtttttgaggagattcctggctggggatatatcggggatgaggagtttaaaaaggttgtgttccaggatttggaaaacatggtgctgggacattttaatcatccgggtattgtcatatgggggacgcgtctgaatgagacaacggatcatgacgagctgtatgaggaaaccaaccggcgctgcaaggccatggatccttcccgccccaccacgggcgtgcgctgggagaccggcagccatctgattgaggacatatacagttacaatgactacagtgaggacgaccagggagaacatatgctgctgaccgcccatcaggccacgggcagcacaaaacaggtgccatatctggtaagtgaacatacaggtgccgtccttcccacaaaaccggtggattccgaagagcggcaggaggagtttgccatccgccatgcaagggccatgagcaagatcatgacatccgaccagtacctgggaggccttgggtggtgcatgtttgattataacacccataatgaccacaactctgttaacaaggtatgttaccatggggtgctggatatgttccgcgtgcccaagtgggcggcatatctgtatgcaagccagaagtccccggaaaaggaggctgtgctggttccctgctccatggttggaaggggggagcgctgcgagccggtgcccttttatgtgctgactaactgcgactatattgaggtaaccctgtcaaatgacataacaaggacctattatccaagcgttaaatttcccggacttgcccatccaccggtgcttgtgactgagaacggcgagttctggcagcacagatggaccggggccagaatcgtgggatatgtcggggagcaggcagtggtggagaagcggtattcagacaaccccagattgtcgcagctgctggtccaggcagatgacacggccctctataatgaccaggtggatgagacacgggtggtctgcacctttacggatgagtacggcaaccggctgtatcatcatctggaggcggtcagcgtgtctgtggaaggggggattgaactgatcgggccgtccctgatcccgtccatgggaggctgcgcagccttctgggtacggacgtgcgccggcgggacagaaggaacggcccgcatacatatccacacccccaggccggagattgacgaccagacagtcaccatccgtctggaactgtccgggtctgccggtgatggttcctga

SEQ ID NO: 60 - DNA, 2985 bp, unclassified Clostridiales
atgagcgatattatgacacccattccatttggaaaccttatgaactggattctggaagagcacaggaaaggtgctgttttcggagtcaggaaaccttttaaggcagacccggaaaaaaattatgagatattcggccgcaagctggagacaccctttggtcctgcggcaggcccccatacccagctgacccagaacattgttgccgcttatgtggcgggcagccgtttctttgagctgaagaccgtacagaagctggacggcgaggaccttccggttgcaaagccatgcatcaaggcggacgacgagtgctataactgtgagtggtccacggagctgtatgttccccaggcctttgacgagtatgtgaaggcatggtttgcatgtaaggttctggccaaggaatacggccttggcgccatggatggattccagttcaacatgtcagttggatatgacctggaaggcattaagctggaaaagattgacaagttcatcgagggcatgaaggatgcatccgggacgcctgttttcaatgagtgcaggcagtggcttcttgacaaccttgataagtttgagaaggtgacaaaggaagacgtggaggggatttcccctgaggtctgcaactgtgcaaccctttccacccttcacggatgtcctccccaggagattgagcgcattgcccgttacctgattgaggagaagaaagtacataccttcatcaaatgcaacccaacccttctgggatatgagtatgcaaggaagcttatggacgacatgggttatgattatgttgcattcggcgatttccactttaaggatgaccttcagtatgaggacgcggttcccatgcttcagaggctgcaggccctggcggatgaaaagggactggaattcggcgttaagattaccaataccttcccggttgacgttaagcagaatgagcttccaagcgaagagatgtacatgtccggaaagtccctgtatccattatccatgtcggttgccatgaagctggccggtgactttggcggcaagctgcgcatttcctattcaggcggagctgattactttaatattgaagatatcgtggacgccggcatctggccggtgaccatggcaaccaccatgttaaagccgggcggttatgagaggctggagcagatcggccagatttttgcaggcaaggatgcggctgtgttcacaggcgtggacgcccgcaaggcagctgccctggtagaggccgttaagagcgacaagcatcatgtaaaggcggtaaaaccccttccgtccaggaagattaagaagccggtccccctgacagactgtttcgtggcgccgtgccaggaaggctgtccgattcaccaggatattacacgttatctgcagctggctggcgcgggtgagtttgaacaggcgcttaacgtcatcctgaacaagaacccgcttccattcatcacaggcaccatctgcgcacataactgtatgagcaaatgtaccaggaacttctatgagagtccggtggatatccgaaggaccaagctggaagcggcagaaggcggatttgaggcagtgatgtccaagttcaaggcaccggcagtgaccacggataaaaaggctgctgttgtgggcggcggaccggcaggactggcagccgcttacttcctggcaaggggcggcgtaaaggtaactgtctttgaaaaggaagccaggatgggcggcgttgtccgcaacgtgattccgggattccgtatctctgacgaagccattgacaatgatgtgaagattgttgcagccatgggcgtggagatggtgaatggaaaggaaatcacttccattgatgaattaaagaaagaatacgattacattgtgctggcagtgggcgcttctgataagggaacccttaagctggaagcaggggataccatgaacgcgctggatttcctggctcagttcaaggccacggacggcaagctggatttaggtaagaacgtggtggtcatcggcggcggaaacactgccatggataccgcaagggcagccaagaggaacgcgggcgttgagaaggtttccctggtatacagaaggaccagacgcttcatgcctgccgacgaggaagaactggtaatggcaatggaggacggcgtggaatttgccgagcttctggcgccggttaagctggaaaacaaaaccctgtactgcaggaagatggtcctgggcgacatagacgagagcggacgccgaggcgtagtggagacggacgaggtcgtgaccgttccggccgacactgttatcgcagccgtgggcgagaaggttccgggcgcattctatgaggaatgcggcattgccctggacagcagaagacgtccccaggtaaaccaggacaccctggaaaccagcgtgaagggcgtgtacgtggccggcgacggcctgtacgggccagccacggttgttgagggaatccgggacggcaagatggccgcagaggcaattgtgggcaaggtactggcagacgacctgttcaagctctctgacgccggcaccatctatggccgcaagggcagattggcagaggagaatgaccacattgtcgacagcaccagatgcctgtcctgcaacagctactgcgagaactgcgtagaggtatgccccaacagggccaacatttccctggtggtaccgggcatggagaaacaccagatcatccatgtggattatatgtgtaatgagtgcggcaactgtaagagtttctgtccgtgggacagcgcgccgtaccttgacaagttcaccctgtttgccaacgagaaggatatggaaaacagcaaaaaccagggcttcacggttctggacgctgtggccggtacctgtaaagtaaggctccagggcaatgtgatggattacacggtgggttctgtgaaccaggatgtgccggagggaatccagaagataattgcagctgtcatcaaagactactcttatatgttataa

SEQ ID NO: 61 - DNA, 4326 bp, unclassified Clostridiales
atgagcttacatacaaatacccttacactgggaatcgatatcggttccacaaccgtcaaagtagcattgcttgatcaggactaccatatagtattctccgattatgagcgtcattatgccaatatacaggaaactctggcaggacttctgaaaaaggcctgccccataaccggccccgtccaggtcattcccgtcatcacgggatccggaggccttaccttgtcgtcccatctgggcattccatttgtccaggaggtggtggcggtggcctctgccctgcaggactatgcgccccagacagatgtggccattgagcttggcggcgaggatgcaaaaatcatatactttaccggcgggattgaccagaggatgaacgggatctgtgcaggcggcacgggttcctttatcgaccagatggcctccctgcttcagaccgatgccagcggcctcaacgaatacgccgcccattacaaggccatctatccaatcgcggctcgctgcggcgtatttgccaaatcggatatacagccattgattaatgaaggcgctaccagggaagacctggccgcgtccattttccaggcagtggtgaaccagaccatcagcggccttgcctgcggaaagcccatacggggcaatgttgcctttttgggcggtcccctccacttcctgccccagctgcgtgaaagcttcatccgtaccctccgccttacccaggaacagatcattgcgccggaccattcccacctgtttgccgctgtgggcgctgccatgaatcctcaggagaaccagtccactgtttccctggaatccatgattgaacagctgtcctcaggcatccagatggattttgaggtaaagcgcatggaaccgctgttcagggaccaggctgactacgatgtcttttcaaggcgccatgccagcaaccacgttaagtccggggacctttcctcctatgagggcaactgctacctgggcattgacgccggttccaccaccaccaaggcggccctggtgggcgaggacggcaccctgctgtaccggttctatgacaacaacaacggaagcccccttgcaactgccatccgcgccataacggaaatccgcagccagcttccaaagacagcccatattgcatattcctgttccaccggttacggcgaggcccttttaaaggcggccctgatgctggatgagggggaggtggagaccatttcccactattatgcggctgctttctttgagccggatgtggactgtatcctggacatcggcggacaggacatgaagtgcatcaagataaaggacggcaccgtggacagcgtacagcttaatgaggcatgctcctcgggctgcggctcctttatcgagacatttgcacggagcctgaacttctcagtggaagattttgccagggaggcgctgtttgccaaaaacccaacagacctgggcacccgctgtaccgtattcatgaactctaatgtaaaacaggcccagaaggaaggggccacggtggctgacatttccgcgggcctggcttattccgtcattaagaatgccctgtttaaggtaatcaagattaccaatgcctctgacctgggggaacatgtggtggtccagggcggcacgttttacaatgacgccgtgctcaggagttttgagaaaatatcgggatgccaggcagtacgcccagacatcgcaggcattatgggagcctttggcgcggccctgattgccagggaacgctaccacatgaacggggaggcggaaacatccatgctgtccctggataaaatcattgccctcaagtataccacctccatgacccggtgcaagggctgcaataaccactgtgtgctcaccatcaaccagttcggcagcggacgccgctttatctcgggcaaccgctgcgagcggggccttggacttgagaaagccaagaaggaaatccccaacctctttgactataagtaccaccgcatgtttgactatgaccccctgcccctggaccaggcggaccggggcacggtgggaataccaagggtcctcaacatgtttgagaatttccccttctgggcggttttctttaagaagctgcgctaccatgtggcgctctcaccccagtcctccaggcagctctatgagctgggaattgaatccattcccagtgaatcggagtgttatccggctaagctggtccacggacatatatcatggctcatcaagcagggaatcaaattcattttctatccctgtattccgtatgagcgcaatgaaagcccggatgcaggcaaccattacaactgccccatggtcacgtcctatgctgagaacatcaagaacaacgtggaggagctggcggaagaacgggtaaggtttgtcaaccccttcatggcctttaccaatgaggagattctgacccaggccctggtaagggaatttgccatgaaccaccagattcccgcagacgaggtgaaaatggctgcccacgcagcatggcaggagcttctggcttcccgccgggacatggaggccaagggtgaggaaacactggcatggatggagaagaacaataagcggggcatcgtgctggcaggcaggccctatcatgtggactcggaaatccaccacggtatcccggagctgattacctcttatggctttgcggtcctcacagaggattccatctcccacctgggcaaggtggaacggcccctggtggtaaccgaccagtggatgtaccactcccgcctctatgccgcggccagctttgttaagaccagggatgacctggatttaatccagctcaactcctttggctgcggcctggacgccgtgaccacggaccaggtggccgatatcctgacccgttccggcaagatatataccgtgcttaagattgatgaggtaaataacctgggcgctgcccgtatccgtatccgctccctgattgcggccctgaaggtccgggaccagaagcattatgagcacaaggtggtttccagcgcctataaccgggtgtattttaccaaagagatgaagaagacatatacccttctctgcccccagatgtcgcccatccattttgaccttttagagccggccatccgttccttcggatacaggattgaagtattgcagaaccacaaccgcaacgcggtggacgtgggactccagtacgtgaacaatgatgcatgctacccttccctgattgtcatcggacagatcatggacgccctgctttccggcaggtatgacctggaccacacagctgttttgatgacacagacaggcggaggctgccgtgcatccaactacatagggttcatccggcgcgccctggaaaaagcaggaatgccccaggtgcccgttgtgtcggtcaatgccaacggcatggagaccaaccccggttttacatttacggtcccccttattacaaaggccatgcaggccattgtatacggcgatattttcatgcgcgtgctctatgccaccaggccatatgaggcagaacccggcagtgccgatgcactccatgggaaatggaaggcccgctgcattgcctccctgtccaaacgcagcgccgccatgatggaatttggccgcaacatcaggggaatcatacgggattttgacaatctgccaagaaccggtgtcagaaaaccaaaggttgggattgtgggagaaatccttgtaaagttctccccccttgccaacaaccatgtggtggagcttctggagtcagagggagccgaggccgtgatgcctgacctgatggatttccttctctacagcttttacaacagcaattttaaggcagagcacctgggcacaaagaagtccacggcgcggctgtgcaacgccgggattgccctgctggaatacctgcgcaggactgccaggaaggaactgtccgccagccggcacttcacgcctccgtcctccatcaacgaactggccgagatggccaagggctttgtgtccctgggcaatcagacaggcgaaggctggttccttacaggagagatgctggagttaatccacagcggcgtgaacaacattatctgcacccagccatttggctgcctgcccaaccacatcgtgggcaagggcgtcatcaaggagctgcgccgccactatccgcagtccaacatcattgcagtggattacgaccccggcgccagcgaggtaaaccagttaaaccgcatcaagctgatgctgtccacggcccagaagaacctgaagaatgagaaggcgccggaacagccccgtcagatgaagaagcagaaaaaggcctccaaggcaaagacactgcagaccgcctga

SEQ ID NO: 62 - DNA, 1914 bp, unclassified Clostridiales
atgggagagcaatacggagcagatcagattcagattttggaaggacttgaggcagtcaggaaaaggcctggcatgtatattggcagcacatcggccagaggtctccaccatctggtttatgagattgtagataatgcggtcgatgaggcattggcaggatattgtgattccattgaggttaccatcaatgaggacaattccataactgtcatggacgatggccgcggcattccggtaggcatccagaaaaaggccggtctcccggctgtggaagtggtatttaccatcctccatgccggcggtaaattcggcaatgggggatacaaggtatccggcggccttcatggggttggcgcatcggttgtcaatgcactttctgagtggctggaggtacaggtttataaggacggcgacatttatcagcagcgctatgaaagggggaaagtaacgtatcctctgaaaatcgtaggcaaatgcaatcctgaccagcatggcaccagggtcaccttccttccggacaaagagatatttgaggaaaccgtgtatgattatgacaccttaaaaataaggctgcgggagactgcattccttacaaagaatcttaggatcatccttaaggatgaccgggaagagaagaaggaaaagaccttccactacgagggaggcataaaggaattcgtcacctatctgaataaaggcaagacgcctttatatgaccaggtcatttactgtgaaggaagcaaggaaggcgtgtatgtggaagtatccatgcagcataatgattcctacactgagaatatttatacatttgtcaacaatatcaatacgccggaaggcggaacccatctgaccggctttaagaacgcccttaccaagacctttaacgactatgccaggaagaataagctgttaaaggaaaatgaagacagcttatccggcgaggatatccgcgagggtctgaccgcaattatcagcatcaaggtggaagaaccgcagtttgaaggccagaccaagcagaagctgggcaacagtgaggcccgtacagccgtggacaacattgtcagcgagcagctgacctatttcctggaacagaaccctgccattgccaaggctatgtgtgagaagtccatcatggcacagagggcacgggccgcggccaggaaggccagggacctgacacgccgtaagtccgctctggacgggatggcgcttcctggcaagctggccgactgttcagataagaatcctgaaaactgtgagatttatattgttgagggagattccgcaggcggttcagccaagacggcacgttccagggccacccaggccatcctgcccctcagaggcaagatattgaacgtggaaaaagccaggatggaccggatttacggcaatgcggaaattaaggccatgattacggcatttggaaccggaatccatgaagactttgacatatccaagctgcgctaccacaaaatcatcatcatgacggatgccgatgtggatggcgcccatatcagcaccctgcttctgaccttcctttacaggttcatgccggagctgatcaaacagggctatgtgtacctggcccagccgcccttatacaaggtggagaaaagtaagaaggtatggtatgcttacagtgatgaggagcttaactccattctcacggacattggacgtgataccaacaacaaaatccagcgttacaaaggtctgggtgagatggatgcggaacagctgtgggagacaaccatggatcctgagcggagggtgctgctgcgcgtgaccttggatgaagagaccacatctgagattgacctgacatttaccaccctgatgggcgaccaggtggagccgagaagggaatttatcgaggccaatgcaaagcgcgtacagaacttagatatctga

SEQ ID NO: 63 - DNA, 1728 bp, unclassified Clostridiales
atgcatctgattctacattatttaaaacgctataaaatttacgtattcttcaacctcctggccatcctgggatttgccacggcagagcttggcattcccaccatcgtttcccgtatgattgacaacggcatcatattaaatgaccgcgcttacatctacaaaatgggagcagccatcctggccgtggctgttgccggaggcattgggaacgtgctgctggcctactgcagttccctggtcagttcccgggtgaccagggatatccgcaatgatatcttccgcaaggcccaggagttttcccacaccgaatacaacaagttcggcatatccagcatgataacaaggaccaccaatgacgcattcatcctgatgcagttcatcaacatcatcctgcgcaccgccctgctgaccccgatcatgatcatcatcagcatgttcatggtcatccgcaccagcatgaccctgtccatggtcatcggaggctgtgtgcccattatctgccttggggtatatctgatagccaggaccagcaacccgatcagcacccggcagcagaagggactggataagttaaacaggattaccagggagaacctgaccggggtcagggtcatccgggcattctgtaaggatgaatatgaaacagaacggtttgaccaggccaacgaagattacgcagccaatgcaaaaaagctgttcaaactcatgtccgtgacacagccatcctttttcctgctcttaaacctggctgtttccattgtctttgtcctgtccagcaggctgattgacatgggaagccttcaggtgggcaacctggttgcgttccaggaatacatgttccacgccatgttctccatgatgatgttctccctggtgttcgtcatgtatcccagggctgaaatcagcgccaggaggatcaaggaactattagatgaggagccccttatacagaaccccaggaatccggtcactgcgggcgatggcagcggcaccctggtatttgatcacgtgtccttccagtatccggacggagaggcgccggtcctccgggatatcacctttgaggccaggcggggggataccattgccttcatcggcagcacgggaagcggaaaaagcaccctgattaacctgattcccaggttttatgacatcagttccggcagcatccgcatcgacaatgtggatgtgcgcagatatgacctgaaggcgctgcgggaaaaaatcggcttcatcccccagaaggcgctgctgttcacaggaagcatcaatgaaaatatccgctatggtaagcacaatgcagtccagaccgaggtggagcactctgccaaggtggcccaggcctatgatttcatcacggaaaagcccaaacagtttgaagaaatgattgaagaaggcggcggcaacgtatccggcggacagcgccagagactcagcattgcccgggccgttgtgcgcaagcctgatatctatatttttgacgattcattttccgccctggactttaaaacagatgccaatctgagaaaacagctgaaatacgagacaaaagatgccataaccctgattgtggcccaaagggtcacatccatcatggatgcaaccaggatcattgtgctgaatgaaggcgcggtggttggaatcgggacacacagggaactgcttaaaacctgcagtatttaccatgaaattgccttaagccagctgtcagaggaggaattagcatga

SEQ ID NO: 64 - DNA, 2610 bp, unclassified Clostridiales
atgaaagaatggtatcaacagactaaggaagagttattggaacatttccgtgtgacggaacatgggctgaccggtgaggaagccggtcagcggctggctgagagcggggaaaatgtccttaaggaggggaagcgcaaaagcatccttcaggttttttttgagcagttctgtgaccttttggtggtaatcctgatcattgccgcccttatatccatggtaagcggcaatgtggaaagcacgatcgtaatcatcgctgttatcgtacttaatgcaatcctgggaaccgtgcagcatgccaaggcggagaaatccctggacagccttaaatccctgtcatcgcccagcaccaaggtgatgagggacggacataagattgaggtgccatcggcccaggtggttccgggcgacatcctgtacctggaggccggggacctggtggttgccgacggaaggatactggaaaattattccctgcaggtcaatgaaagctcccttacaggagagtccaccaatgtggataaaagcgatggcctgatccatgacgactgcgccctggcagaccgggctaatatggtatattccagcggccttgtgacctacggaagggccgtggtgctggtgacagccaccggcatggatacggaaatcggtaagattgcagcccttatgaacgccacaaaggagaagaaaaccccgctgcagatcagcctggaccagttcggaagccgcctggccatggccataatggtaatctgcggccttgtgttccttctgagcctgtaccgtgacatgcctatcctggattcactgatgtttgcggttgcgctggcagttgcggcaatcccggaggcgctcagttccatcgtaaccatcgtgcaggcaatgggaacgcagaaaatggcaagggaacatgccatcatcaaagaactgaaggcagtggaaagcctgggctgcgtatcagtcatctgttctgacaaaacaggcacattaacccagaacaagatgacggtacagaatatctatgttaataacgagaccatttccatcgaccgtctggacctgcgcaaccagctccaccgttacctgctctatgacgccatactgaccaatgattcctccattgtggacggaaagggaatcggggacccaacagagtttgcattggtggaaatggggcgcaaggccacggtggatgaaaaccttctcagggaactgatgccccgtctggaagaaatcccatttgactcagaccgtaaactgatgagcacaaaatacgagcttcacgatgtgcccaccgttctgacaaagggcgccctggacgtgctcttggaccgtacggccaacatcaggctggaggacgggattagggaaatcacccaggcggataaggatgcaatccttcagaagaacctggaattttcccaggaagggcttcgggtcctggcatttggatacaaggaggtgccggaggattacacgctgtcactggacaatgaaaatggtttcacgttcctgggccttatctccatgatggacccgccaagggaagaatcaaaggcagctgttgctgacgcaaaaagggccggaatcaaaccggtgatgattacaggcgaccataagattactgcaaccgccattgcaaagcagatcggtatttttgaagaaggcgacattgccatgacgggccgcgagctggatgccatgacagaagaggagctggataaggatatcaccagtatttccgtatatgccagggtgtcacctgagaataagatccgcatcgtggacgcatggcagagacggggatccatcacagccatgacaggagacggtgtcaatgatgcgccggcccttaagaaggcggacatcggcgttgccatgggtatcacgggaaccgaggtttccaaggatgcggctgccatgatcctgacagatgacaactttgcaaccatcatcaaggctgttgccaatggacggaatgtgtaccgtaacatcaagaacgcaatcaagttcctgctttcgggcaacatggcgggaatcctgtccgtgctgtacacttccgtggcagccctgccagtgccctttgccccggttcatctgttgttcatcaacctgctgacagattccctgcccgccattgccatcggcatggagcctgctgaaaaagatttactgtcagaaaagccaaggaatccaaaaacaggaatccttacaaaagacttcatgctgaccatccttacccagggcggcatcattgcggtctgtaccatgattgccttccatctgggccttgggagcggagatgcaggaatagccagcaccatggcgttcgccaccctgaccctggcaaggctgttccacggcttcaactgcaggagcaggcacaatattttcaaactaggcttttccagcaactggtacagcctgggcgcctttgccgccggggtctgcctgctggggcttgtaatgttcgtaccatttttacaaaaactattttccgtcacccccctgaccatgtcccaaaccggaagcgtctgcctgcttgcagcaatcccgaccatcctgatccaggcctccaaaatcttaagagattttaggcataggaattaa

SEQ ID NO: 65 - DNA, 1362 bp, unclassified Clostridiales
atgagacagaaattatcaaagcacaatctgctgcttgttggatttacattattttccatgttttttggcgcggggaatctgattttcccgccttttcttggggcacaggcaggcagccttacatggcatgcaatggggggcttccttatgagcgcggtggggcttcctgtattaggcgtggcagcggttgcgctttccggcgggcttcccagcctggcaaagaaggtccatcctgtttttgcgttcgtgttcacgctgctgatttacctgtccatcggcccctgtctggccattccaaggacagccagcacctcctttgagatgacggtgcttcctgtcctgaccggcatgaagcttgagatgggccaattggcgggagggacaggctttacccttcagacagctgcgcagttcggatattcagccctgttctttatggcagccatggcggtggccttccggcctgacaagcttacagaccgtttggggaaggtgctctgccctgctctcttaatattgattggggtgatttttaccgggtgcctggtatggcccatgggaccatatggggcgcctgaggcggtttacagcgcagggccggtggtaaagggcttcctggaaggataccagaccatggataccattgccgcccttaacttcggcattatcattgccatcaatatccgggccaagggcgtggaacaggagggagcggttgtcagggaaaccgtgaaggcgggagtgattgcaggcatccttctggccctgatatacggggccctggcccacatcggggcacctgcgggcgcggttgcggcggatacaaagaacggcgcaaggatacttacctatgtggcaggcagcctgtttggaaaagcaggaatgatgatcctgggagtcatcttccttattgcgtgctttaatacatgcgtggggctgttaagctgctgcagccagtattttaccacaatcatcccggtgattggctataaggcgtgggtgtttgtgtttgcagccgtcagcctggtgatatccagtgcagggcttaacaggatactgaccgtatcggagccagtgctgaacgccatatatccggtggcaatcgtgctgattgtgctggcatttttaggtccgctgaccaggagatggcctgccatgtttccgtgcagcatcctgctgacagggattgtcagtgtggtgtatgccctggaacagagtaaggttaccatacctttcctaagccaggccaccacataccttccgggatatggggccggcctgggatgggttgtgccggctttggcagggatggcggcgggaattgttgtctcctccgtgcgggaggaggaaaatgagccgtag

SEQ ID NO: 66 - DNA, 2058 bp, unclassified Clostridiales
atgaataaaaacacatggaagattgtcataagacccatgggggcgctggcggccgcagccatcctgatggcttccgtaccgtcctggggcctggcccaggttcaggcggcggcacaggcgcaggcggaaccggggcgtcaggcggcggttcgggcgcggtcggaaccggggtatcaggcggcagcacaggcgtggccgccgctaccccggacaggccggttctttgaaggggtggatttttcccagaggccctatgagcatttctccacaacggtcatggacaaggccatggaggagtttgaactggccttaaacacacaggggcaggaagaggaagtggaacgtctgtatgacctgatcatcagtgagtttgaccggctggctacaatggcttatatggcccagatcatgtatgacagggatatatctgaccaggaagcagctggggagcaggcttatacaacgcagctgtattcggagatggggaataaggcggccgcctgcctgcaaaagggccttcagtcttcttaccgctcccttcttgaggaaaaaatcggagaagcctatgttcccaagattgcctactatgaggattattcccaggaggagctggatcttcacagaaaggaagaggatctgatccgggaatatgaccagctggcatccggcagtatatccgtggagtatgacggggaacagtgggattatgggcgtctggaaaaagagccggatatggacaccgcggattaccgtgaggtgagcgaggcgctgggcagggaaagaaaccgtatcctgggggacaaatacctggaactggttaaggtccgcggggagatagccaggtccgcgggttatgataattatgctgaatatgcccatgagacaatatacgggcgggattatacccttaaggatacgcggcagctttgccagaatgtgaaggataacatcgtggtcctcagcgataatatctggtacctgtggtcagaggcggtggacaatgcttcctacgacagcctggacctgctggaggacagcacagcagaggagattcttgatacggtaggggacggcatggaccagatggtgccaaaactgggggaagtattccgctatatgagggataaccatctgtatgatatccaggcaggggaggacagcgtggagcgtaccgatgggagctacacagtgggactgcccagttacagggatgcgtttatcttcataaaccgtgacaataccttccgggattaccagtccctgattcatgagttcggacatttctgcagttattattataatacagtccctgagatgtatcagggctttcatgtggatgtgtgcgagctgcagtcccagggactggagatgctgtcaacacgttatgccggcagtctgtttggggagggggactctgcctatacctatgagacgatgagcgatatgctgtacgtggccatcactgcatgcatgattcaggagttcgaggaagccgtatacacaacccctgacatgaccctggatgatatgaaccgcaggttcaaggagattcaggattcctacgatggctggtattaccgggtctatgggaatatgtgttatgactgggtagatatcccccacctgttctacagtcccatgtattatattggctatgggacgtcagccctgtcagccctggatctctgggtactttccggggaggactgggatggggcggtggatatctaccttgggatactgaacgagggcctggaagcgccttacagagggaccatggaccgatggggcatgaaggatgtgtttgatgaggcggatataaaggaactgtccctggaacttggaaggatagcagggaccggcagcatggaggccgaaaacagcgcacagcctgatggggaagcgcccggggttagcgcaaacgaaacatccgcggcccaggacaacaggtcggttcagttcatcattctggcaggaatcggcaccgtaatcgtgcttcaggtcctgattatcagtgttggtcttgtgattttgtgggaggtaaggaagaagcggtag

SEQ ID NO: 67 - DNA, 1353 bp, unclassified Clostridiales
atgaacagtcagctggccggagcaaaaatcctgcccctcttaatcaggcttaccatccccatcaccattgcccagctggtcaacgccctgtacagcattgtggacaggatgtatatcggacatatgcccggagtaggcaccatggcccttggaggcatcggcatcacatttcccattatcatgataacagctgcattcagctgtatcccgggtatgggcggcgcccctcttgcgtccatcgccatgggcagcggcgacatggagaagggccgccgctacctctccaatgcatttgtactgctggttggcatcggaatccttctcatggcggtttgcaccgcattcctgacccccatgctaaaggcattcggggcggacagctccacccttccctatgcaagggactacctcaggatttacatgatgggcactgtattcgtggaactgtccatgggcttgaatccattcatcaatgcccagggcttcacgggtatcggcacatttaccattgtcataggtgcatttttaaacataatcctggaccctatattcatctatgtgctggacatggggattggaggcgcggccatcgccaccgtcctgtcacagcttgtatccgccctgtgggtcctgtatttcctctgttccaaaagggccaccctgcgccttacgttcagggatatgaagcttacgggccatatcgtgcgccccatgtgcgcactgggcctgtccccgtttaccttccgtgtaaatgaaagcattgtggtcattgtcctaaactggctgttaatccgttacggcggtgaccaaagcaacctgcacattgcgtccatggccctccttaccagcatcagccaggtgttcttcatgcccctgatcggcatcatcacaggcgcccagccaatcctcagctacaacctgggcgcaaagaaccatggacggatcagggaaaccatacactacgccaggatcttaagcattggctgcgccgcacttatgtggttctgcctggttgccttccctgcccagatctgccgcatgtttaccagcgatgcagaactcatccgcctcaccaccatcaccatgcgcatcatgttctgcacggtccttgtcctgggactgcagatggtgaaccagaacgcattcgtagcccttggcaacacctggtactcctttatcttcgggatcatgcgcaaactcctgctcctgctccccctggccctcatcctcccccacttcgtaggagtctggggaatctacatggcagaagccatatccaatgtgctgacaacaatcatcacgcatatttactttgtgaggtatatgaggcggctttgcaaggggatgggatga

SEQ ID NO: 68 - DNA, 2793 bp, unclassified Clostridiales
ttgaaaaacaaccataaaatcggcgtattaataattgtcctgactgttctggccttatcggctgcaaccattgggctgtatccgtacatgaaggcaaaagcagaggaatatgtttcggtcaggaccatgcggttacaggagcagggcagtgattacagcgacctggcaacccaggtcatgaatttcagttatgagatatggcatcagaaaaagcaggaggaagagggcggcgtgctctcctattcacagaccttcctgcctggtctggacgagaaaatcaggacgctcagggaagaagagtacggcatgacagatagccgtgtcgcggcccaggattccgccatggcggatgaggaaatgtacggggatgccgtgagtgtccaggactatatggattctgagtttggcctggattattaccagcagctgcagtccaccatggattcccttggtaaggactgggagcggtattaccagaggtataacgcgttccttttctatgcggtaatcgatgaaaacggcggatatcagagaagcaatgtaaataagcccggggaatttttccgcgcacctctggattccgctaaaaaggagataggtttcacaattgaattcacctccacgggcagcttaaaggtgtccggctttgagggggatgagcaggatgcgtccaggctcctccaggccatgggccggttcgaattctatgacccccttgcagtccgcctgtctgacagctaccggtacagcggcatgcagtttacagggccaagggatataaaaatcatgttccgctgtgtgccggatttatttaccggcagtggatacagtacatcggataacacgctgctgaacgggcgtgcgctgctgaacggcggcggttactatacggtggcaggcgggattctggtcattctcatggttcttgcccttgccctgcccgcggtccggtcctttcgtctgggcaaaagcgcgctctgccgtctgtcctttgagccgctgagcctgataggcgtgggatggatggccgtgataggggaaggcggcatgcctgcaagcctcatagccgccaccttggacgggacattaaaagaggagattctcagggctgaattcctgccctggaccgctgaccttgcggtgattgtcatcaacctgctgttctgggcagtggcttacgggctgttcttctggggaatcatgtgttaccgcgccatcttctcaatggggccatggcgttattttaaagagcgcacctggctgggaaggttcctccggttcatcaagcgctggtgctgcaatgcgcttaacgtgttcaatgagactgactgggatagccgttccaccaggatattaggcaaggcggtcattggcaacttcgtcatactgaccctcatatcctgcctttggttctggggaatcggcgccttgattatctattcctgtgtgctgttttacctgctgaataaatattggggacagatgcagaaaaaatacaggatcctgctggacggcatcaaccagatggcggagggcgacctaaacgtggagataaaagaggatttgggcatattcaatccatttaaggaacagctgtccagaatccagaatggattcaaaaaagcagttgcccaggaggtgaaaagcgaacggacaaaatcagaactgatcacaaatgtgtcccatgacctgaagacgcccctgacagccatcatcacctatgtgaacctgctgaagcaggagaatgtgacggaggaagagcgcaggtcctatatccaggtcctggaccagaaatccatgcgactgaaggtgctcatcgaagacctgtttgaggtgagcaaggccagcagcggcaccgtgaccctgcacccggaacatgtggatatcatcagcctgttaaagcaggtgcggtttgaactgtcggacaaaatgtctgccagcgggattgaattccggttcaacctgcctgaggggcgggtgatactgtacctggacagccagaagacctaccgtatttttgagaacctgctggttaatatagccaagtatggcatgccgggtacccgggcctatatccaggtggtacgggaaccggaaggatatgtgaatatctccatgcgcaatgtatcggcccaggagctgaacgtatcgccggaggaactgacggaacggtttgtgcgcggggattcgtcccgcaacacagaaggctcaggccttggccttgccattgcaagaagcttcgtggaggtccagggcggttccatgaagattgaagtggaagacgacctgttccgggttgtcatacgctggaaggaaaatgcgcaggagggcaaggaagcccgggaagggcggaaccaggaaaggcagaaccaggaaaggcagaaccaggaaggcagcttgggagcggaggagaagccgggcatggaggtttaccgtggtccggaagtgaaaccaggcatgggggattatctcagaccggaggagaaaccgggtatgggggattacaccaccccggaaggaaaaccaggcatggaggattacctcagaccggaggagaaaccgggcacggaggactactccagaccggaggaaaaaacgggcatggaggattaccccaaatcggaagtgaaactgagcatgaaggattacctcagaccggaggagaaaacggaaccggagaacagtagtccgaccgaagacagaaaccgtgaaaatctctggagcccgcaagacaaccgtatcatacctggggaatgggatgaaaccgacgacgatgaatcagaaaacagataa

SEQ ID NO: 69 - DNA, 2964 bp, unclassified Clostridiales
atgaaacagatggaagcagatcttaaatggctggaggaccctggggttttccaggtaaaccggctggacgcacattcagaccatgcattttatgaaacagtggcccagatggagtcaggggaaaacccgctcatccagagcctggacggcaaatggggatttgcctggagcaggcggccaggcgaccgccccgccggattttatgaggaaggatttgacgacagcggctggggcgccatagaggtgccggggcacatggagctccaggggtatgaccggatccactatatcaataccatgtatccatgggaaggccatgctgagatgcggccgccctgcattgactgggattatgacccggtgggaagttatgtgaaggaatttgacctggatgagggcttaagaggaaagcgcgtgtgcatttccttccagggcgtggaacaggcgttttatgtatggctgaacggaaagtttgtgggttatggggaagactcattcacgccttcggattttgatttgaccccgctgatacgaaagacagggaaccgtctatgcgtggaggtgtataaacgcagttcggcagcctggctggaggaccaggatttcttccggttctccggcattttccggagtgtgtacctgtatgccaaacccaggtaccatgtggaggatgtttgggtacgggccgggctcggggaggattacaggaccggcacctttgccctgggcatcagggtttccgcaggcatggacggcggcagcgcccttaagaccagatgggtccgcagcctggatggaagcggtgtcatggcagagtggaggctgtgcggccaggatggggatgtggttactgcaggacggattgggggaaatgctgcgaaagccgtgaacggagcaggccagggccgtttggaggacagccggtacctgatcctcacagaggaggaaatcccggacgtcaggtcatggtcatccaaaagcccatatatgtaccagctgtatataagccttaagcaggaggatggggaggtgattgaggtggttcccctaaagaccgggttccgccgttttgaaatcaaggataagatcatgctgatgaacggtgaacgcatcatcatcaatggcgtgaaccgccatgagtggaatcccagaaggggccgcgccgtcacgcccgaggatatgcgccgtgacatcgaaatcctcaagcgcaacaacatcaatgcggtgcgcacctgccattatccgaaccagagcctctggtacaggctttgcgatgaaaacggaatctatgtcatggatgaggcaaacctggaaagccatggatcctggcagaaaatgggcagatgtgaaccatcctggaacgttccgggaagcctgccggagtgggaggcctgtgtggtggaccgggctgcgtccatgctggagcgggataagaaccatcccagcatcctgtggtggtcctgcggcaatgaatcctatgccggaacctgtatcctggccatgagccggtatttccatgaaaaggacccgtccagggtggttcattatgagggcgtgttctggaacaggcaatttaatgaaatcagcgatgtggagagccgtatgtatgcaccgcccaaagaggtacgggcatacctggaggataatccgcagaagccgtatcttctgtgcgagtacatgcacgacatgggcaattccattggcggtatggagagctatatccagctggccgatgagtatcccatgtatcagggcgggtttatctgggattatattgaccaggccgtttaccggaaggatgtggatggaacggaggtcctgggatatggcggggactttggggacagacccacggattacgccttttgcggcaacgggattgtttttgctgacagaagggaaaagcccgccatgcaggaagtacgctactggtacagcacaaaagaggagcgggagcggtttgacctggagggccggaaggccggtgctgggaccggagttgacggaaggccgggtatcggtacggagacaggcgttgacggaaggccggggaccggtgaagggaccgtaagtacccagggggcggagcataagcgccttacggttattcacggggatgttacgctgggagtaaagggagatgggttccatgtgattttctcctactctgagcatggtatggtttcccttgtgtatgatggcctggagtgggtgtaccgacctgcaatgccggctttctggagggcatccactgagaatgacaagggcaatggattcgctgtcaggagcgctgtctggtgcggcgccgaccagttcatcagctgcacgggatggcataccgaggaaagtccggaccaggtgcgtattacctatgagtatgccgccggtacggtgcctgcggcccgggtaagcgtaagctacaccgtagagacctccggcgcaatccgggtgcgctgccattatcatgggcaggatggactgcctcagctgcctctgttcggcctgcgtttctccgtaccgtttgtggctgggaaggtacagtgggaaggcaggcagggggagacctatcctgacaggaaaaagggcggtgcactgggggtatgggaaagccggattgaaaagccggattatctggtgcctcaggaatatggctgccatgtggatacacagtggctgcggcttcatgagccggacggtccgggccgctgccttgagatagccatggaagataagccgttccatttttccgcaatcccctataccccccatgaactggaaaacgcccttcacagggaagaacttccggtgccgcgcaggaccgtggtatccgtgctgggagccatgcggggcgtgggcggaatcgacagctgggggtcggatgtggaggaggattaccatgttttggccgataaggatattgaatatgggttcgtgatacgggggacggtatcaggacagggatga

SEQ ID NO: 70 - DNA, 2328 bp, unclassified Clostridiales
gtgataaaaaaattaagggttctgaatatgaagggtagcaaaagggagaatctgcttctggcagtgctgttggggctgacaggagcgtttcttatcatatcgtattacaaagtgatggcagggcctttaaggagcgtcctggagtcggaagccacgtggaccatgttgggggaggttgtgcttgtatttgcatggaacctgttctggctaaggagggcttacggcgggaagcgggacaagggtgccggaaacctccggatttgctggttttgtgtggctggaggcgctgctgtctttacctggtgccatcagatcctggtgccgattgccgtatccggtatctatgtggcggtcctgatcctctggggaagatggatccatcggttatttgcatggaaggtccggcagacgtctgttgaggaactgtccatgtccctggtgaccggaagcgcattctggatggtccttgtgtgccttatatccctcacgggccacggagggattaggctctggcgtgtcctggcgctggttcttggcggcgcggccatgggggcggaggcgtatctggcaatccgccaaggccgggccgggcagaagacgccgggatgtcagcggcagctgcctgggaaagccggaccctggctcctggcatttatcattaccatggtcctgatccaggccggacgcctgaatatagaactggattatgactccctgcactatggactgcggtcggcattcgtgctggacaatgggaaggggatttatgaaaacctgggtatgattaacctggtctacacctacagcaaaggactggaggtgctggcccttcccctgtgcggcacgcccacctatggatttgtgctggcattttccctatggatggcagctgcggtcctggtcctggcagcttccatggtgggacgctgcaggggactgggaatggggctttttgcagccgccgtgctgtcctccatccctggaatcatgaacatggctgccacggccaagagtgatatcatcacactgctgcaccagctgattatctataacttcctgtgccgcgcgtttgagaaaaaagaaaagacgccatggcttcttatggcggtggcaacctatctgctgaccctggtatataagcccacggccctggtattttcaaccgccctggggggaaccgcccttatctgtctcatggccacgggcaggttctgcctgggggacagaaagggatggctgctgctatttctgccggctggcgcggcagcagggctttggtaccgcacatggcttctgaccggagtgccggtgacctccatctttgcaggcctgtgcgaacggctgggatggaaagtcaggtatccttactcctttaaccatgtgattggggacccttccatgctgactgccggggaaaaactggcccgcctgggacggcgccttggagaaatgcttacggcccctgtttccatggacatggaccatgttgtcattgcctggggaaccggacttgtgacgctgttcctgttcatctggctcatttctgccataaggggcaggaaggaccggacgcccctggaagtatttgacagggttctgatggtggtcatgataatgggatgcatggccagcatttatacattgtcccaggtggacggcaattatttcatcctgttttattcccttttggtcgtcatttccatgaggatgggagggagcgtgttaagcagtggccgccttggcgcggttcccgcccgcgcacatgcgctgggacgcgggcttggtctgggggtcatctgcttcatgattgctaacattcctcttacatgcctgaccagctgggccggacagcccggtttcaccccggtacgcttaaagcatttgggatactacgaccaccggcgggaggcacggcagcgcgatttggaaacagggtgccggaaccttatatccggcttttccccggatacaagggtgctggcattcgggaaccacccggatgtgctggacatgccctgcagtgtacagagttattacgatgtcactggcagcgggggcaatgtatttctggtgaaaaagctggcatattttgaggagttcctggaatatgcgggcacagaatactttttcgtggaaaaaggatatctggcagcacagccgcgtgcccttgagatgatagaggacatgatagaggagggcagccttacggaccttacgtacgagtggggtaatctgtcggccagggtcacgctgccccccgtaccgcctgaggatcctgtggcagcagcagaggatttccacaataattacagtttttcatcggactga

SEQ ID NO: 71 - DNA, 1770 bp, unclassified Clostridiales
atgtttaaaaaaacgtatacaaagatagatacgaaatacaagccgccaaaaggtgacgcagaggagccgggcatcccggaagggctgtggcgcaaatgtaacaaatgcggccagcccatctatgtggaggacgtaaagaataattattacgtgtgtccaaaatgcagcggctatttccgtgtccacgcataccgcaggattgagatgattgtagacgagggaaccttcgaggagtggaacaaggagatgcctttctccaaccccctggatttcccgggctatgagaagaaggtcctggctgccagggaaaagagtcatctgaatgaagccattgtaacaggaaaaggcatgattgacggaaatcccgcggtggtaggcgtttgtgacgcgcgttttatcatgagcagcatgggccatgtggtgggtgagaagataacggatgcagtggagcgggccacaaaggaaaagcttcctgtgattatctttgcctgctccgggggcgccaggatgcaggagggaatcgtatccctgatgcagatggcaaaaacctcagctgccttaaagcgtcatcatgaggccgggcagctgtttatcagcgtgcttacggatcccacaacgggcggcgttacggcaagctttgccatgctgggggatatcatccttgcagagccccacgcccttatcggttttgcaggccccagggtcattgaacagaccatcgggcagaagctgccggaaggcttccagcgcgccgagttccttttggaacatggttttgttgacaagattgttgagcgcaaagaccagaaaaaggtgattggacagattctttacatgcaccgcaaccacaggatgaatgtggacctgccggtgggtaagacagcggccgctgtggataaccttgggaagatggcgcagtccggtggaaaaacatccgatgggaagatatccggcaaaggaacatccggcaaaaagaccggcggtacgtcaaagacagcctgggacacggtcctgctctcaaggaaatcagaccgtcccgttgcggcggattatatcaacgccatatttgatgagttcatcgagttccatggagaccggtattttggcgacgacggcgccattgtgggcgggatagccatgttccacggcatgcccgtgactgtgatcggacagcagaagggcaagaacaccaaggataacctgaagcgcaacttcggcatgccgtcgccggacggataccgcaaggccctgcgtctgatgaagcaggcggaaagctttggacgtccggtggtgtgttttgtggatacaccgggagcgttctgcggactggaggcagaggaacggggacagggagaggccattgcccgcagcctgtttgagatgtcagacctgaaggtccctgtgctttctgttgtgattggagaaggcggaagcggcggcgcccttgccatggccgtggccaacgaggtgtggatgctggaaaatgcaatctactccatcctttcaccggaaggattcgcatccattctgtataaggacagcaagaaggcgccggatgcagccaaggtcatgaaggtaacggcccaggaccttaagaagctggggctgattgaacggattgtaccggaagaagaacccgtatgcacggataacctttaccaagttgctgaatacatggacagcgccatggcaggattttttgaacgctgtctttccatgacaaaggaagaactggtagaacaaaggtatcttagatttaggagaatgtaa

SEQ ID NO: 72 - DNA, 2160 bp, unclassified Clostridiales
ttgactgaacttgagaaaaagataaaggcaaagattccgggcgaagataccgggattgaaataaaacattccctgtgcgcaatctgcagtccgggccatcactgcggtgttgactgctatgtgaaaggcggggaaatcatccgggtggagggtacgccggagcatccctataaccacggcaggctgtgtacaaaaggttccgcgcttaggaactacatttacagggaagaccgcatcaggacgcccttaaggcgcgtgggggaaagaggggaaggcagatttgaaccgatcagctgggacgaggcgtaccggatcattgcagaaaagctgaatcaggtaaaggaaacctattccccgcattccgtggcgttcttcagcggctactgcaagtggtaccgtcctattttccaccgctttgcccatgtgttcggaagcgttaattttggtacggatgacagcacctgcagcgcctcaaaggtaatcgctgacaaggtgaccgcaggatgcggcgcaggacctgacatgggccatgccaatacatttttaggctggaattacgatggctattattccgcccatctctccgtggcaggtgtgcagaaactgcgggagaggggagggaaggtaatcatcatcgatatacgggataccccggcatccaggaacctggcggatattttcctgaaaatcaatcctggtaccgatggggcgctggccttaggtatggcaaagctgattattgacaatggctgggcggacctggaatacattgagaaatatacatacggttttgaccagtataaagaactggcggaccagtatcctctggacagggtaagcaagattacgggtcttgatcccggcctgatttatgaggcggcaaagctttatgccacaaacggaccggcctgtaccaactattccgcatccgccctggtccatcacattaacggttttaactcccaccgggccatcctttgcctgtccgcccttaccggcaattttgacagggcgggcggcaatgtacctaatccgcccacctacctgcataaacctgcaggctttaaggtcagggagcatgcgttcaggtccgaccgttatcccaaggatggggagcgtatcggggcacggcggttccctctgtggaatgcccagtttgatgaattccaggcaatggacctgctgcgccagctggaggaggggacgccctatcctgtaaaggctatctttgcgatgggaatgaacgccaaaatgtttcctgagacagataagcttcttgctgccatgaaggataagctggatttctttgtggacacagacatgttcatgactatgacggccaaatatgcggatattgtcctgccggcctgttcctcggttgagcggggggagttaaaggcgtatcagggaggttacctgacctttacaaaaccggtaatcccgcccctttatgagtctaaatccgatgtggatatcctgtgcggcctggcccgcgtcatggacctggatgacccgtacctgaaggctggttatgaggcgtcggcagactggatgattgatggctgcggactgacggttgcggacttaaaggcaagtgacctgcctgtgaaggtacctgccgccaaatggcctgtcaagcccggaaactgcctggaaaacggatttaagaccgccacaggtaagtttgagttttattcaactgccattgcatccatcgatcctgcctttggcctgaatccgctgccggattaccgggattcactggaagaccagaatgaccctgagacaaaggagaaatatccattctatctctgcaccggcgcaaggctggcccatgccatccattccagggcccatgaaaccccgtggctgcggagtatccggcccgatcccacctgcgagatacacagggaggatgccaggaggctgggaatcagggaaggggacagggtttcattatccagcccttacggagaaatcttcatgaaagccaagctcacaggaaagacaaagccaggcgtcatcctgacgctccacggttatacggaggccaatgtaaacgaactcataggacgcaatcatgtggatccctattccggatttcccggattcaagggaatgcgctgcaatatccgcaaatgccaggaggttgaagagtga

SEQ ID NO: 73 - DNA, 1995 bp, unclassified Clostridiales
atgaattattatgtatcggcagatgggccgctgttaggcgacggttcacaggacgcgccctttcgcagaatcggccaggcggccgaagctgccaggcccggcgatacggtcattgtggcgccgggcatataccgggagtgtgtgaatcctaaaaatggcggtacatctgaccggaaccggattgtataccgttcccaggtaccgggggcagcggtcatcaccggcgcagaggagataagggaatgggaccatgtcagggacgacatatggatgacaaggataccgaacggttttttcagcggttacaatccatatactacccagattgagggggactggtaccgggggcttgggaggatcaaccatacaggacaggtatactttaatggtcaggccctttatgaggaggattgccttgaccggctttggaacaatgaaccattagaatgggcatgggacaaggagtattccaggcagcacaaatggtatacggagcaggatggggacatcactgtcatctatgccaggttcccggatgggacaccccatggaaaccgtgtggaggtcaatgtgcggcgcagggtattctttccggaacagaccggggtaaaccatattactgtttccgggtttacccttaagcaggcagccacccaatgggcgcctcccacggcattccaggagggactgattggaccgcattggagtctgggatggatcattgaagactgcgttatttccgattcccgttgttcgggcatcagcctgggcaagtgctggcatccttcggacaaccgttggacaaaggagcgcattaagtcaggaacccagctggaacgggacctggtacactatgcacagcatactggctggagcagggagacggttggttcccatattgtccggcgcaaccggatatttaactgcggccagactggaatcgtgggccatttaggggggatcttctcactgattgaagggaatgagatccatcatatcaatacatacggggagttcagcggctctgaactgggcggtatcaaactgcacggcgccattgacacagtgatacgccgcaaccatatccaccactgccacagggggatatggctggactggcagacccagggaaccagggtttcctgcaacctgttccatgataaccatggggaggaggatacccgcaccagtgaggatctgtatatagaagtaagccatggcccggcgcttgttgataataatctgttcctttcccggtttgcgctcagggagcgttcccagggactggcctttgtccacaatataattgcggggcccattgacatcggaagttctgagggaagattcacaccgtatcatttcccacatgggacagatatcatgggatgcatgacaatcaataacggtgatgacagattctacaacaacatattcattcagccggacctgcccgaagagaagagacgggtccgcaatcccgaggtggccagactggttgggatgaatccacaggtgaatatcgaagcaggtctgcatatttacgatggttatccgcttcatgatgagtattaccatcagtttacggatgaagggacgccggacacttcctggggtcgccgttatgattataactgtcatctgcctgtatatatcagcggcaatgcatactttaacggggccaggccctatggcaaggaacagctgagatatgttgatacggagaaccaggtttattttagtttgattgaaaaggatggttcctattatttcagcaccaatctttatgattatctgccgcggatggaaacggagatgatttccacatccatgttgggaatgtcctttgaaacggagcagccatatgaggacccggatggctcaccagtgcttattgatgaggatttcttaggcagaaggcgggggcagcaccctacaccaggtccatttgaatatacggacatggatactgggtttggtgagataaggctggtatga

SEQ ID NO: 74 - DNA, 4677 bp, unclassified Clostridiales
atggcaaaatgttttctggaagtatttccaactttaaatattgcggaacccttaaaagagcttttaggtctggtacaggtggaaaaggtgaccaccaccagggatagaagctctatccgcatttatctgaagagccccaggctcatacataaacagaatatctatgatttggaaaaggggataaaggaccagctgttcccggacaagcaggtgagcattaagattcaggaaaaatacaggctctcagaccagtataccccccaaaagctgctggatatgtataaggagagcctgctgctggaacttaagaactacagcatcattgagtacaccatgttccgtaaggcggaaatcaactttgacaaggaagaccggatggtcctgtccgtggaggataccatggtgaaccgggacaggacaggggagcttaagcgcgtcattgagaaggtgtttacagagcgctgcggccttcctgtggaggtgggatttacctttataccgccccagggcaatgaccgcagaaggcagattgaacttaagatggagcgggaggcgcaggccatctactggcagaaccacaaggaggagctggctgccatgggcggttccttttcaaccgaaggcctggaaggccaggaactggtccagggaaatggaaacaggggccagggaaacgggggacagggagacagcgccttcatggattccggatccggcccttctgaagcagctccatgggacatgcttatggcccaggcatccggcggcgggattggaacggatggaggttttggggaccaggcggcaggcctggacaaaacttcatcaaaaggcgccggccaggcgtccggtcttaagcaggcaggcggacaaaaggataagccgcagcttaacaagggccggaagggctggggcaaggacagggacagcgggtttggcgaggataagaaatattcggtaaaacgttccaacaacccggatgtcctatatggacgtgactttgaagacgagcccatggagattgagaagattgacggggagattggggaagtgacccttaggggtaaggtgctgacctgtgagaacagggaactgcgcagcggcaagttcatcctgacctttgatgtcagcgactttacggataccataaccgtgaagatgttcatacgtcccgagctttttgacgaggtaaaggcggttatcagccccggtatcttcatccgggtcaagggcgtgaccaccatcgacaagtttgacggggagctgacccttggttccattgtgggaatcaaaaaaaccgatgattttaccagcaagcgcatggacagcagcctggataagagaatcgagctgcactgccataccaagatgagcgatatggatggcgtatccgaggtcaagagcatcattaaaagggccaagcagtggggcatgccggccattgcggtgacggaccatggctgcgtccaggccttcccggacgccaaccatgccctggacaagggggacacgtttaaaatcatatacggggtggaaggttacctggtggatgatacaaagcagctggtggagaatccggggggacagggttttgaggatacctttgtggtgtttgatatagagaccactggtttcagccctaagaagaacaaaatcatcgagataggcgccgtgaaggtgacggacggaaagataacagaccgtttttcctcctttgttaatccggatgtacctatcccctttgacatagagaagctgaccggcatcaatgattccatggtgctgccatacccaaaaatcaatgtaatcctgccgcagtttttagattttgtgggggatgctgtccttgtagcccataatgccagctttgatgtgggattcatcagccattttgcagaggaacagggactgcctttcaatcccacggtactggataccgtgaccattgcaaggcttctccttcccaacctgaaccgttttaagctggatacggtggctaaggcgcttaatatctccctggctaaccatcacagggcagtggatgatgcaggggcaacggctgagatattcgccgcgtttgtccggatgctcagggacaggggcatttccgacctggagggccttaacggaatgagcacaatggataccaataccatccgcaagctgcccacctaccatgtaatcatccttgccaagaatgatatcggacgtgtcaacctctaccgtctggtgagctggtcccacctggaatattatgccagaaggcccagaatccccaagagtatccttgataagtaccgggaaggcctgatcatcggctctgcctgcgaggccggggaactgtaccaggcgctgctgcgcggcgcgccggacgctgagattgcacggcttgtgaatttctacgattatctggagatacagcctcttggcaacaactccttcatgctcagggacgagaagagcacggtgaagtcggaagacgacctgatagaaatcaataagaggattgttgaacttggcatgcagtttaataagctggtatgcgctacctgcgacgtgcatttcctggatccccaggacgaggtgtaccgcaggatcatcatggcaggacagggctttaaggactccgatgaccaggcgcccctgtatctgcggaccacggaggagatgttaaaggagttctcctatctgggtccggacaaggcccatgaggtggttgtgaccaataccaggaagattgcggacatgtgtgagaaaatcgcgccggtgcgcccggacaagtgccccccggtgattgaggattcggataagacactgaccaagatctgttatgacagggcccatgagatgtacggcgaggacctgccaaagattgttgtggaccgtctggaacgggaactgcactccatcatcaccaacgggttcgcggttatgtatatcattgcccagaagctggtgtggaagtccaatgaggacggttacctggttggttcccgtggttccgttggctcctcctttgtggcaaccatgtcaggtatcacggaggtaaatcccttaagcccccattatcactgtcccaactgccgttattatgattttgattccgaggaggtaaggaagttttccggcatggcgggctgcgatatgccggataagtcctgtcccgtgtgcggtacaccccttgaaaaggacgggtttgatattccctttgagaccttccttggatttaagggggataaggagccggatatcgaccttaacttctccggtgaatatcagagtaaggcccacgattacaccgaggtcatttttggaaaggggcagaccttccgtgccggcaccatcggcacgctggcggataagacggctttcggttatgtgaagaagtattatgaggagcgggggacaaggaagcgcaattgcgagatcaaccggatcgtgcagggctgcgtgggcgtgcgccgcaccacgggacagcacccgggcggtattatcgtacttcccctgggcgaggaaatctattcctttaccccggtacagcacccggccaatgatatggccacctccacggtgaccacccactttgactaccattccattgaccacaacctgctgaagctggatatcctggggcacgatgatcctaccatgatacgtatgctccaggacctgatcggcattgatccggttaaggatatccctctggacagccgggaggtcatgagcctgttccaggatacctcggcccttggaatcgtgccggacgacatagggggctgtccactgggagcccttggcgtacctgagttcggcacggattttgccatgcagatgcttctggacaccaagcccaagtacttttcggatctggtgcgtattgccggacttgcacatggtacggacgtatggctgggcaatgcccagaccctgatccaggaaggaaaagccaccatccagacagcaatctgtaccagggacgatattatggtttacctgattgcccagggcctggaggagggcctgtcctttaccatcatggagagcgtccgtaagggcaaggggctgaagcctgagtgggaggaggagatgacgtcccacggcgtaccggactggtatatctggtcctgcaagaaaatcaaatacatgttccccaaggcccatgcggctgcctatgtaatgatggcgtggcgtattgcgtattgtaagatattttaccccctggcctattatgctgcgttcttcagtatccgcgccagcgcattttcctatgaaatcatgtgccagggcagggataagctggaatattatctggctgattataagaaacgggcagataccctttccaaaaaggagcaggataccctgagggacatgcgtattgtccaggaaatgtatgcaagggggtatgatttcgtgccgctggatatatacaaggccaaggcaaggcatttccagatcatagacggcaagctgatgccgtccctcagcagcattgacggactgggcgaaaaggcggcggacgcggttgtggatgcggtaaaggacggcattttcctttccattgaggatttcagcagcagggccaaggtaaacggcaccctgtgcaccctgatggcggatatggggctgttaaaggacctgccccgctccaaccagctgtccctgtttgacctgtaa

SEQ ID NO: 75 - DNA, 1605 bp, unclassified Clostridiales
atgatcattatccaagctttactaattgctattgcagccaacctggccagcggcagggtctggagccccattacatggcccttctgttatccgcttatcaacgggaccgtggtgggactgatactgggggacccgctcctgggccttatggcaggagcaaccattaacctggcctacataggctggatttccgcaggcggcaccatgccgtccaacatcggtatcgcaggtgtatacgggacagccatcaccatactggccaaggcaacgccggagctggccattacgctggcaatccccatcggtcttctgggcgtgctgctgtggaaccttcagatgacactgaatgtgttctgggtacaccgtctggacgccaatgctgaaaagggtgaactgaacaagatattctttaatgcatggctgtttccccagcttacgtcccttgtggtcaatggcacccctgctttcatccttatgtttttgggcggggatttcttcaaccgcctgctgggccgtattccccagggctttgtcaatgcgctgagcgtgaccggcaacctgcttcccgcccttggcgttgccatgctgttaaactatctgggcaagaagaaaatgattccctatttcgtaatcgggtttttccttaccaccttcctggaccttggaatcatggcagtggccatccttggggcgtgtgtggctgtcattgtctactatgcggcaacggaaaaagcggaagaggattttgtggaggctgtggaggaagcgccaaaacaggaattgaaaatcaggctgcgcaaatcagatctggtgaagcactggcttatcggccttggcgctgaagttggatacaactatgaaaggatgcaggcatccggcaatgtgctggccatgcttcctgtgattaaacggctttacacagaccctgaggacatcaaggctgcattaaagcgttacctggtattctttaacacggaaccgtcctttatcggcaatgtgattcccggcatctgtgcttcccttgaggaagaacgggccaatggcgcggacatatcggatgagatgatcaacggactgaggaccggccttatgggaccgctggccggagtcggggacagccttgcaggcggcatcatctatccaatcgcggtatcccttggatgcgccctggccctgaaggggaatttttcaggcccgatcctgttctttgtgatttttacaggaatcatgctggtgctaggctacaacctgtatcagatgggatataagcagggaagcgtgtctgtcatgaatatcctgggtgaaggatccggctccatcacacggcttacagacgcattcggtatccttggcctgatggtaatcggcgcaatgggcgcccagaaggtattggtatatgtccctcttcagattaccgtgggacagacaacggtcatcttccaggatgtactgaacggcctgctgcccaatatgcttccctttggcctgatcatcggcacctggatgctgcttaagaaaaaggtgtctccggtcctggttgtgctgatactcatgctggtggggatcataggatactatataggggtgcttgggattgcggcataa

SEQ ID NO: 76 - DNA, 1152 bp, unclassified Clostridiales
gtgaaggcagcggagaataaaaaaggaggggaatcatttatgggcacagaagtgacggaggttgttgaacgcaagacgccgctctatgacacacatgtgaaatacaagggaaagatagtcccgtttgcagggtatctgctgccggtgcagtatgacaccggtgtgattggggaacacatggcggtacgtaccagatgcggcctgttcgatgtatcacacatgggtgagattatctgtaggggaaaggatgcgcttcagaacctgaacatgctgctgaccaatgattatacggtcatggcagagggacaggcgcgatacagccccatgtgcaacgaagagggaggcgtggtggacgacctgattgtctataaggtaagggacaactgctacttcattgttgtgaacgctgccaataaggataaggactatgcctggatgaaggcccgccagtttggggatgtggtgtttgaggatatttccgaccgcgtggcccagctggcccttcaggggccaaaggccatggatgtccttaagaaggtggccaaagaagaagaaattccggataagtactatacctgccggtttgactgcatgattggggatatccggtgtattatctccaggacaggatacacgggagaagacggggtggagatttacatggcgcctgaggacgccccggggatgtgggagctgcttatggacaagggacaggaggaagggctgatcccatgcggcctgggggccagggacaccctgaggctggaggcctccatgccgctgtacgggcatgagatggacgattgcatttcaccaaaagaggcgggacttgggatttttgtaaagatggacaaagaagatttcattgggaaaaaggccctggtggaaaaaggaccgctgaccaggaagcgtgttggccttaaagtgacaggcagaggcattatcagggagcaccagccggtgtatataggagaccagcagatcgggatgaccacgtccggcacacactgcccttatcttgggtatccggcggccatggcgcttgtgggtatcggatataaggagccgggaacggctgtggaggtagaggtgcgcggacggcgtgtggccgcggaagtggtgaagcttccgttttacaaactaaaaaagtaa

SEQ ID NO: 77 - DNA, 1767 bp, unclassified Clostridiales
gtggctaagacaggtgtgatacacggcattaatggtcctgtcgtttccttgctgggtgacccgggattccagatgaatgaaatggtttatgtgggagcggagaacctggtgggcgaggtcatcggacttacttcaggtaaaacaacggttcaggtgtatgaggagaccagcggcatcaggcccggtgaaaccgtgaccggtacgggcgcgcccgtgtccgttaccctgaccccgggaatcctcagcaacatatttgacggaattgagcgtcccttaagcgagattgctaaggggagcggttattacatcagccgcggcatatccgtggacagcctggatacatccaggaagtgggatacgcatatggtggtaaaaaaaggcgaccgcctgatgccgggaaccatcatcgccgaggtgccggagacaagggccattacccacaaggtgatggtgcccccggatgtggaaggttatgtccttgaggctgtgccggacggacagtataccattgaggagacgctgcttaccgtgcagctgatggacgggtcggagaaaacgcttaccatgacccagaaatggcccatccgtatcccacggcccacggccaagcgttttccggccgtaaagccgctgattacgggacagcgtatcctggataccatgttccccctggcaaagggcggcacggcagccattcccgggggattcgggaccggcaagaccatgacccagcaccaggttgccaagtggtcggacgcggacgtgattatctatatcggctgcggggagcgcggcaacgagatgacccaggttctggaggagttctcggaactgattgaccctaagacaggcaatccgttgatggacaggaccacgctgattgccaatacgtccaacatgcccgtggctgcccgtgaggccagcctgtattccggcctgaccctggcagaatattacagggacatgggctatcatgtggctatcatggcagattccacctccagatgggcggaggcgctgcgtgagctttcgggccgtctggaggaaatgccggcagaggaaggtttcccggcatatcttgcgtcccgcctgtccgcgttctatgagagggccggcatgatgcagaacctgaacgggaccgaaggctccgtgaccattatcggcgctgtttccccgcagggcggggatttctccgagcctgtgaccatgaacaccaaacgttttgtgcggtgcttctggggcctggataaatccctggcctacgccaggcatttcccggccatccactggctgaccagctactccgagtacatcaacgacctggcgtcctggtacatggataatgtggataagaagtttgtggattaccgcaaccgtttaatggccctgctgacccaggagagcagcctgatggagattgtcaagctgattggggcggacgtactgccggatgaccagaagctggtgcttgagattgcaagggtaatccgtctgggcttcctgcagcagaacgcgttccataaggaagatacatccgtacccctgattaagcagttcaagatgatggaaatcatcctgtacctgaataagaagtgcagggccctgatttccatgggcatgcctgtgtctgtgttaaaggaagaaaatatttttgataaaatcatatccattaagtatgatgtgcccaatgaacgcctggatatgtttgatgattataaacagcagattgatgcgttctatgacagggtaatggagaggaacgcgtaa

SEQ ID NO: 78 - DNA, 2397 bp, unclassified Clostridiales
atgaacgatacaatggacctggtaatcccgggattctgcggcatggggatgcacctgagactggatgggttcaggattatttacgtgctcatagccattgtgatgtgggccgtgtgcggcctgttttccctggaatatatgaggcattatgggaatcgcagaagatactatgtttttttctggataaccttcctggcaacggcaggcgttttcctttcagcggatctgtataccacattcatattctttgaaatcatgtcatttacctcctatgtgtgggtggcctttgatgaaaagaaggaaagcctgagggcggcggaaacctacctggcagtagcggtaatcggcggacttgtcatgcttatgggactgttcctcctgtatgatatgaccggcacactggagatggatggactgggccgggcagtggaggaggtattatccggtaatggggtatatggctccggaggtaccggcaggctgtatgcggccggagggcttttgctgttcgggttcggcgccaaggccggctgcttcccgctccatatctggctgcccaaggcgcatccggtggcgccggctcctgccagcgcactgctgtccggtatactgacaaaggccggtgtgttcggaatcgtggttgtgtcctgtgtgatgttcgggacagatgggaactggggcctgctggttgcggtgctggggttcatcaccatgtttctgggcgccctgcttgccctgttttccgttaatctcaagcggacgctggcctgctcctctgtgtcgcagattggattcatcctcacagggatagggatgtgctgccttctaaagtccgtcggccaaggtaatgggctggcggtccgcggcaccttcctccacatggtgaaccattccatgtttaagctggtactgtttctttgcgccggggtggtgttcatgaacctgcaccagctggacctgaacgacataaggggattcggaaggaagaaaccggccctattgttctgtttccttatgggggccttgggcatcagcgggattcccatgtggagcggatatgtgagcaagacattgctccatgaagggattgtggaatacggggaaatgctggcgcggggaatgggaccggcatccggcagcctgattgggtccgcgggagggggagtccatcctgccggctggagttatggaataagtgcggttcttggagcgcctgccgtatggaaggcggcagagtggctgttcctgttaacgggcgggatgaccctggcttatatgctgaagctgttcattgttcttttcgtggaccggcatccggtgcggcagcaggaatttgatgccatgtcctctggctatatgaatccggtgagccgcacggtgctgtgcgtttgcgcgtctgtgattcctgtgtttgggtcatgcccgcagctgttcatggaccgggcggcggatttggggcagggattttttcaggggaacctgctgggacataaggtttcttactttgcggccgggaatctgaagggggccgccataaccattggcataggaatcgtgctgtatatggctgtggtgcggggcctgctgatggagaaggcggaatccggggaacaggcggagggacggtgggataatggtggaagcagcagcggagttaacggcggaaacaacagcgggattaacagcatagttaacagtgaaatcaacagcggagtcaacagaagaaacaacagcggagtcaacagaagaagcaacagagggggcaacagcggaaacaacagtggagttaacagtggaaacaacagtgaagttaacagcagaaacaacagcggagtcaacagcagaatcaaccgcgaagtcaacgggaaaatgtgcggtttgtacttgtacaggtatgtggaccgctggcctaagtggttggatttagaggaattgatctaccgtcccatcctggcagtggcgcttcccggcatattcggggctgctttccggtttgtggaccggtatctggtgtccacggccgtgaatcttttccttcaggtatcagcggtcctgtgcagggcccttgaccatatggcggacggccttatcctgctggccaggaagattacccaccggcagaggaacggggaaatggtccggtggggaaatgacaggtctgcttttatattgggacattttattgatgatgtggccagactgggacgccgtctgccgggaagaagaaaaggacgggaaaggaacggttctgtcatcccgcgcctcattgagggggaggaagtgctgaaacgtaccggaaagctggtggaggaaagtttctcatttggacttatgctgttttgcattgggctttgcctgacgctgggatatctgctggttgtgtttttcagggggtag

SEQ ID NO: 79 - DNA, 2214 bp, unclassified Clostridiales
atgaaatataagattgatgttgtgcgcatcagggaaaactccatcacactgaacggatgggccatcggcaggtcgccggaaagccgcgccaccttccgggtggaggacgggaagcaccagcctgttaagttcaaacatgtttccacccggagggatgatgtaagccagatatattataaggcggtccatgacagggagtttggttttgatatccagtttccctatgagcgggggaaaagctactatctgctgatacggtgcgaggggaagcaggctaggattaagttcaatgaggaactggttgcaaagagggccagcgtggcacataagcggttagagaagattaaggaccttatgaacatggagacagtccatgtggccatggatttctggaaagagcacggccttaaggccctggtactcaaatcaaagcacaagcttcagggaattgacaatgactatgattacagcgagtggtatgaccttacaagacccacggatgaggaactggcagcgcagcgccagaagatatttgattttgaacccctgctgtccgtggtgatacctgcctataagacgccggagcgttatctcagggaaatgctggattccattgtggaccagacatacaccaactgggagatatgcattgcggacggcagccccaggggacagggactggagcgcgtccttaagaaatacgcggacagggataagcgcatccgttatgagattttgggaagtaacagggggattgcaggcaataccaatgctgccctggatatggccaggggtgatttcgtgattctggccgaccatgacgatacccttcctccccatgctttttatgaggtggtaaaagccattcatgaacatcctggctgccaggtcatttactcggatgaggacaagctggacatggacggaaaggctctgtttgacccgcatttcaagccggactttaacccggacctgcttaccagcgtgaattatatctgccatctcttcgtggtcaggaaggacctgcttgagagggttgggggattccgccaggagtttgacggcgcccaggattatgatttcatattccggtgcacggaagcagcccgggaggtttaccatattcccaaggtgctgtaccactggagatgccaccaggactccactgccagcaatccggaaagcaagatgtatgcctttgaggccggttccagggccatcatggcccactatgagcgcatgggaatccaggcggagcgggtggaaaaaggcgtggattacggcatttaccatactgttttcaaacttcaggcacagccccttgtatctgtcatcatccccaataaggaccacaccgcggacctggacgtgtgcgttcagtcgctgatgggaaagtcatcctaccggaacctggaatttattgtggtggagaataacagcagggaaaaagaaacctttgaatattacgggaaaatgcaggcaatgcacagcaatttccatgtggtgacatgggaaaaaggctttaattattccgccatcaataactttggggccggttttgctaagggcgaataccttctcctcctgaataatgacacagagcttataaacccggacagcattcaggaaatgcttggattctgtcagcgggaggatgtgggaattgcaggagccaggcttctgtatgaggatgacacaatccagcatgcaggcgttgtgattggctttggcggcattgcaggacacacgttcatcggccttcataaggcggaaaacagttatttccacagggccatgtgcgcccaggactacagcgcagtgacagctgcatgcctgatgacgaaaaagtccgtgtttgacgcggtgggcggattgagcgaagaactggcagtggcatttaatgacatagattactgcatgaaagtaagggctctggggaaactggtagtatatgcgccctatgcatgcttttaccattatgaatccaagtccaggggactggaagatacgcctgagaaggtggaacggttcaaccgggaagtcgctgtttttattaaaaagtggccggatatcatcaggaagggggatccctattataatcccaacctgaccctgcgcaaatccaactttgccctcagggacctgcaaaaggaaaagataggggaaccatacgaccttaagatttatgagcagtttgctccggaggataagtag

SEQ ID NO: 80 - DNA, 2604 bp, unclassified Clostridiales
atgatggaacgatatacaccacaggcccaggaagcgctgggcctggcagtggaagtggcggagggcctgaaccatggatatgtgggaaccgagcatctgctgatcggcctgctgcaggaaggcaccggcgttgcggcaaaggtactggatgacaacggggtggaggaggaccgggtgacccagctggtgagccagctgattgcgcccaatccaaccatccagaccacgggacagaccgcctataccccaagggcgcgccgcgtcatagagaacagttaccgggaagcagtgcgctttaaggcggcgcagataggaaccgagcacatactgattgccatcctgcgggagggcgactgtgtggcaagcaggctgctgaataccatcggggtcagcatacagaagctctacattgacctgctggcagccatgggcgaggacgctcccgcggtaaaggacgagattggcgccaagggcggccggaagggcaacgccacccctaccctggacagctacagccgcaacctgacccagctggcggcagatggcaggctggatcctgtcattggccgcgaacaggaaatccagagggtcatccagatactgagccgccgcacaaaaaataacccctgccttatcggcgaaccaggagtgggcaaaaccgctgtggtggaaggcctggcccagatgatcacagcaggtaatgttccagagaccattgcggacaagagggtcatgacactggatttatccggcatggtggccggttccaagtacaggggagagtttgaggaacggatcaagaaggtgatatccgaggtcattgattccggggatgtgcttttgttcatcgacgagatccatacaatcattggcgcgggcggcgcggagggggcgctggatgcctccaatatcttaaagccgtccctggccaggggggaactgcagctgattggcgccaccaccattaatgaataccgcaagtatattgagaaggattccgcgctggagcggcgtttccagcccgttacggtggatgagcccacggaggaggaatccgaggcaatccttaagggcctgcgcagccgctatgaagagcaccacaaggtggaaatcacggacgacgccctgtcggctgccgtgaaactcagcagccgttatattaatgacaggttccttcctgataaggccattgacctgatagacgaggcgtcgtccagggtaaggctgatgaattacaccaagccgtccaagattaaggattatgaggcggagattgacgccctggaggaaggcaaggaggaggccattaagaaggaggcctatgaaaaagccggggagattaagaaaaaacaggaaaagctccgggaaaagataaaccagaccatggaaaagtggcagaaggaaaaggaaaccaggaaactggtggtaagtgagaacgagattgcggatgtggtgtccggctggaccaagattccggtaaggaagctggcagaggaggaatctgagcggctgatgaacctggaaggcattctccatgagcgcgtggtaggccaggaggaggcggttaccgctatctccaaggccatccgcagaggacgggtggggcttaaggacccgggccgccccattggctcattcctgttcctggggcccaccggcgtgggcaagacagagctctcaaaggcattgtcagaagccatgttcggcacggagaacgcgctgatacgcgtggatatgtcagagtatatggagaagcacagcgtgtccaagatgatcggttcaccgccaggatacgtgggttatgatgagggcggacagctcagcgagaaggtaaggcgcaacccttattcagtcattctctttgatgagatagaaaaggcccatccggatgtgttcaacatcctgctccaggtattggacgacgggcatatcacggacgcccagggccgtaaaattgactttaagaacaccatcatcatcatgacaagcaacgccggcgcggaaaacatcatttcccccaagcgccttgggttcggcatgacaagtgacgccaaggcggattacaactttatgaaggaccgggtgatggatgaggtgaagcgcctgtttaagcctgagttcttaaacaggattgatgagatcatcgtgttccatcagctgaccaaggagcatatccgcggaattgccgatatcatgcttaggaccattggaaagcgcggcaaggagcagctggggattgagctggcggtaacggataaggccagggaacatctcattgacaagggctacgatgacaaatacggcgcaagacccttaaggcgcaccatccagaatctggtagaggataagatggcagaggaaatgctggacggcagcttaaaggccggggataccgtgaccgtggactttgacggggaaaagctgacctttaaggccaaagcaaaagcagcgcccagacgcagggcttcagggggtaagacagcggccgggacagatacaaaaacagatacaaaagcaggtgccaaagcaggcaagaaaccaggtccaaagaccggtccggccaaagccggttccggcaggaccccggcagggaaatcaatttaa

SEQ ID NO: 81 - DNA, 2382 bp, unclassified Clostridiales
atggcaacgattacaggattcatagagcggattaagttccgcaacgaggacaacggatacactgtcttaagcgtcacggaccagaatgacggcgatgaggtcatcatggtgggaaccctggcctatgcggcagagggcgacatgatagaagccagcggccatatgacagaacatcccgtgtacggcgaacagctccagatagagagctacgaaatgaaaacaccccaggacgagctgtccatggaacggtatttgggctccggtgcaatcaaaggcatcggggccgctttggctgccaggatcgtgcgccactttaaggcagataccttccgggtcatggaggaagagccggaacgcctgtcagaggtcaagggcatcagcgaaaagatggccatggccattgcggagcaggtggaggacaagaaagacatgcgccaggccatgatgttccttcagaactacggcataaccatgaacctggcagccaagatatatcagcagtacggaccctccctctacggaatcatccgggaaaatccctaccgcctggccgacgacatccccggggtgggattcaagatggctgacgagatagcggagcgggtaggcattttcacggattccgactaccgcatcaaggccggtatcctgtacacccttctccaggccacggggaacggccacacataccttccccagacagagctgtttgcccaggcatccgagctcctgaaggtggagccctcatccatggaaaagcacctgatggatatgcagattgaccgcagggtggttgtgaagcagtcagaacaggggccggtcatctattcctcacagtactactacctggaactgaacgctgccaggatgcttcatgacctgaacatcaagggcgacacgcctgagacagagataaaggaaaacttgaagaaggtccaggaaatccaggcgcaggaggcccgccagacccaggcccgtcaggcccgaaaccgggaaaatcagactcaggcagatcagagcctggcaaatcaggctcaggaaaaacaggataatgagctccagagccaggattcaatccgtctggacagccttcaggaaaaggccgtctacgaagctgtcaacagcgggcttttagtcatcacgggcggacccggcaccggtaagaccaccaccatcaacaccattatccggtattttgagatggagggcatggaaatactccttgcagcgccaacgggccgggccgccaagcgcatgacagaagccacgggctatgaggccaggaccatacaccgtatgctggaactggtgccctcaggcgcacctggcggggacagcgacaaatctggattgggcgcctccggcatgcattttgacaggaatgaggaaaatcctctggacgcggacgtaatcatcattgatgagatgtccatggtggacataagcctgatgcattccctgctgcgggccgtcaatgtgggcacccgtctgatcctggtcggggacgtggaccagcttccaagcgttggtccgggcaacgtgcttcgggacatcatagattccggctgcttcaatgtggtgaagctgactaatattttccgccaggcagcccaaagcgatattgtggtcaacgcccataaaatcaatgcaggagaacgggtggacctggcaaagcgcagcaatgacttcctgttcatccgccgggataacccggacgcggtcataagcgccgccatcacgctgatccagcagaagctgccgggttatgtccatgcccagccatttgacatacaggtcatgacccccatgcgcaaaggcgcccttggcgtggagcggctgaaccaggtgctccagaactacctgaaccccccggacaagtcaaagaaggaaagggaggcgggcgggatcatttaccgcgttggcgacaaggtaatgcagataaagaacaactaccagatggagtgggaggtctgcaaccaatacggcatacccacggaccgcggcgccggaatctttaacggggacgttgggatcatccgggagattaacgaatacgcggaacttctcaccgtggagtttgacgagggcaagaagatagaatacagctttaagcagctggaagagctggaactggcttacgccatcaccatccacaaatcccagggaagcgagtatccggctgtcatcattcccatgtacaacggacccaggatgctcatgacccgcaacctcatctacacggccgtgacccgggcccgggcctgcgtatgcctggtgggccagccggacgccttttacaccatggcggccaactgcgttgagcagaagcggtattccgggctgaaggtgcggatcagggagatttatgagctggaaggctag

SEQ ID NO: 82 - DNA, 1338 bp, unclassified Clostridiales
gtgagaaggaggttaacatcaggaaactcttatcctgaagcaggatgcctgaaatgggggtccggacgtgggatccctgatactgaaaaatggaaggagcagattatgaatgaatttccggattatttaaaatcctttcccagagaggaatatgaagcccatataaaaaagcttcaggaggagatggaggcagaggggcttgatatgcttctgctgtcatcgcctgaaaatatattttattccacggcttaccgttcatggtatacctccagcctgttccggcctgtgctggtatttgtcccaagaaaaggggaaccggctatttccttacgtatactggaacagtcaacagtgaggaatgtggcgtggtgtcctgtcatttatgcggcagggacaaaatccagggacctggggccccttaattccgaaggacccattgatgccatgagacagttcatatccggtttggattacccggttaagacagttgggctggaagcaggggacgggcagcattatttttggtcccttaatattttaaaggaactggtggatgcattggacggcctgcgctttgtggatgggaccggggcgatccagaaggcccgtatggttaagacaagttgggagattgacaggatacggacagccggatatgtgacggaacaggcaatccgggataccttcagcaagatccgtcccggcatcacaacggaaaaggagattgcaagaggcatagccagccgcatgacggctggcggggtggataagatttcgtatctcaccgtgaattcaggcagggataagtaccatacctttaacagctatgccacggaccggattgttgataacggggatgtcgtgcttgtggatatcagcggccatattgacggttacgcctctgacctgacccgggtaatgtatctgggacatacggccccggggcagtatgtggagatggcggaaacagccagggaatgtgtgcatgccggtttccgcattttaaagccgggaattttggtatctgatattaataaggaaatagaggggtatctgagaaagtccaggtatggaagccaggtggtgcattccagcgggcattccactggtctgaacgtgacggagtatcccaatatcagtgatgactgctgcgaaaccgtgcggccgggaatggtctttgccctggaaaacggggtttatccatatgatttagaaaagggggcgggaacgatatggatatccttccgtatggaggatgaggccctggtaacggaacagggggcagagtggctgtccgggccgggcaaggcactgtatacattgggagatttttgctga

SEQ ID NO: 83 - DNA, 1305 bp, unclassified Clostridiales
atgaacgacaatgcatgtacgattatcctcaacctgattaacatggccgtgcgcatgatgcccatctttgtatgtctggagccaaaacacaggaacagggaaaacatcgcggccgtgtccgcctatctgtgggtcatcatggtgtcactgcaatccctgttccatatcagcccccaggtgttttttgtatttcacggcatattttcctgcctgttttttctggtgctgcttatcttctttaagggcggcctgctggaaaaggcattcctctacatatcggcctggctctttggggtgctgtccacgtccctgaatgaatttgccgtctggctgctgcttcaccgggtcagcctgacctatggacagatttcagtggtggtgtcccttgtctcggcggccggattctgcctgtttgtgcgttactggcttaaggatacggtgcagcgccttttcgcgcagctctcaaaacgttcctgttccctgctgcttacgtatccgtccgtatccctgcttatcctgtccattggcaccaacaccatattttcgcccaggtccctggcggccagggggacctgggacatcctgttctttcttgccctctgcgccatgatcctggtgctgtatgtgatgattctgggaaataccctgggaatcatgtgccgcaggaagacggaggaggagctgcagtttgcaaggcagcttatcggcaagcaaagggaacactataaccagacgctggactatattgaacaggtccgcatcatcaaacatgatttccgccatcacatccatgcattgcagaacatgggcagggaggagcagcagaagtaccttaagaacctgaaggaggagctggaccgcaccgccgacatggtattctgtcagaaccaggctgtcaacggcctgcttcaggaatatgcagcaagggcaaggcaggcccggattgactttgaggcccgtatggatctgtcggcccatgtgccggtggacgacctgacactctgcattgtcattggaaaccttctggaaaatgcatttgaggcatgcaggcgcattgaaacggaacggttcgtccgcatccaggccagatggctggaggaccacctgatgatgatggtggaaaattcctatgacggacagatcaggcagagcggcggtaaaatcctttccagcaaaaaggacgggggcctgggaatcctcagcatacgcaggatattaaactatccgggggacgaattcgacatggattatgacggcgccacatttactgtaatggttaaaattgcagaccggatgataagatag

SEQ ID NO: 84 - DNA, 1869 bp, unclassified Clostridiales
atgaatctggtaaccattgaacatttaacaaaatcatacacagaaaggctgctgtttgacgacacggccttttccatcaatgaaggggaaaaggtgggcctgatcggcatcaacggcacaggcaaatccaccctgttgaaaatcgtggcagggctggaggagccggatgacggaagcgtggtccgcacaaggaacctctatatccgctatctgccccagataccggagtttacccaaggggacacggtgctggaaagcatcatgagggacaatgaaaatgaaacccactacagctccagggaagagatgtccgccactgcaaaaagcatgctcaatgagctgggaatcagggaccatgacgccagggtggagaccctttcaggaggccagcgcaagcgcgtggccctggcaggcgtgctcatgagccgggcggagctgctgatactggacgagcccaccaaccatctggacagcgccatggcggactggctggaggattacttaaagaacttcaggggcgcccttctcatgattacccatgaccgttatttcctggacagcgtggtaaacaggattgtggaactggaccagggaaagctctacggctatcagggaggttatgaggcgttcctgaggctgaaggcggagcggctggagatggcagaggccaggtcgcgcaagcgccagtccatcctgcgcagggaaatcgcgtggatccagaggggcgccagggcccgttccaccaagcagaaggcgcacatccagcgatatgaggaactgcgggaccagacagggccggagtatgaccggaatgtggagctggaatccattgccagccgcctgggccgcaccacggtggaggtaaaggacctttgcaaatcctatggggacaaggtcctgatgaaggactttacctacattttcctaaagagcgaccgggtgggcatcataggcccgaacggaagcggcaagtccaccctgatgaaaatcatagcgggctgggtacagccggattccggtacggtggagatagggcagaccgtgaagatgggatatttttcacaggaaaatgaagccatggacgaaagcctgaaggttattgattatatcaaaaatgcagcggagtatgtaaagacaaaggacgggagcatcagcgccagccagatgctggagcggtttttatttccctcccatatccagtatacggccataagcaagctgtccgggggtgagaaacgcaggctttatctgctgcgcatccttatggaggcgcccaatgtgattcttttggacgagcccaccaatgacctggatatccagacgctgacaatcctggaggattatctggatacatttccggggattgtgattacggtttcccatgaccggtatttcctggaccgtgtggtaaaccgcatctttgcctttgagggacagggcagggtgacccagtatgagggcggcttcacggattaccagaggacggccaaagcaggggaaagccaggcaggaaaccgtgcggatacaggggaaaccctgacggccggaggcgccgccaatacgccggaggcccaggatggaaaccaggccgtgaagcggaataactggaaagagggccagaacgtcaccaggaagctgaagctttcgtttaaggagcaaagggactgggagaccattgaggaggatatcgcgggcctggaagcagcggtggaagaactggaaaaggaaatcatccggtcctccagcaattataccaggctcaatgaactgatggctgaaaaggatgcaaaggaaaaagaactggaagaaaaaatggagcgctggatgtacctgaatgagctgatggaacagattgaagcgcagaaataa

SEQ ID NO: 85 - DNA, 3915 bp, unclassified Clostridiales
atggattccatgccggctggtttcttccgctgttcagcggaccgggaaagacgggtggattttgtgaaccggggcatcctggagcttttcaggtgcgcggatgaggatgagtttaatgcgctgaccggaagcaggctgggcgggatgatcctggataaagactatcatcatgcaatctcagagtgcaggaagcaactgagggagggcagggagctccttaagacggagttccgtattgtccggaaggataaaagtacctgctgggtggattgccgcggccgcatcattaaaggggatgagggacaggtctggctgtatgccatgatgctggatgacacggaggataaggaccggatctgcacctacagggagaagtccagaagggacccacttacaggactcctgaaccgggaagcttccagggaacggatatctgaattcctggaagcggatgggaaggacgggatgacggccgcccttatgattgtggatttggataattttaaggaagtgaacgataccaagggacatctgtttggggacagcgtgctgaccgaggcggccggatgcatgaaccgtgtgtccaggaaaagcgatgtggtggccaggattggcggggacgagttccttgtttttcttgccggtatgggaagccgtgaagaggtcagggcttatgcagaccgaatcatggaggggatgtccgggatttccgctgccggtgataacccccttgagctaagatgctgcatcggcgtgtccatgtatccggagcatggaaatgggtttgaccagttgtttaccaaagcagatatcgccctttattccggcaaaaagactggaaaaggaaaatgtgtgttttatgaaccctccctgccttcggtggatgtaaagaagtgggaggcattttcaggacgcgtacctgcaattgattccgataatggcccgatatatgggagcgacaaggtaatccactatgtttttaaggcgctgtatgaatcagaggacacccgcaaggccatcaacaccatccttaagattgtggggcttcagttcaatgtaagccgtgtctatatatttgaggacagcctggacgggctgttcatgagcaatacctttgagtggtgcaaccagggaatcagtccccaaattgataatcttcagcatatgtcttacgaagaggatgcgccgggatacagggataattttgacaaggacgggattttcctgtgcatggatgtggatgaactccatccggtgcagagagaggtcctgtcctcccagggcatcaaggccatcctccagtgcgggatttatgacgatggacgcctggtaggttttatcggttttgacgagtgcagggaaaacaggcgctggaccagggaacagatatcggtccttacctatgtggcccagattgtgggaaccttcctgttaaaggacagggtccagaacatactgatgcagaaactggaccaccttcagagcgtgcttaacgatgtgacggaatcgcggagcgggaaagaagcggcgtcagaggactatgatgggcttaccaacctgcttacggtaggggcatttgaacggcagatggaagaatacctgaaaacaggcccaaaaccggagcggaccgctgcccttttgctggatatggatgacttccacaagattaatgaggcccgcggcaaactgttcggcaatgtggtcctgatgaacattgccagctgcctgaagcgtacctgcagggagggggacctgattggacggtttggaggggatgaattccttgtgctgttaaaggacacggacatgaaggacgcattaaggacagcgtcactgatggtccgggaaataagcagtatgcttgacagcagcgggtacggaggtatgacggtggggtgcagcattggcggccggatgattgctgaggatgaaaaagggttttacgatatcatggtaaaggcggaccaggccatgcaccaggtaaagaaggagggcaagggcggggtcaggttctatgagtctgtaacggataaagaggatgacatatttacctatgagcgcctgaaggaactgaatgataaaaagctgaaggagcaaagcagtctgcagggaaagaccagtaccgcggttgccctggaggtatttgagaaaacctcttcttttgaggaggcgctgcatatcctcatgggctttatcgccagccggttccgccttaaccgtattgccgtttacatgaactgggaaagggaaggggcgggacacagcgccttccagtgggtggatgacaggacggccatgctctttgacccttcggacacattccggcaggaagaattttatctcagttataatctgtatgacagcgatgggattgccgtgctgaaccgggacaagctggaagtatacaatacaggcatgagaagaatcatggaccgggccagggcagggaccatgctgtttgcaggcattttcatggatggcaggtacgtcggtatgatggtgcttgtgaatacagaggaggtaagggagtggacgcggtctgagcggagcagcatatcggagctggctaaggtggtggggaccaatgccaggacgtccctgcgccttctggaagccagacagaaggctgaatattacaaaaacagggatatccttaccgggctgatgagttatgcctgttttaaggatgaatgccagaggatgatggatgaaggggcagatgggtacgtgatcattgccagcgatatcaagggattcaaattcatcaacgaggcagtgggttacacccagggggataatatcctgcgcatgttcgcagatatgctgacacagaacggacgggaggaaaaccgttacacaagggtaagcgcggaccagttcctgtgtttcggcatctgcaggatggaccgggttaaatttgttgggatggtccagcggttgaatgaagacttctgcaggatacagaaccagatgttcacgaatgtgaatatcatggtgcgttccgggatttatttcattgaacaggattgcagggagattgacgcggccattgacagggccaatatagccaggcggtcagtggattatatcatacagtctgcctcagtggtgtttaacgacggtccatttgacagcggcttccgggaacatgaaatcatcaaccggatggaatatgccctgaagcaccaggagtttaaggtatacctgcagcccaagctttggctgaaggaccaaagtctggccggagccgaggccctggtccgatggcagagggaggacggcaccgtcattgcgccgggggagttcctgccgctgtttgagaagaacggtttcatttcccagatggatttaagcattttcaggcaggtatgcaggaaactcagggaatggctggacaagggggtgcgccctgtctgtatttcccttaacctttccagtgtggatatccagatggaccatatcctgtccgacatcatggaggggacacgggagtacgggattgaccacaggttcctggagtttgaactgacagagacagcattcctgaaagacacggagcgcaccttccacgtgatgaaggaacttcgggacagcggttttaccacctccattgatgattttggttcagggtactccatcatgaacatgatggcggatatccccagcgacgtgatcaagttggactgcggtttcgtacagtcctgccggaatacggaaaggggcagggaattcttaaggcagctgatccagatgaccaacaagatgggttttgtttccctgtgcgaggggattgagacaaaggagcagctggatatggtgacggagatgggatgttccattgggcagggctactatttttcaaagcccattcccatggatgatttctttgaaaagtatttgaaaagtttttattaa

SEQ ID NO: 86 - DNA, 1152 bp, unclassified Clostridiales
atgggagaatatatgttagaacaaaaggtaaaactgctgtgcggaccgggaaaggcaagtgaaatcggctccctggccgcaaaactcggcaagaaaaaagcccttcttgtaacggataagggaatcgttgcaacaggaatccacaacagggtggtggattcactggaacaggcaggcgtcaactgtgttgtttttgacggcgtggttcccgaccccactgcccagaatgtggcggatggatataagatgtgcgcggaccaccagtgcgacctggtaatcggaatgggcggaggaagccccatggacacctccaaagccattaacctcctgcgctttaatccggaacccatactcaggtatgcagaccctcagacctccatggagcctgctccgggactgattgtaatccctaccacctcaggcacgggaagtgaaatgtcagacggtcttgtaatcagttcagatggcgtaaagcaccccatccttgccccggcagccggcgcacagtatgctgtcattgacccggaacttatggtggggattcctcccaggctgacccaggcaaccggattggatgccttgagccatgccatggaaggctatacctccacggccgctgacacggccacggacatcatcaacgaatccctgatgcgcaccattgtggaatggcttccaaaagcagtggaaaacggcggggacgtggaggccaggcagcagatggcagtatgtgcgtccatagccggatggatgctccagtattcccataccaatgcaggccactccattgcccacatccttggttcccattaccacatcccccatggcgaggcgtgcgcctatgcaaccccctgggtactggaattcaatgcagccgccatgcctgaccgggtcatgaaaatcggccgcatactgggcgcatcctttaaggggggtgagaccccggaggaaatcggcgccattgccagggacgcgttcatccatttttgtgatgtgacactgggaaaactggatatcaccagatacgaagtggataaagccacattttcctcagccgcggacgatattgccggagaactgttccaggtatttaatcccaggaaaatggagccggcggatgcccttgatatcttaaataagatatttgcctga

SEQ ID NO: 87 - DNA, 1797 bp, unclassified Clostridiales
atgccgggattagttcctaaagaggatgaaaggagtaatagtatgaagattattttaccggacggaagcgtacaggaagcagaggatgagttaagggccatccgccacacagcatcccacgtgctggcacaggcagtgaagaggctgtatccggagacaaagctggcaatcggaccagccattgacgacgggttttactatgattttgacagggagggcggattcacccctgaggatttggagaagctggaagctgagatgacaaagattgtaaaggaaaatcttccggttaagccatttgtgctgccaagggatgaggcggtcaggttcatggaggaaaaggccgagccgtataaggtggagctgattgaagacctgcctgacgaggagaccatcagcttctaccagcagggcgagtttgtggacctgtgcgcaggaccccatatcatgtatacaaagggtgtaaaggcatttaagcttaccagtattgcaggcgcttactggagaggaagcgagaagaataagatgcttaccaggatttacggtactgcatttgccaataagacggatttagagaattatcttaccatgatggaagaggctaaaaagcgcgaccacaggaagctgggtaaggaactgggcctgttcatgtttgctgaggaaggaccaggtttcccctttttcctgccaaagggtatgactcttaagaatacactgattgactactggcgtgagatccatctgagggaaggataccaggaggtttccacccccattatcctgagccgtaagctgtgggagaattccggccactgggatcattacaaggataatatgtacacaaccgtcattgatgaggaggattatgcggttaagcccatgaactgtccgggcggcatgctggtgtataagaaccagccccactcttaccgcgacctgcccctgcgcgtaggcgaactgggcctggtccaccgtcatgagaagagtggccagcttcatggactgatgcgtgtgcgctgctttacccaggacgatgcccatatctttatgagggatgaccagattgaggatgaaatcaagggtgttaccaggctgattaatgaagtgtatacacagtttggattcgaatattttgtggaactgtccacaaggccagaggattccatgggatctgacgaggattgggagatggctacaaacggccttaaaaaggcgctggaggatatgggccttgagtatattgtcaacgaaggcgacggcgcgttctacggccctaagattgacttccacctgagggattccctgggcaggacatggcagtgcggcactatccagctggatttccagatgcctcagaggttcaatctggagtatacggcggaggacggttccaagaagcgtccgattatgattcaccgcgtatgctttggctccatcgagcgctttatcggtatcctgattgagcattttgcaggtaagttcccggtatggctggctcctgtacaggttaaggtcattcctgtttctgaaaagtccatggagtatgcagcaggcgtatatgagaagctgaaggcagccggtatccgtaccgagttagaccacaaggatgagaaggttggatataagatccgccaggcccagcttgaaaaggttccttatatgctggtgctgggtgagaaggaagcggcagagggcgccatcacggtcagaagccgggataagggagatttaggcgctgccggacttgaggatttcattgctgatatcaagaagatggttgcggcaaaggagaaataa

SEQ ID NO: 88 - DNA, 4539 bp, unclassified Clostridiales
atggattccaaacagaaacaaccaggactgtacgacccgcgttttgagcatgacaactgcggaatcggggcagttgccaatatcaaaggcatcaagacccatgagacagtcaatcaggcactccacatcgtggagaatctggaacacagggccggcaaggacgccgagggcaagacgggcgacggcgttggcatcatgctccagatttcccacggcttttttgaaaaggtgacacggcctctcggcatccaaatcggaggcgagagggagtatggcgtgggcatgttcttcttcccccaggatgagcttgcccgcaaccaggcaatgaagatgttcgaaatcattgtgaagaaggaaggccttactttcctgggatggagggtggtccccactgccccggatatcctgggtgagagggctgtggaagtgatgccctatatcgcccagggctttgtggcaaaacctgtccaggtaaagcctggcctggattttgacaggaagctgtatgtggcgcgccgggtgtttgaacagagcaacgaggatacgtatgtggtctccctgagcagccgtaccattgtgtataagggcatgttcctggtgggggagttaaggcgtttttttgcggacttacaggatgaggattataggtccgccattgccattgtccactccaggttcagcaccaatacaaatcccagctggatgcgcgcccacccataccgttttatcgtgcataacggcgagatcaacaccatccggggcaatgcggataagatggctgcccgtgaggaaaacatggagtcggagtattttaaatatgacatgcacaaggttctgcccatcatcagccaggaaggctctgactccgccatgctggacaatgcgctggaattcatggtgatgagcggcatggacctggccctggccgtgatggtcaccattcctgccccctgggagtatgacaagtacatggatggcgggattaaggatttttaccggtattacgccaccatgatggaaccatgggacggccctgcctccatcctgtttacggacggggatgtgctgggcgcggttcttgacaggaacggcctgcggccttccaggtattatatcacggaggacggatatatgatccttgcctctgaggtgggggccattgacattgaccagacaaaggtggtgaagaaagaccgcctccgtcccgggaaaatgcttctggtggatacaaaaaagggtgaactggtggatgatgaacacctgaagcattactatgcgtcccgcaagccttacggcgagtggctggattccaacctgactgacatcaaggagctgccagtgcccaataagggcgtggctgccatggaggaggaacagcgcctgaggctgcagaaaacctatgggtatacatatgaacagtataagaccatgatcctgcccatggcgttaaacggggcagaggcagtgtcggccatgggcgtggacagtcccctggccgtcctgtcagccaagcaccagcccctttttaattattttaaacagctttttgcgcaggttaccaatccgcccattgatgcaatccgggaggaaatcgtgacctccaccaccgtgtatgtgggagaggaggggaacatcctggaagaacggccggaaaactgcaaaatccttaaggtggagaaccccatccttacggaaaccgacctgcttaagatcaagtatatgagaaagcccgggttcaaggtggaggaagtccctattacctactacaagaacacgtctttggaaagggccattgaccgcctgttcctggaggtggaccgggcccacaaggacggggccaatatcatcatcctgtctgaccgggatattgatgagaaccatgtgcccatcccgtcccttcttgcggtatcggccctccagcagtacctggtaaggaccaagaagcgcaccagcgttgcccttatcctggaaagcggggagccaagggaagtccatcattttgccgccctgctgggctatggcgcctgcgccatcaacccgtatcttgcccatgagtccatccgttccctgattcaatcgggaatgctggataaggattattacgcggctgtcaaggattatgacatggctgtgctccacggcattgtgaagattgcttccaagatggggatatccaccatccagtcctatcagggcgcccagatttttgaggccatcggtatttccagggaggtggtggacaaatacttcaccaatacggtcagccgggtgggaggcattacgctggaggatattgccaacgatgtggatacccttcattcatctgcctttgaccccctgggactggatgtggacctgaccctggacagcgtgggaagccataagtcgcgttctggccaggaggaacacctgtataatccccttaccatccatctgctgcaggaagctgccaggacaggaagttatgatacatttaaggagtatacggctgaggttgacagggatgacaagacctatcatctgcgctccctgatggactttaagttccctgaggacggaggaatccccttggaccaggtggagggcgtggattccatcgtgacccgctttaagacgggcgccatgtcctatggctccatttcccaggaggcccatgagtgcctggcggttgccatgaaccggattcacggcaaatccaacacgggcgagggcggcgagagcctggaacgtctggcgtcgggccaggggaagaacaataagtgttccgccatcaaacaggttgcttctgggcggttcggggtcaccagccggtatctggtcagcgccagggaaatccagatcaagatggcacagggcgccaagcccggcgagggcggacagctgcctggcaagaaggtgtatccgtgggtggcaaagacaaggcattccaccacgggggtcagccttatatcgccgccgccccatcatgacatatattccatcgaggacctggcccagctcatatatgatttgaaaaattccaacaaggaggccaggatttccgtcaagctggtgtctgaggcaggtgtgggcacggtggccgcaggcgtggccaaggcaggggcccaggtcatcctgatttcctcctatgacggcggcaccggcgcggcccccaggaattccatctataatgcagggcttccctgggagctgggcgttgcggaggcgcaccagtccctaatcatgaacggcctgcgcgataaggtaatccttgagacggacggtaagctgatgacgggcagggatgttgccattgcctgcatgctgggcgcggaggagttcggctttgccactgcgccccttgtgaccatgggctgcgtgatgatgcgcgtgtgcaacctggacacctgccccatggggattgcgacccagaacccggagctgcgcaggcgtttcaagggaaaaccggagtatgtcatccatttcatgaagtttattgcagaggagctgcgggaatacatggcggccctgggcgtgcgcaccgtggatgagctggtgggacgcacggaccttctgcgcccaaaggagggagcgcagggccgcggcggtaaagtggacctgagccgtatccttgataatccttacgcaggacagaaggtggcggggtaccatgagaaacaggcctttgattttaagctggaggacaccattgatgagcaggtttttgtaaagaaactgaaaagcgccctcggaagcgggcagaaaaagagcgtccaggtggatgtttccaatgtgaaccgtgcccttgggaccatctttggctcggaaatcaccaggaagtacccggaagggctggctgaggatacatttaccatcagctgcagcggaagcggcggacagagttttggcgccttcataccaaaggggcttaccctggaactggtgggggattccaacgattactttggcaaggggctttccggcggcaagctggtggtgtacccgccaacaggcgtccggttcagggccgaggacaacatcatcattgggaatgtagccctgtacggggcaacaagcggcaaggcgttcattaacgggattgcaggcgaacggttctgcgtgcgcaattccggtgcaaccgcggtggtggaaggcgtgggcgaccatggctgcgagtatatgacaggcggctgcgtggtggtgcttgggaccactggcaagaactttgcagccggcatgagcggaggcatcgcctatgtactggatgaggagcgcagcctgtataagcggttgaacaaggagcttgtatcctttgaggaagtgacgaataaatacgatgtgctggagcttaagggactgatccaggagcatgtggcctataccaattcagaaaagggcaagcgtatactggaccatttcagcgaatacctccccaggttcaaacggattgtcccccatgattaccgccgcatgatgaatgcaatcgtgcagatggaagaaaaggggctgaacagtgaacaggcgcagattgaggcattttatgccaatgtcagaggataa

SEQ ID NO: 89 - DNA, 2502 bp, unclassified Clostridiales
atgcagaaggaggctgtgtttcacaccgaaggtcctcttttgattcttgccggagcgggctcgggcaagaccagggtgctgacgcacagggtggcttacctgattgatgagaagaatgtgaacccctggaatatactggccattacatttaccaacaaggcggcaggggaaatgagggagcgtgtggaccagttggtaggttttggggccgagagtatctgggtgagcacattccattccacctgcgtaaggatcctgcgcaggcacatagaatgcctgggatacacgaccagcttttccatctatgacagcgatgaccagaagacattgatgaagcaggtatttaagagcctggacgtggataccaagcagtttaaggagcgctccgtgctgggcgtgatatcctcggccaaggataagctgatcatgcctgaggaattcctactgaacgcagggcaggatttccgccagaaaaaggtgggggagatatacaaggagtaccagaagcagttaaagaagaacaatgccctggattttgacgatttgattgtcaagaccgtggaactgttccagaataatgctgaagtgctgaattattaccaggaacggttcaagtatatcatggtggatgagtaccaggacaccaaccaggcccagtttaagctggtgaacctgcttgcggataagtacaggaatctctgtgtggtaggtgatgacgaccagtccatttaccggttccgcggggccgatatagagaatatcctgagctttgagtcagcatttccaggtgccaaggtcataaagctggaggagaattaccgatccacccagaatatcctcaatgcggccaacggtgttatccgccataaccgcgggaggaaggataagaccctgtggacagccaatggggaaggcagtctgattcggttcaagcagtttgacatggccagggaggaagcggattatgtggccagacagatacgtgacagtgaattttcctatcaggatcaggcagtgctctacaggaccaatgcccagtcccgtctcatagaggaacggtgcattttctataatgtgccttaccggctggtgggaggcgtgaacttctatcagcgaagggaaatcaaggacatcctggcctatctcaagacaattgccaatggcgtggatgacctggccgtgctgcgcatcatcaatgttcccaaacgcggtatcggcgcaaccaccatgggcaaggtgactgcgtttgcatctgagcacggcatgagcctctatggggcgttaaaggaagcacgtcaggttccggggctgggcaaggctgccgagaaaatccttaaattcatagggcagatggagagtttcagggccagggcagaatccgaggatttctccatccgggatttgatagaaggaatcatggatgaaaccggataccagcaggaactggaggcagagggcgagattgaggcccagacgcgccttgagaacatcgaggaattggtgaacaaggcggtaagttatgaggaggacagcgaacaccctactctggacgaattcctggagcaggtggcgctggtggctgatattgacagcatggatgagtccgaggaccgtgtgaccctaatgacgctccacagcgccaaaggcctggaatttcccaaggtatacctggtgggtatggaggacggcctgtttcccagcatgatgtccattaattcagatgaccggactgacttggaggaggagaggcgtctgtgttacgtgggcatcaccagggctaagaaggaactggtgctgacctcggccagacagcgcatggtcaacggcgagacaagatactgcaagccaagccggttccttgaggaagtgccggaaggactgttggacgaagaacgcctggagccggtgcttggaagctatggcagccgcgggaacggtgcaggacaggcaaatgcctcaggctttggcagtactgcagacgatgcagggcttccgtggaaccagtccgctgcctcaggacgggtaagcacatttggcaaagggtataatgcctatgcctcaaaaacatcgctgccatttgacggttttggcatcggtccggcaggacagggcagcggggcgggatctggtgtccaaggaaatggctccgccgctggcagcagcatgggggcgggatctggcgcaggtcatggtatgggcgcaggtcatgccggaaaggctggttatggcgtaggcggaggctgtactggaaaggctggctatggcggaggcgctggtcacgccggaactggtgggaaaccggcttttggcaaggcatttacggttgaaaagcctgcttccctgaattacagggaaggagaccgggtaaagcatattaagtttggggagggaaccgtcaagtccataaaggatggcgggaaagactatgaagtaaccgtggaatttgatactgcggggcagaaaaaaatgtttgcatcctttgcaaaattaaaaaaggcatag

SEQ ID NO: 90 - DNA, 1560 bp, unclassified Clostridiales
atgcagacgcctgcaattgaaatgaaaggaatcactaagatttatcccaatggtgtggttgccaacaaggatgtggatttcagtgtggattacggggaaatccatgccgttatgggggaaaacggagcgggcaaatccacactcatgaaaatgctgtttggattagaaaaaatagacaaaggtgaagtgctgtttgaaggcaggccggtccgtatcaacagcccggccgaggcaatcaacctgaaaatcggtatggtgcatcaggaattcatgctggtgccatcccttactgtgtctgagaacatgatgctgagggaagaaccaaaaaagggtatcttcatcaaccgggcaaaggcagtggaggaaaccaggcgtatcgcccggatgtaccagcttcccattgacccggacacccgggtggaggacctgccggtagggatgaagcagagggtggaaatcctgaaggccctgtaccgcggcgccaggatacttatactggacgaacccacagccgtgctgacgccacaggaaacagaggaactgttccggcagcttatcctgttaaaggaacatgggcacacagtcatattcatctcccacaagatccgtgaggtcaagcagatatgcgacaggatcaccatcatgaagaacgggcagtccatgggggtatatgatgtaaaggatattacggaatccgatatctcgcggctgatggtggggcgtgaagtcaagatggacctggaaaagaaacaggcccggccccgggatgtggtgttaagggtggagcacctgtaccatggatatggggaaggaaagctcaaggtgaatgatgtgagcttcacggtaaggagcggggaaatccttggcatagcaggggtggaaggaaacgggcagagggagctgctggagtgcatcacaggcctgcggcctatccagagagggaagatccggataaagcgccacgacgtatccgggatgtccatccgaaacatccgggatattgccaagaccgcgtatataccccaggacaggcttttgtttggcgttgccagcgaagccacgattaaggaaaaccttctggccaaccggctttcggaccctgaaatctccaaggcaggcattgtgaaggaaaagcagctgacccggaaatccagggagctgatccgggaattcaccgtgaaatgtgacagcgagaagcagaccgtggacatgctgtccggcggcaacatccagaaggtggtggttgccagggagctttccatgcccagggacctgattgtcattgaccagccttccaggggcattgacataggagccaccaaattcatacatgagaagatattcgaactaagggacagggacgcggccatccttataagttccgcagacctggcggaaatcatggaactcagcgattccctgatcgtgatgtatgaaggcgaaatcgcagcgtattttaaaagccttcagggaattaccgaggaaaccctgggagaatacatgctggggataaaaaagcagactccggaggaaataaaggaggcattttatgaacaataa

SEQ ID NO: 91 - DNA, 2055 bp, unclassified Clostridiales
atgacaagcagtgaactggccgggcggctgtccgtgagcacgcggacaatccgcagtgacctggacgtcattgaccggtggctggctgaattttcacatgaaccggtggtgagggtgcctggacttgggatacttttaaatgacagcgatggacgcatccaaagggaactggaggagccgggcacaggcgtatatataatgtcctccagggaacgggtcaggtccattaccggctggctgctgacagaggaaccatccaccagcattgccgggattgcggacaggcttcaggtaagcgcggccacggtttccaatgacctgcagaaggtgaaaacgtggatgaaccagttctgcatccacatgatatccaggccccacacaggaattgccgtacgggattcggagagcaatatacgccggggatgtgtcatgcttcttcgtgaaatgctggaaaccgggacgcaccagcaggatctgatcggcatgaggttcatccaggcggaaaatgtgctgagaaaatacaggatggacgctctttgtgaagcaatcagcatgtggagggaggacatcctgttccttatacggcaactgcaggagagcgcccaggtgaccatatcggataacgggttctgtgcaatgttcctgtatctgctcacagcgttctcacgcaggtacagggggtgcaggattagcgtgggaagacagaattacacacatatcaaggcgcagtccggctttgactttaccaggatacacgacctgatactggaccggaccggtctggacatggatgaggatgaaatgttctttatccatgcacagtggatgtccctgcgcaagttcggctcgtcccaggacatcaatgtggaaaatgtcctcattgccaaagagctgattgcagaggtaaaggattccctggagctggagtttgaggaaggggatgacacggtgctggagctggccacccatctgagcgtcatgcagtaccggctgttcctcaatatacctgcggaacataacgcggcgctgacagagatagaggagaccttccctgacgtgtgccaggtggtacgggagaagctgtggtccatactgcggatgcgcatggaacatgtaaaccgggaggtatgcagtaaggaggctgtctacatttccatgtatatcgtggcctgcatcctcaagaacccgctggaggatgccgcaaagaaaaacgtgattattgtgtgcaacagcacggttgccacgtcgcggatactggaaaaccgcctgggggccatattttctaatattaacgtggtcaaggccatttcttaccatgaatttgtcaattcccctgagcccctgccctgtgacctgattatctccaccctgcctttagagagcagccactatccgtgcatcacggtgaaccccttactgaaactggaggatatcaataagcttatgggaatgttcatgctgcgtatgcagaacgtggacctgaataaatatatcagcgcaaccatcaacatcgcggcccgttccctggaactgaaaccagaggagcgcatcaagctgtcaatcgagctggcaagggatatcaaggatgaggtaaaagggctggacaaaagcaggaaacctgccttaaggaatcttttggatgagtccctgattggggttaaggtccatgctaaaaactgttatgatgccattcagatagcgggaaaccttctgaaggaccagggatatatcacacagaagcacatagatgaaatgatacgcatcaagcgcaggctgggcggttacatggtcattgacaggggcgttgcccttccccatctgctggcgcctgaactgcccgggccctgcatgagcgtcatcaccctggacaaaccggttaaattcaaccatgcggaaaacgacccagtaaaactcatcgtcatgctgctgtccaaccataacacggcccatatcaaggtgctggaggaactggtggatgtgctgggggacgccgggaagcgggaagccatagaggcagccgcaagcgcctacgagcttttaagcatcataagttaa

SEQ ID NO: 92 - DNA, 1893 bp, unclassified Clostridiales
atgatgaatgacaggaagatgggagacaaggtgaaccgccattacgcaaggacggccaggcggctgatgggatatgtggccagtacgtacaagttacagtttgcctgtgtccttgtggccataatcataagcgccctggctaatgtggcaggcccgctgttccttatggtgctgattgatgatttcatcacccctcttatggggcagcagggccctgacttcacggcccttaaccaggccatggccgggctggccgctttttacgtggcaggtgtcatctgtacctatatctacaaccgcctgatggtcaacattggccagggcgtccagaagcgggtgcgcgacgagatgtttgagcacatgcagacgcttcccatccgttactttgaccagcatccccacggggagcttatgagccgctataccaatgacatcgataccctgaggcagatgatcaatcaggccctgcccatggcattttcatccctcataaccatcctggcaatatctgcggtgatgataagcatcagtatcccgctgtccgtcctggcagcggccatggtcctgcttatgctgttcatcagcaggacgctggcaggacggtgcggcaaatactttgtggcccagcagctggcaatcggccgtgtgaccgggtatattgaggagcgcctggggggacagaaggtaatcaaggtatttaaccacgaggcccagaccatggaagaattcgacgcgctgaacaacaagctgcgtcagagcgcgttcaatgccaacaaatacgccaatgtgatcatgcctgtcattaccaacatagggaacctgcagttcgtgctgaccgccattacgggaggcatgctctccctgtgcggcctggccagcctgaccctgggccagatcgcgtcctacctgcagttcaccaaaagctttaaccaaccctttgcccagatatcccagcagtccaattccatcatcatggcgctggccggggcggaacggattttcaatatgatggatgaggagccggagccggatgaagggtccgtgaccctggtcaatgcgcgggtggatggaaagggaaccataactgaggcggcggagaggaccaatacctgggcatggaaatatcccaacagcgacggcacgtacacctatacaaaactgtgcggggacgtccggttcgcggacatggattttggatatgaccccaggcacatggtgcttcacaatataagcctttatgccaagccggggcagaagctggcctttgtgggggccacgggcgcgggcaagaccaccatcaccaacctgattaaccggttttatgacatacagaagggctccattacctatgacgggattgacataggtgaaatccgcaaggaagacctgcgccgctccctggggattgtccttcaggacacccatctgttcacagggaccatcatggagaatatccggtatggcaggctggacgccacggacgaggaggtgtacggggccgcgagactggccaatgcggaccagttcatacgtatgctgccccagggctacggcaccatgcttacaggggatggggaagagctgtcacagggccagcgccagcttctggccattgcgcgggcagccattgcggacccgccggtgctgatcctggatgaagccacatccagcatagataccaggaccgaggccctggtgcagggcgggatggatgaactgatgaagggaaggaccgtgtttgtcattgcccaccggctttccaccatccgcaactccgatgccatcatggtactggaccacggcaatatcgtggagcgcggggatcatgaaagcctgataaaggaaaaggggatttactatcagctgtacacaggagggctggagctggattag

SEQ ID NO: 93 - DNA, 2754 bp, unclassified Clostridiales
atgacagcaggcctggccgcggtcctgctttgcaccaatgcaggcggagccgtgccggcatatggcgcggaggcggctgtggatgtggatgagaccatgtatattaacctggactattacggaaggccggataagattaatgtggtaaaaggcttaaaccttaatggcaggacggaatttacggactacggcacctatctggacgtaaccaatatgtccaaccagacagtccctgatttgggggacgggaccgtgacctggaatttcccgcaggcccagaaggagcgtttctattacaaatgcgcccttgataaaagccagataaccctgccatgggattttgatgtgtcctataagctgaacggcgtccccacggacggcgataagctggcgggagcgtccggcctggtggagattaacattaaggcggagcccaatgacaatgcaggggaatattaccgcaacaacatgatgctcatggtagctgtgcccgtggacatggggaaatgctacagtgtggaagcagaaggctcccagacccagaatctgggggagacaaccgccgttgtgttcacggccctgcccggtgaggatggggactacacggtgcgtatcggcacggacagttttgagaccaccggggtcatcatggcaatgatgccgggcacggtggaggacttggagcatatcaaggatttaaaggaagcaaaggatacatggcaggatgccggggatgagctttatgacagcctggaacagatggccaggtctgtggaagacatgcgccagggcgtgggccaggtgcgcacaggcctggactcagcagaaatcgcaaggcagaaatggagcaattccaaggacagcatcctggcggggaatgaccagaccctggcttccctgacctctgtgtcacagcagctggaaaccatgataccccatcttcagacagccaaggaatctgcggaagtaatccacaagagcatgggcgatatcgtaaataccatgggggagatgcaggacccattaaggaagctgcacacccggctgaataacatcaagagcagtgcggaagggatttccggaaatatcccggaactcatggacctgatgcagcagattattgcccttgatgcccagctgcaggcaagtgaacaggtttatgtaacaggaattgcaaccgctggttcaggaatcagccttctggatgaggaagaactggaggaacaggcaaaccgctcccatgggaacaaggctgggagcagcggatctggccagactgcttcaggtggggcggataccggcagcgcagacagcgccaatgacaagggcaatcaaggcagccagggctcagatggggccgggaatacagacaataagaccgaccatgggaacagccagggaagcgcaggaacagacgggaaggataaccagggaagcggaagtacggacgggaaagataaccagggaagtggaagcacagacggaaaagacaaccagggaagcggaagcacagatggaaaagacaaccagggaagcggaagcacagacggaaaagacaaccagggaagcggaagtgcggacgggaataccagccagggaagcggaagtgcgggcggaaaagacaaccagggaagcggaagcacagacgggaaagacaaccaggaaagcggaagcacagacgggaaagacaaccagggaagcggaagtgcgggcggcaatgacaaccagggaaacggaagtgcggatgggaataccagccaaggaagtggaagtgcggatagcaatgccagccagggcagcagcgttacggcaaaagccagccagggcggcagcgttacggcaaaagccaatcagggcggcagtgtaaccgcaaaagccagccagggcgtcagtcttacagcaaccgtcagtgcagctgccggtgcggactccggttccattgcaagagcagggctttccggcacatcaaagccaggaagaccggcgtccattgaaaggcacaatgtacctcttgtaagcgccccagaggtcccggtggatatgcagacgctgatggaactgttggcaggcagacagtccatgctgatggatatatccaagaagagcagtgatttatccagcctcatgtccaaccttatggacgacacttcagactccgccaaatacagtgcggaaatcgtggataacctggatatcctcattgaggacctgaccgcgctccatgattcgctggacacctattatccggatttacaggatgccctggacgattccaaggaactggtggccaggacaacggaagcactcaacaacggcatcagcaccatgaccattgtccagaacaccttaaaggacagcagcgatgactttgacgcggctgcacgtgaaagcctgcggggcagcatggagcttttagacaagagtctgagcatatttgacagtaccactgccatgcgccaggccggacgcaccatgaaggacaccattgacaatgagctggataaatttgacacggataaccggttcctgttcatggacccgtctgcggaaaaggtttcatttacatcagataagaacagaccgccaaagacgctgcagatagtcctgcggaccgatgaaatcagcgtggatgacgatgatgccaagacagtggacgcagaggtggcaaaggcaaaagaaagcccgctgcgcaggatgtggaatgtgctggtccagatgtggaaggcaatggtaagcatttttaaaaacaggtag

SEQ ID NO: 94 - DNA, 1689 bp, unclassified Clostridiales
atgagccttgcggcagtggtttttgcggccgcaggcgtattgtggggctgcggatccggcgcgggcagggaggcatcggcaaccatggctgcacagtcaccccctgccgccaacacctatgccgccaaggccgcggaaaccatggctgccatggaggccgcagtacccggtccggtcatggatgacggttccatgccggaagacggtgaaggaagcccgatggtggcccacaacacggaggagtaccgctataacccggaaaatccgttcatggcagtgtcaggtgcgcccctgtccacctttggggcagatgtggatacggcatcctatgccaacatccgcaggatgcttctgggaggaagcccggttccggaagatgcggtgcgcattgaggaaatgcttaactatttctattatgattatccggaacccaaggaacaggaaccgttttccgtaaccaccaggctggcggaatgtccgtggaatcagccccacagcctgcttcagattggacttcaggctaagaagctggatgaggatgcgctgcctgcctccaatctggtattcctgctggacgtatccggatccatggatgccccggataaactggatctggtcaaacgtgcatttctcacgatgacagagaacctgaaggacggggattccgtttccattgtcacctatgcgtcatcggataaggttgtgctggacggcgcgtccggcagtgacaggaccaggatcatgactgccattgaaaaccttgaggcaggaggaagcacggcgggttccaagggtattaagaccgcatatgaactggcggagaagcatttcataaagggcggcaacaaccgtgtcatcctagccactgacggggacctgaacgtgggcgtcaccagtgagggcggcctgacacgcctgattcagaagaaaaggaaaagcggcgtgtttttatccgtcctgggatttgggaccgggaatatcaaggataacaagatggaggccctggcggataacggaaacggacaatacgcctacatagacagcatggctgaggccaggaaggtgctgatggaagagatgggaggaacccttttcacggttgccaaagatgttaagttccaggtggaatttaatccggccaaggtaaaaggataccgtctcatcggttatgagaaccgggtcatggctgaccaggactttgatgacgatacaaaggacggcggggaaatcggcgccggccaccgggtgacagccctttatgaaatcatcccggccggttccgctgatgcgctgccgtccccaagccttaagtaccagcaggcagctggaacggcggctgataaaacagatgatgggacagaccatgaatcagaccgtgaaacagcagaggccccttcctttaacgatgaatggcttaccgtgaaaatccgctataaggatccggactccgacaaaaacagcctgcttgaatatccggttaaggatgactgctactactccgagatgcccgaggatatggactttgcttcctgcgtggctgaaacaggactgttattaaaacattcggaatacgctggggatgcatcctatgggtcggtcatcggcaggctgcaggatatgaagcgtgtaaaggaagacgattatagcggggagtttctttatctggtgaaaagggcggccggatattga

SEQ ID NO: 95 - DNA, 2568 bp, unclassified Clostridiales
atgacgtcaatggaaaacagtaaaaagaaaaatcctacaacgcgcttcctgataggcagtttcattgggcttttaatctttagtatcatcatgttcagcctgcttggaatctacatgggcagaaaaagtaaaaatgcggtttacgaaattgggaaaatctatatgtccggaatgaatgaacagatgtccaggcattttgaaactgtcattaaattgcgttttaatcaggtcagcggcattgtttccgttgtccccatggatacggacgataaagatacgctatatgaggaactgatttaccgggcgcaggtcagggaatttgactatttagcactttgttctgcagagggggatttccagacactttacggacaatcaatacagccgcttaacccaaaaccgtttgtagaagcattaagacaaggggaacaaagagtggctgtcggcgttgattctgctggaaatgaagtggtattgtttggcgttgacgctgcttaccctatgcacaacggccaaaggagcaccggcctgatagcagccgttcctctggaatatatcacggatttcctctcattggaggatgaaggacagctgatgtattatcatatcatccggccggacggcagttttgtcatacaaaatcccaactctgaattgtggtatttctttgaacagctgcaaaaccagcctgactcggcagccaatgaatcatcttcaggaaatccggtcaaagcactgggcgcagcgctaaaaaatcatcaggaatatgctgcaacattggatgtaaatggtgaggaacggcaggtttatggcatatcactgccctattctgagtggtatctggtatcggtaatgccttatagtattttggaccatgtcataaacaacctggacagccagcgtatgttcatgacattgctgtcctgtgcctcgattttaatcatcctgaccttgattttccttcggtatttctccataacccgctcccaggtccatgagttggaaaaggcccggcaggcagcgcttgaagcaaacaaagccaaaagtgaattcctggcaaatatgagccatgatatccgtacacccatgaatgcgattgtaggcatgaccgccattgccactgcccacatagatgaccggaaacaggtacggaactgccttaggaaaatcacattgtcaagcaagcatctattaggactgatcaatgatgtcctggatatgtctaaaatcgaaagcggtaaattaacgttaacaacagagcagatttcactgaaggaagttgtggaaggaattgttaacatcatgcagccgcaggttaagaccaagaagcagacctttgacatacatgttgaaaatatcttcacagaaaatgtgtggtgcgacggcatacgcctgaatcaggttttgctgaacctcttatcgaatgcaacaaagtatacgccggaaggaggttcaatacaattatccctctctgaggaagcatcccccaaaggggaaggccatgtccgaatccacatcaaggtcaaggataatggaattggcatgtcgccggatttcctgaaaagaatctatgaatcctacagccgtgcagatggagccaggatacataaaaccgagggcgcgggtttgggaatggcgattacaaagtacattgtggacgcaatggaaggaaccattgatatacaaagcgaacctgataaaggtacggaattccttctcatgtttgattttgaaaaggctgctgccatggaaatggatatggttcttccctcctggaacatgctggtggtggatgatgacgaattattatgtaagacagccatggaagccctgaaatccattggaataaaagcagaatggacattaagcggggaaaaggccattgaactggtaaaccaacgccacaaaaagagggatgattatcaaatcatcctgttggattggaaactgcccggcatgaatggtatccaggttgcaaaagaaatccggcgtaatctgggtgatgatgtgccaatcctgctgatttccgcctacgactggagtgaatttgaagcagaggcccgtgaagcaggtatcagcggttttatctccaagcccctttttaaatccacgctgtatcatgctttgcgtcagtatatggattctgaaacagaacatgaccagacatcggaccaggatatcaacctgtccggacgccgtatcctgcttgccgaggataatgagcttaactgggaggtggcaagggaattgctgtctgatctgggcgtggagctggattgggctgaagacggccggatatgtgtggacaagttccaaacctcaccacagggctattatgatatcatccttatggacatacggatgccccatatgacaggatatgaggccacacaggcaatccggggactggatcacccggatgccctgtctgttccgattatagccatgagcgcggatgctttttctgacgacatacagcattgcctggattgcggtatgaatgcccatatagcaaagcccattgatatcatggaattgacccgcctgttaaaacggtatttcgtatga

SEQ ID NO: 96 - DNA, 2196 bp, unclassified Clostridiales
atgaaagacaggatttttggtgtacttcagcgcgtgggacgaagcttcatgctgcccatagcagtgctgccggttgcaggcctgctgcttggtatcggcagttcatttaccaacccaacaaccattgccacctatggactgggcaggattctgggagatgggaccattctgaacgccctgctggtaatcatgagtaaggctggaagcgttatatttgacaatctgcccatcatatttgcagtgggtgttgccatcggtatggccaaggcggagaaggaggttgccgccctttctgccatgatagcgttcctggtcatgcatatgtcaatcaatgcagtgcttactatttcaggaaaaatacttccggacggaagtattgcgccgggggttctggacggaaccattgcatctgtatgcggtatgcagacccttcagatgggagtgttcggcggtatcatcgtgggtctgggtgtggcggcccttcataaccgttatcataagattgtgcttcccaatgcgctttcatttttcggcggttcacggttcatccctattatctccaccgtggtatatctgggagtgggaatcctgatgtattttatctggccggcggtgcagaacgggatttttgccctgggcggactggtgacagggacaggttatgtgggcacgctgatatttggcatcatcaaacgcgccctgattccatttgggcttcaccatgtattttatatgccgttctggcagacggccgtgggcgggaccatgatgatagacggaaacctgattcaaggcggacagaacatattctttgctcagctggcttctccggatgtggtacatttcagcgcggatgcaacccgttatttttccggcgagttcattttcatgatattcggacttcctggcgcagcgctggccatgtaccggtgtgcaaagccggataagaaaaaggcagccggcggcctgcttctgtcagccgccctgaccagtatgctgacaggtatcacggaacccattgagttttcattcctgtttgtggcgcccatgctttttgcggttcaggtagtgttggccggaagcgcctatatgattgcccatatcctgaacattgctgtgggactgactttttccggcggtttcctggatttgcttatattcggtatccttcagggaaatgcaaaaaccagctggctatggatccttccggtggggatcgtttatttccttctgtactacttcattttcagcttcctgattaaaaagttcaaccttaagacccctggccgtgaggatgaggacgaagagacaaagttgtatacaaaagccgatgtcaatgccaggaaagcggcttctgtcagcggtacgggtaaggataatgaacccgtggaccagttaagcgcagagattgcaagaggtctgggcggcgccgggaatatcacatccgtggactgctgtgcgacccggctcaggtgttcggtggacgaagcggatttagtaaatgagaaagtattaaagacaacaggcgcggtgggcgtcattaaaaagggacagggaatccaggtgatttacggtccgaatgtgacagtgataaaagcaaacctggaacatttcctggaacatgcgcctaaggtgaagctggacgcaggcaatgacgaaagcttggcaggcaatagcggtgatacgaaaggcccggaaggcggaagcggtgatgctgccagggagaaagccggcaggagtccgtctgacatccatgtcctttgttccccgtttaacggaaaggcggcgtcaattaccgaggctgcagatgaagccttttccagtaaggctatgggggatgggtatatggtcatcccgtcggacggagaggtggttgctccggaggactgtgagattgtgtttgtgttcccgtcaaagcatgcaatgggccttaggaatgcagacggcatggaatatctcctgcatgtgggcgtggacacagtgaagctggacggcaagggatttgagacctttgtgacagatgggcagaaggtgaagaaaggaagcagactcatgcattttgacctggatttcatcagggccaacgcggcgtctgaagcctgcatggttgtgttcacggggctgaaggaaggccaggagatacatctgaccaggaccggggatgtgaagggactggatgagattggatggtattag

SEQ ID NO: 97 - DNA, 2133 bp, unclassified Clostridiales
atgaacaaattggtgtttaaatcaaaaaaagtcagacaggcaatccgtatcctggcctttggcacaggattcatcgtgatgctttccgctgtcttttttaccttgttccgcatatttgagcgcatcacctatgactccatttcagacctgaaccgggattttgccatccagattgatacactgaccgagaccattaattcctccattgtcaactatgggatgcagcttttctattccaatgcagttaagaccatgatgggcgctgcctcattttccaatacggaccgtgtatacatgaccagggatttaaatacatccctaagttccacggaatttgccgggtccatcatcatccataacggatatacaaaccgggtctactccacggacccgtcctttccggaccagtccattgatacctacaggaacgcgcagatccgggaactgctgacgaaccgcaccaatgagaaccgttttaaacccatttactgccatgaggagaaacctgaaagccgggagttttataccttcatgttttatgagatcaatcccgatggctcccccaagcccagcaccctgatcattaccgtaaaaagcgaatggtacaaacgggccctgctggcttccaatccggcctcagacctgattgtcatcaataaaaggggggatgtgctggtatcggcaagtgattcgctccttgaaaaatatttggactattatccgtttatcacagtggaaaaaaacagcgggtattttatcaataagcagaaaaaggaaatctgcatgtattatgaatccctgaccaccggacacacctatatgaagatttcctccctgtccaaggccctgccccgtcttttatacttccggcagattgttgtgtattttatggttacgttaatctctgtctttggctgcgcactgcttgtcctcctgatttacgccctgatgcccatgctgaagatgaaggatgccatcaccaccatcaacaagttcctggaaggggatgaggcggatatcccggacaccccgccccttccgctgaaagaacagattgatgccgtagtgtccaagtccgagcgcaccagcctggaacagattttttatgacatgctggccggtaagctctcactttcctctgcacggctgtttaaggatatggaaggcccatttgggcttatgctgatacatgcccttcacagaaaggacatctatggactggtggaaaagcagcatcctgagctggtggtcaccaaatcctcccatatttatgcgtgtatcggcatctaccggtccaaggaggattaccacggcctggccctatgcctgtcgggaacactggactgccgcctgtttcaaagcgtcctgttcacggactttgacagcctgccgctacatttctccaacctccatgaactgcgcaggttaagcctggtgctgggaccggaggagcggctgattccggaggaggcgcttttctcaaaggctttggccaacaccgtgaccacccgggattttacggacctgattgtgcgtcttaagtccggcagcctggatttaagcagggcaaaatggcaggaaatccgcagcaccattgttaactacaggtatgatgacttccagtatgtccttaaccgggccgaggataccatctgcagtatattaaacgaattttcgtcagacctgttaaaggacagccagaaactgctgccggagtccctggagcagataaaggacctggacgtgatagaccaggcgtttgaccgtgcatttgtggccatctgcgggaattacagtgaaaaaaaggcggaaaaatactccgaactggcaaaacagattaaaggcattgtccaggagaactaccatgacagcagccttaactcccagcgcattgcagatatgatccagatgaacaacgcatatctgggacggatgtttaaaaattcctatggccgttccatcaatgactatatcaatacctgccggctggaggaaagcatgcgcctgctgcggcagaccgacatgtcggtggaggagattgcccagaacgtggggttctcgaatattaagtacttctatgtgctgtttaagaagcttacgggaatcacgccggcaacttaccgggccggatga

SEQ ID NO: 98 - DNA, 2310 bp, unclassified Clostridiales
atggtatcattatatgaaggcggtatttacctggtaaacgggaccgggattgttccggaaacagaaagcgggaaagtgaaagccctgaccggcagggaagcggataaggaagctgccagaaagggaaccattgcatattccattcttgaggcacacaacacatctgacaatatggaacatcttaagctccgttttgacagcatggccagccacgatatcacatttgtgggaatcgtgcagacagccaaggcatccgggatggagcggtttcccattccttatgtactgaccaattgccataacacactctgcgcagtgggcggcaccatcaacgaggatgaccacatgtttggcctttccgctgccaagaagtatggcggtatctacgtacctccccacattgcggtcatccatcagtatatgagggaaatgatggcaggctgcgggaagatgattcttggctctgacagccacacgcgctacggcgcgctgggaaccatggcagtgggcgaaggcggcggtgagctggtaaagcagctgcttcaggatacatacgacgtggcctatccaggcgtggttgccgtgtatcttgacggggcgccccagccgggcacaggacctcaggatattgcccttgccatcataggagccgtgtttaagaatggttatgtgaagaacaaggtaatggagtttgtgggaccgggcgttgcttccatgtccacggattaccgcaatggcgttgatgtgatgaccacggagactacctgtttaagttccatctggaagacggatgaggataccagggattatcttgcaaaacacaaccgggcagaggattataaggagttatccccggctgatgtggcatattacgatggctgcgtttatgtggacctgtccacggtaaagcctatgattgcccttcccttccatccaagcaatacatatgagattgaggagctgaaggccaatatgcaggatatccttgcaggggttgagaaggaagcagccaggatatcaggtggcaaggcaggattcacccttcttgacaaagtgaaggacggcggtctgatggtacagcaggcagtgattgcaggctgtgcaggcgggacctacagcaatgtgatggaagcagcccatgcactgaagggtaagaactgcggatgcgatgaattttcactggcagtctatccttcctcacagcccgtgttcgcagaccttgtgaagaagggggctgtgtctgacctgatggatgcaggagccatcatccgcaccgcgttctgcggcccatgcttcggagccggggacaccccctgcaacaacgggctcagtgtccgccataccaccaggaacttccctaaccgtgagggttccaagccgggtaacggacagatggcggcagtggcgcttatggatgcccgttccattgctgccacggcggccaacggaggcaggcttacatctgcctgggagatggactgctggggcaatgtgcctgagtatgggtttgatgacatttcctataaaaaccgtgtgtacatgggctatggaaacggggatacaaataagaaccttatctatggtcccaatattaaggactggccggagatgagtcctctggcggataacatcctgttaaaggtatgttccaaaatcatggacccggtgaccaccaccgacgaactaatcccatccggcgagacctcctcctaccgctccaatccactggggctggcagagtttaccctttccagaagggaccctgggtatgtggggcgcacaaaggaagtggatcaattagaaaaagcaagggtccgggaaggcgctgacagggaactggagctggagccaaggcttaagaatatatttaaggccatcaaccagattgagggcaatgaacaggtgacggcaaaggatacggagattggcagcatgatttatgcagtgaagccgggtgacggctctgcaagggaacaggcggccagctgtcagcgggtgattgggggccttgccaatatatgtaaggaattcgcaaccaagcgctatcgctccaatgtgatgaactggggaatggtccccttccagatggaggctgatcctgagtttgaggtgggggattacatctacgtccccggcatccgggctgccctggacggtgatttaaagaacatcaaggcttatgtccttggggacggggaaacgcaggtgccggcaaagacattggatttatatattacggatatgaccgcggaggaacgggagattgtaaaggcaggatgcctgattaattataaccgcggcaggcactga

SEQ ID NO: 99 - DNA, 1248 bp, unclassified Clostridiales
atgctaaataacgtcaagaaaaacgtatgtacatcatttccatttctcagctccggccaccactttaaccatacgcaggagatattcgatacggtccagaccatgaacataagccagacattgaatttttccatcctgctcatccttatggagctggccaacctgatcagctactgggccgtggacattaaaaaacggcttatctcccccacaagcttcgccatcgtgatattcctcctatacatggtgtttaatatattttactgcgattatctgctggggctggaacgcagcggacggaccaggaagctgctccagtgccacacctattcctttaccatcatgttcagcgtattctgcctgtgcatgaactacttctgcctgaaaagcaggatgagtgcggaaagcgtgctcatgttctatatctacctggcggcaggccctatctatacgtataaggaagccctggcagccgttgtcaccaccggagcgctggcccttccttcttttgttgcccagaaagcgcctgtggccatgtactccaacatgttcctatacagctttaccagcctgttcctgtcacagatgcgctgccgcatcacgggaaacaacctgaggcttttaaaggaagcctggaacgaacagatatatctccaggaccgggctgacaatgatcccctgacccaggtccttaaccgcagcggtttttccatccggctggaacagctgatccccgctgccatccaactctatgtgcccatcgccgtcatcatggtggacatcgactatttcaagcagtacaacgacaccttcggccatatggccggggacgaatgcctgaaaaaggtggccgcggccctggcatcccgcatccaccagggcagggatctgatctgccgtttcgggggcgaggaattccagatccttctgtatggaatcaagccagaggacgccctccatgcggccgaccgcctccgccaggccgtggccgacctgaaactgccgtccgctgacaggcgtacggctccctatgtcaccatcagcgtgggggcctccagcgcggtcccctcctccatggagacatataacggcatgataaaggcagctgacgatgaactgtattacgccaagaatcacggcaagaacatggtgtccttccgggaaatgcctcccgaaaaggaatccgtcccaagttccgtatccgtaacccgctgcgtagccatatcatgcgagctgcccagattttga

SEQ ID NO: 100 - DNA, 1137 bp, unclassified Clostridiales
atggagaatctggatttacaggaaatcaggggacagctggatgggattgattcacagctggtagaattatttgagagaaggatgaagctgtgcggggacgtggcggagtataagattggaacaggcaaggccgtgtatgacgcggcaagggagaaggaaaaattagggaccgtgaccggtatggcccatggggactttaacaggcagggcgtttacgaactgttttcacagatcatgaccatcagccgcaggctgcagtatggtatcctggcagggcatgggcagtgcctggataccgggttcaccatggtgcaggaactgaagcgggatcattccaggattgtgtaccagggcgtggagggggcctacagccatgcggctgcccttcagtactttggggatgacgcggatgtatatcatgtgcccagctttgaggatgccatggtggaagtggaagaaggccgggcggattacgcagtcctacccattgagaattcctccgcaggggctgtcagcggcaactatgataatctggtcatgcacaacctgtatattgttgccgagacccaggtctctgtcaaccacgcccttctgggacttaagggggcggtcctttcagacatcaaaagggtgtattcccatccccaggcgctgatgcagtgttccaggtacctgaatgccaacaggcagtggacccagttcagcgtggagaacacggcaggcgctgccaagaagatattggaggaccaggacattgcccaggcagcggtggccagtgagacagcgggaaggctttacgggctccaggtccttgagcggggcatcaatcacgataaggacaacaccacccggttcatcatcctgtctaaatcccctgtttacagaaaggacgcaggtaaggtgagcatctgctttgaaggtttacataaaagcggctccctgtataacatgctggggaacctgatttataacaatgtgaacatgctgatgattgaatcccgccccattgtgggacgaagctgggagtacaggttttttgtggatgtggagggttccctgggagatgcggccatacagaatgcattaaaggggatttcagaggaagccgtaagcatgcggatccttggcaattattag

SEQ ID NO: 101 - DNA, 684 bp, Bacteroides faecis
agaaataaaatgatacagattgaaaacattagtaaagtatttcgtactactgaagtagagacggttgcattaaatcacgtgaaccttgaagttaaacaaggagagtttgttgctatcatggggccttcgggctgtggaaaatccactttgttgaatattctgggtttattggataaccctacagaaggttcttaccagctgatgggagaggaagttgccggattgaaagagaaggagcgtacccatgtccgtaaaggcaaattaggctttgtattccagagtttcaacttgatagacgaactgaatgtctacgaaaatgtagagcttccgcttacttatctgggtattaaatcctccgagcgccgccgtatggtggaagatattctgaaaaggatgaatatcagccatcgggccaaacactttccgcaacagctgtccggtggtcagcagcagcgtgttgctatcgctcgtgcggtagtgactaatccgaagcttatccttgccgatgagccaacaggtaatctggattcaaagaacggagcggaggtaatgaatctgctgacggaactgaataaagaaggtaccaccatcattatggtgactcactcacaacatgatgcgagcttcgcacaccgtaccatacatctgttcgacggaagtgtagtggcaagtgtaacagcataa

SEQ ID NO: 102 - DNA, 726 bp, Bacteroides faecis
atggaagaagcattaattcaatataggaacgtagaaatccatcaacaggaactctgtgtgctgagcgatgtaaatcttgaattgcgcaaaggagagttcgtctatctgatcgggaaggtaggttcgggaaaaacgagcctgctcaaaacactgtatggcgaactggacgtgatcgacggtgaagcggaagtattgggctataatatgcgttcaatcaaacgcaagcatatccctcagctgagaagaaagctgggaatcgtatttcaggactttcagctgctgacggatcgtaccgtatacaacaacctggaatttgtacttcgtgccaccggttggaagaacaagcgggaaattcaggaaaggatagaggaagtgctcgatttggtgggaatgtctaacaaaggctacaaactccccaatgaactttccggtggcgaacagcagcgcatcgtaatagcacgtgccgtactcaattctccggctattattctggcggacgaaccgaccggaaatctggatgtggagacaggcaagtccattgttgaattgttgcacaacatctgtgaatcgggttcttccgtggtgatgacgacgcacaatctgcaattgctgaaagaatatcccggcagcgtatatcgttgctccgagcatcgcataacggatgtgaccgacgaatacatgcccaggcagagaacaatagaaatagatttaaatatagataactaa

SEQ ID NO: 103 - DNA, 681 bp, Bacteroides faecis
atggaaatggatgtaaaccggttggtggaagaatatgggaatatgatttccacgattgcacaccggatgattcagaataaagaaatagcccgcgaagcggcgcaggaagtgtggtatgaactttgcaaaagtttccatagttttaaaggcgattcggaactttctacatggatatatactattgcccggcgtaccatcggcaggtatgcggaaggtgaaaggcagatgaagatgaccgaggtagaatatttccgttcgttgcctgaaatcgaatattccggtgaggaagaggcaaagcgggaatggataaaggaaagatgcgactggtgtattactgctctgaatcattgtctgaataatgatgcccgactgatttttatctttagagaaaatgtagggttgccctatcggcaaatcagtgcgataatggaactgaaagaaagcaatgtacggcaaatctataaccgttcaattcaaaaaatcactctttttatgaatgatacctgtccgttgtataattccggtggtacctgtaagtgtcgtatttgtaaaccggtacattccattgatatggataaggaatacgcaatagtgcagagaatgatgaggctggcagatttataccggaaatttgaaaaagagttgcctcgaaaaaattattgggagagatttttgctgtaa

SEQ ID NO: 104 - DNA, 702 bp, Bacteroides faecis
atgaaaaaagtattattagtcggtcttttggctgtcgccggagtaagcgtaagtgctcagaatctgatcaagaatgaaaagtttgctacggaagtaacgaataaggttaccaaccctaacaaggctacagcaggtgagtggttcatcatgaataatgaggcagacggtgtgacaaccatcgcttgggaacaaaccggggatgccaaatatccgaatgccatgaaaatagataattcgggtgcagaaaagaatacttcctggtataaagcttttctgggacaacgtattaccgacggcttggagaaaggtatctatgtgctgactttctatgcaaaagtgaaagaagcagggactccggtcagtgtatatatcaagcagacgaatgaagaaaagaatgataacggtaagctgaacactaccttctttatgcgtagagattatgatgctgatgctcagcctaatgcttccggtgcacagtataacttcaaaatcaaggatgcgggcaaatggacaaaggttgttgtttactatgacatgggacaggtggtgaatactatcagcagtaagaagtccaatcctgatatggaagtgtctgatacggatgatgatgctgctatcctgaaggattgttacgtagctatccttggacagaataaaggtggggtagtagaaatcagtgacgtgactttgaagaagaaataa

SEQ ID NO: 105 - DNA, 810 bp, Bacteroides faecis
acccccattcgacgtacacttaaaacattaaaaacaatgagtaacaaccatacatctatccacgatttcgattttacacttatatgtaattacttcaaatcactcgaacgtcaaggtcccggaagtcccgaagccactcaaaaagccctgagttttatcaacgagctatcggaaaaatcacagatagccgacatcggctgtggtaccggcggacaaaccatcacactggcagagtacaccaaaggacaaatcacaggcatagaccttttcccggactttattgaaatattcaataaaaatgcggcaaaagccctttgctcggacagagtgaaaggaatcaccgggtcgatggatcatctcccgttccagaacgaagaactcgatcttatctggtcggaaggagctatctacaacatcggattcgaacgtggcatgaacgaatggaacagatttctgaaaaagaacggtttcatcgcagtcacggaagtatcctggttcactccggaacgtcctgccgaaatagaagatttctggatggatgcttatcccgaaatcaatacgattcccgcaaaaacagctcagatggaaaaagccggatacatcccgaccgcccatttcattctaccggagaagtgctggacggaacacttctatgccccacaagtttcgcttcaagaggcatttttgaaggaacacccagagaataacgcagtcaaagacttcattgccaatcaacggtatgaacagagtctgtatcataagtataaagaatattatggctacgtattctatataggacaaaaaagataa

SEQ ID NO: 106 - DNA, 1173 bp, Bacteroides faecis
atgttcacaagacagttacaactaaatgtaaataaaatgataaaacaatccatctccgctttcatactggcttccttgctattactggtaagttgcgtatcaaacaagaagacttctctcgaagcattcaatcaggatatatatacaccggaatatgcttccggatttaaaatattgggtgcagacaacgttcaaagcaccctgatacaagtattcaacccgtggcagggagccaaagatgtagaaatgtcttacttcatatcacgaaatggcgaacaggcacccgccggattcacaggtcccaccattcctgccggagcaaaacagattgtatgtatgtcttcttcctacatcgccatgctcgacgcgctgggacaggcagaccgaattgtagccgtatcgggcatcgactacgtatccaatccgtatatcattgcgcacaaagactccattaaagacatgggtccggaaatgaattatgaactattgctgggcctgaaacccgacgttgtattgctatacggcatcggagacgcacaaaccgctgtaacggacaaactgaaagaactctctataccttatatgtatgtaggcgaatatctggaagaatcaccgctcggcaaagccgaatggatggttgccctgtccgaactgacggacagccgtgaaaaaggaatcgaaatattcagcgaaattccgaaacgctatcagacattgaaagaccttacggcatcggtagagcagcgccctaccgtaatgttcaataccccctggaacgatagctggataatgccttccaccaaaagctatatggcacaactggtaaacgacgcaggagcagactatatatataaggagaacacttccaacagctccgcccccatcggactggaaactgcctacggactgatacaaaaagctgactactggattaatgtcggcatggcttctacactggatgaactgaaagccgtcaatcctaaattcactgatgcgaaatccgttcgcgaaaagactgcatacaacaacaatctgcgactgaccgctaccggtggtaacgagtactgggaatcggcagtagtacgtcccgacatagtactgcgcgatctgattcatattttccaccctgaacttgtatccgactcactctattactacaggcatctggaatga

SEQ ID NO: 107 - DNA, 657 bp, Bacteroides faecis
atgaagttttttattgacacagccaatttggagcagattcaggaggcgtatgacctcggagtacttgacggagtgactaccaatccttcgctgatggcgaaagaaggcattaaaggtacggagaatcaacgtgaacattacattaagatatgcaagattgtcaatgctgacgtgagtgcggaagtaatagcaacggattatgaagggatgatccgcgaaggggaagagcttgccgcactaaatccgcatattgttgtaaaagtgccttgcattgccgatggtatcaaagctatcaagtactttacagaaaaaggaattcggacgaactgtacactggtcttttccataggacaggcattgctggcggcaaaagccggagctacctatgtttctccttttgtcggacgtctggacgatatttgtgaagatggggtagggcttgtcggcgatatagtacgtatgtatcgtacctatgattacaagactcaggtattggcagcttccatccgcaatacgaaacacattatcgaatgtgtggaagtgggggcagatgtggctacatgtccgttgagtgccatcaaagggctgttgaatcatccgttgactgattcaggactgaaaaagttcctggaagattataaaaaggtaaatggataa

SEQ ID NO: 108 - DNA, 1434 bp, Bacteroides faecis
atgatagagttgactcaagaggaattgaagcagcattttagcgaaccgattttcggacagatagccgaaacagccgatgcactcgaattggagtgctatgtagtaggcggttacgttcgtgatatttttctgcaacgtccctctaaagatatagatgtagtagtagtaggcagtggaattgcgatggcggaagcacttggaaagcgattgggacgtggtgcgcatgtctctgttttcaagaatttcggtacggcacaagtgaaatataaaggcacggaagtggaatttgtaggcgcccgcaaagagtcttatcaacgggactcacggaaacctattgtagaggacggaacgctggaagacgaccagaaccgccgtgattttacgattaacgcgatggctgtctgcctgaataaagcgcgcttcggtgagttggtagacccgtttggcggcatggaggacatgaaggaaaagaccatccgcacaccgctcgacccggatatcacgttcagcgatgacccgctgcgtatgatgcgctgcatccgttttgccacgcaactgggattctatatcgacgacgacactttcgaatcgctctgccgtaataaagaacggattgaaataatctcccgtgaacgcattgcggatgaactgaacaagataattctttcgcccatcccttcaaaaggttttgtagaactggaacgaagcggactgttgccgttgatttttccggaactggctgccctgcaaggtgtagaaacacggaacggcagatcgcacaaagacaacttttatcacacactggaagtgctggacaatatcggcaaaaagacggataatctctggttgcgctgggcagcgttattgcacgatatagccaagcctgcaacgaagcgctgggagcctagagcgggatggacgttccataatcataattttatcggtgagaagatggttccgaatatcttccggaagatgaaactgccgatgaatgagaagatgaagtatgtgcagaaaatggtcagtttgcacatgcgccccattgtgatagcggatgatgtggtaacggattccgccgttcgtcgtctgctctttgaggcgggcgatgatatcgacgacctgatgactctttgcgaagcggatatcacttccaaaaatatggagcgcaaacagcgttttctgaataacttccaactggttcgccagaagttgaaagatctcgaagaaaaggatcgggtccgtaatttccagcctccggtgagcggggaagagataatggaaactttcggcttgcagccttgccgggaagtcggctctctgaagagtgcgataaaggatgcaattctggacggagttatccctaacgagtatgaagcagctcacgcttttatgctggaaagggcggcaaagatgggattgaaacctgtgaaatga

SEQ ID NO: 109 - DNA, 639 bp, Bacteroides faecis
atgagaatagcttatttatcatccgcctacctcgctccagtagaatattacaccaaattgctggaatatgataaaatatacatcgaacagcacgaccactacatcaagcaaacttaccgcaaccgttgtacgattgccggtcccgacggtgaattggcactctccatcccgactgtcaaacctgatacattgaaatgtccgatgaaagatatacgcatctccgatcacggcaactggcgccatctgcactggaacgccattgaatcagcgtataacaacactcctttcttcgaatattataaagatgatttccgccccttttacgaaaagaaatacgagtttttgatcgatttcaacgaagaaatatgccgtttggtttgtcagttgatagacattcagcccaatatagaacggacttcagcatataaaatggaattcagtgcggaagagactgatttccgtgaaagcattcatcccaagaaagacttccgcacaactgatccggaatttagcccgcaaccatattaccaggtcttcgaatccaaactcggctttctacctaatttgagtattattgatctgcttttcaatatgggaccggaaagtctgctggtattaaagaaaccgacccgcctataa

SEQ ID NO: 110 - DNA, 555 bp, Bacteroides faecis
ttatcgttaataatgaaaaacttcgcagctatcgactttgaaacagccaacgataaacgcaccagtgtatgtagtgtaggaattgttattgtaaggaatggaaaaattataaacaaaatctatcgtctgatccgtccccgccccaattactatactcaatggaccacagctgttcatggactgacttacagtgatacagaagaagcggaagactttccggaagtatgggctgaaattaagccgctcatagacggtttgccacttgttgcccacaacagtccttttgatgaaggctgcctcaaagcagttcatgagttatacgagatgacttatcccaattataagttttactgtacctgccgtacttcacgaaaagtatttgggaaagaacttcccaatcatcagttgcacacggtagcagcacggtgcagatatgatttgaccaatcaccaccacgccctggctgatgccgaagcttgtgcacagatagcgcttcttatcattcccgaaccgaaaaaggttaaagttgacctgcacaccggaaacctgttttaa

SEQ ID NO: 111 - DNA, 852 bp, Bacteroides faecis
atgatacttattgcagacagtggctctactaaaaccgattggtgtgtcgtactcaacggcacactgatcaaacgaatcggaacgaaagggatcaaccctttcttccaatcggaagaagatattcaacgagaactgaccatttctctccttcctcagctaccggaaggaaagctaaatgcagtctatttctacggagcaggttgtacagctgaaaaggctccggttctccggcgtgccatcgctgacagtttaccagtcatcggtaatataaaagcaaactcggatatgttaggggcagcccgtggattatgcggacatgagaagggaattgtctgtattctgggtaccggctccaattcctgtttttataatggagaagcaatcgtaagtaatgtctcaccactaggtttcatcttaggcgatgaaggaagtggggcggttttaggaaagctattggtcggagatattttaaagaatcagctccctgcccaattaaaagaagagtttctaaagcagtttgatctgacagcacctgaaattatcgaccgggtttaccgtcagccataccccaatcgctttttagcaagcctttctccttttcttgcacagcatctggaggaaccgggcatccgcacaatagtgcttaacagctttatcgctttcatccgcagaaatgtgatgcaatatgattatacacagtatcctgtgcgttttatcggctccgttgcttattgctacaaagaaatactccaggaggcggcaaaagaaaccggtatcggaataggcaagatacttcaaagtccgatggagggattgatagcatatcatacttctgccaaccacttgctatag

SEQ ID NO: 112 - DNA, 627 bp, Bacteroides faecis
attatgacaacaactaataacaatgaagatgtggagaaaaagatagttgaggctgccaaggaactatttatagagaatggttttgcggaaaccagtatgagtgatattgctgctaaagttggtatcaacagaccggtgcttcattattatttcagaacgaaggataagatgttccaggccgtttttggcaacatcatactttcttttattccccgaatacatgatatcatcattcagcaggacaaatctgtttccgagagtattggtgaaattgtagatgcttattataaagtatttactgaaaacccatgtttaccattgtttatggtgagagaaatgcatcgtgatatggaccatttaagtactacgatcaaagagttacgtttggaacaatatctccataagattatggatgttttgcaggaagaaatgaatggtgggagacttaaaacagttcctctgccatttgtgttttatactttttatagcgcattgacagtaccctttctgacaaaaaatcttagtgcttctttctttttggagaaggaggatacttttgaggatatacttgttcagtggaaaccttatatagtcaggcagatggaagcgttactggtagtaggttag

SEQ ID NO: 113 - DNA, 636 bp, Bacteroides faecis
atgggattgtttttgcaacataaaacgaaagatatacactgggctatttggaagatggaagagtctcaggaaagcttattgactcttcttcctgctttccggagaatttcttgtgagcaagagatgcagcgttttacttcagaacgcaggaaaatggagtggttatctgttcgtgtgcttctatattccatgttgcaggaagataaagagattatctattcatctgaagggaaaccttctttgggtgatcattctttttttatcagtatttcgcataccaaaggatatgtggctgtgatactaagtccgattgctcctgtgggtatcgatatcgaacaatatggtcatcgtgtaaaaagagtgtatgatcgttttatccgtcctgacgaacaagtagaaccatatttgggagatgtaacctggagtatgctgttacattggtcggcaaaagagacgatattcaaatcaatggagaatgcagacgctgatctccggaaactttgtttgtcacacttcgttcctcagaaagaggggacatttcaggtacaggaatatgctacggaacaacaacagtcgtttgcagtgggctatcgcatctctccggattttgttctgacttggactatcatcaaataa

SEQ ID NO: 114 - DNA, 456 bp, Bacteroides faecis
atgaatatcatttctcttaaagactcacctcaatatttagaaaaagctattgcctatttccaaagtaaatgggctaatgaaaacacgaaaatggtgtatgacgattgtttcagacattctctaaaagccgaaaatcccatacctcaatggtatcttcttatgaatggtgatgaaattgtagggtgtgcaggacttgttagcaatgattttaattctcgtatggatttatatccttggttcgtttccttattcattgaggaaaagtacagaggaaataactatgccagtcttttaatagaacgggcaaagaaagatacacaaaaaatcggtttttcgaaattatacttaagtaccagtcatacttcgtattacgaacgattaggcttcacctatatcggagattgttggcatccttggggagaaagttctcgtgtatatgaaatcattctaaaataa

SEQ ID NO: 115 - DNA, 393 bp, Bacteroides faecis
atgcttcacaaactatttatacctattttccgttataataataaaagagttgctattctcggaaatatccgaaggaaaataaaaaaacagtatcattttatgcaggaatctaccgacaaattcaagaatgaggagttaatactccgcgattatctggctattgaaagaacaaagttggccaatgtacgaaccttgttctcttatatccgtacttcactctatcttcttactgccggaatcggaatatttcagatcgaaagtatatcccgtctggacggtctcgcatgggtatgtgtcgcaaccggagttatcttgttcattctgggcttcatccgttattttcaaatgggtaaacaattgaaggggtatgtaaaacagtcccattgtgattag

SEQ ID NO: 116 - DNA, 723 bp, Bacteroides faecis
atggttcgttgtattcatagtcctttcaccgatatttacttccatttggcggcagaagaatatctgttgaagcagggagctgatgatgtttttatgctttggcaggatacgccttctgtggtgatgggcaaacatcaacgtgtacagtcggaagtggaccgggagtgggcggaactgcaacagattcatattgcccgtcgattttcgggaggaggaacggtatatcatgatttgggcaatgtcaatttgacttttattgagacagtgtcccgtctgcctgatttcaagacatatcttcatcgcgtattggaatttttcgtttcaattggcttaactgccgaaggagatgaacgactgggcatctatctgcatggcttgaagatatcggggagtgctcaatgtgtatataaaaatagagttctgtatcattgtactttactctatgatacggatatgaccatattgaataaggttttaaatccggaaggaaaaatagaagaaaaagaatcagtgcctgtatatgccgttccttctgtccgaagtgcggtcactaatatttccaactacttgcctatggagacgattgaggatttcaaaaagactgttttccaatattttagtaaggggcaatcggctgttgctttcaatgaatgggagctaggggttattgacaaacttcggaaagaaaaatatatccgggacgaatggatattcagccgctga

SEQ ID NO: 117 - DNA, 1569 bp, Bacteroides faecis
atgttaagaaagatacgtatcggaatgtcagtggtcctttttgcactgattactttttattttctcgattttgcggacattttgccgaatagctttcatcggttggcacatatacagtttgtccctgccgtgctatctctcagcataggcatactgattgtactgattgcattaaccctgttattcggacgtatctattgttccgccatctgtccgatgggaatattgcaggatgtcatagcacgtatttcaaagtctacgggaaaaaagaaaaaaagatataaatacagtcctgcaaaaaatatactgagatggacagtactcggagtgacagttattgcttccgtatgcggatttgtagcagtattgggactactggacccgtatagtgcttatggacgtatcattgtacatatctttaaacccgtatacatgctgggaaacaatctgctggagtctatattttccagattcgataattacacattttatcaggtagatacctcgatagtaagtctttcttcccttctcatagcgataatgacctttgcagtcattatgatattggcatggaaacacggacgtacgtggtgcaacaccatctgtccggtaggtacagtattgggactgctgagccgttattctttgtttaaagtccgcattgatactgcgaaatgtaatggttgcgggctctgtgctaccaaatgcaaggcagcctgtattcataataaagagcatacgattgactacagccgttgcgtagattgtttcgactgcctcgaagcttgtaaacagaaagcgttggtttatgcccctgctttaaagaaacaacagttatcatctgctgtagaaaatccaacttcgacaacagcagagcaatcttcagctacagcagactcttccaaacgccgtttcctgcttgccggattagccactgccggagcagctcccaagcttctttcgaaagtacaggaatccattgcgactatggaaggcaaaacagcatacaaaaaagaaaatccgattacgcctccgggatctgtcagccagaaacgttttcagcaacattgtacatcctgccatctttgtgtcagcaaatgcccgtcgcatgtattgaagcccgctttcatggaatacggactaggaggcataatgcaaccgactgtcagtttcgaaaaaggattctgtaacttcgactgtaccgtatgtggtgatgtttgtcctaacggtgctattcctccattaacggtagagcaaaaacatctcactcagatgggatacgttgtctttatagaagaaaattgcattgtccttacagacggaaccagttgtggagcatgttccgagcattgtcctacgcaagccattgctatggtaccatacaaagacggattgaccatccctcatatcaatacagagatctgtgtcggatgcggtggctgcgaatacgtttgtcctgcccgtccgttccgcgctgtatacattgaaggcaatcctgtacagaaagaagcaaaacctttcaaagaatcagaagaacataaagtcgagattgacgatttcggattctag

SEQ ID NO: 118 - DNA, 627 bp, Bacteroides faecis
agatcgttggtgaaaggggaggagtgtatttgtaccctgtgcaatttgaatttaccgcgtacaaattaccatcttcgagaagataatccggtagaacgccttttctggggaagaattcctttagggcatgctacttcttttttcttttatcgtaaagggagtgactttcgccagattctccatcagcttaaatacggaggacgaaaaggaatcggtgccattatgggacgatacatggcgtccgaactgcttgcatccgggttctttcagggaattgatgtgattattcctgtccccctgcataagaaaaagcagcagattcgtggctacaaccaaagtgaatggattgcacggggaattaccgctgtaacgggaatccctgtagacacagaaatgatcgtacgcagaaaaaacacggaaacacagactcacaagtcagtctttgaacgctgggaaaacgtggatggtatttttgaattgcaccatgttggtgcattagccggaaaacatattctgcttgtggacgatgtgttgactacaggagccaccactgcagcttgtgctgcctgtctggcagagattgagggaatacatattagcatattaactttggcaattgccgaataa

SEQ ID NO: 119 - DNA, 489 bp, Bacteroides faecis
atgaaaaagaatcagtaccttatgtctttgttgctggtgatactgctcagcagttgctttaccagcagaattaattatgaaaaattgagtcgtatccaactcgggatgtcttctggaggggtgatagctattttgggtaagccaacttatcgaagttttgatgaaaaggaagaggtcttagagttttgctatggattaaatatcgcaaagatttggtttgttgatgacaaagtaactaagatgaagaattattatgactatgattgtaataaaattcggatcgtagaggataagaaagaagacgataaatcctcaaagaaagataaaaaagaagatacaagttccagaatacgtgtaacgacggatggaaagcatataatacagaccggttccatcatagtcactccggatggaaaacatgaaacagtggtaagtgatctgggtggaatcattataacagggtccggtgaacatatacatgttcattag

SEQ ID NO: 120 - DNA, 738 bp, Bacteroides faecis
atgaatatactgcgtaaactcattcttttcggttggatggcgatagcatgcacagctttcggcaaggatcgtaacgcagataaagtggaacgaccaaacaccaagaaagtaaacttcggcatcaaagccggatttaattcttccatgttcatggtgtccgagctgaaaatcaaagacgtaaccatcgacgaagtacaaaacaattataagatcggctacttcggcgcactcttcatgcgcatcaatatgaagaagcatttcattcagccggaagtatcctataacgtcagcaaaggtgagattgtattcgataagctcggctcgcaacatcctgccgtcgagcccgactatgcctccgtacaatccgttcttcacagcattgatttcccagttctctacggatataatgtagtgaagaaaggtccttacgggatgtcaatctttgccggtcccaagctccggtatctatggggaaaacggaatgaaatcactttcacaaacttcgaccagaaagggattcatgagaagttgtatccgctcaatgtgagcgccgtgatcggtgtcggtgtcaatatttcccgtatcttttttgacttccgctacgagcaagggataagaaacatctccaagtcgattgtttatgataacatcaactccgacggcagcacaggagtcagccatatcatcttccgccgtcgcgacagtgcattaagcttctcgttcggatttatcctttaa

SEQ ID NO: 121 - DNA, 258 bp, Bacteroides faecis
atgaagaaaataaagaaatcgacaggagttgctattgcattccttatttatgtatcagtaacggcggcctatttgttacctcgtaacacggaagtcagtcagacagagaagattcttacagtggtaggctcttatgctatcgttctcttgctttggctagtgcttcggaagaaggaacaaatgcgtgaacgccgtaaagaggagcaaatgaacgaaagtcgtaaaaaagacgaacaatctattcacttaaaaaagtaa

SEQ ID NO: 122 - DNA, 621 bp, Bacteroides faecis
tctaagaattatcatgtatatttgctaaatatgctaacagtattatatatgaatccattcaacgtaaaagataatacaacaatagatacaggaaaactggaaaagatatttctggaagaaggtatctgcaagaagctaaaaaaaaacgactatctgatccggcagaatgaaaagaacagtcagataggattcgtttcatccggcatcttccgcctgtcacacatcgatggaaacgccaatgaatggattgtcggctatagtttcaaagacgactttgtctgcgattacccttctttgatgagcaagacaaattctacagtcaacatacaagcatctacagcctgcgaagtttatctcctcacttcagacagacttaaccagttttgggaaacagacatggatactcaacgtctgggaagacaaatagcagaaaatatgtttgcagaaatataccagcgtttattaggtttttactgcgatactcccgaacagcgttatcagactctgatgaagcgatgtcctgatttgcaaaaacatctatccctgaaagaaatagcccagtttttgggaatcacctctgaaacattgagcagaatacggagaaaacagctatttaaataa

SEQ ID NO: 123 - DNA, 999 bp, Bacteroides faecis
atgcaattatatacaaaagaagaaacgatcggacaaataaatcagttgggacaatcccggcgaccctttctttttatcattaattatttgcaggatgcttcttacgtagaagaggtggagcgtgtcgactcttctgaaatattatatgatctgaatgggtttaccaaccagtcttctttgaataagtctgttgtgccttcagccctgaaagagtctgtatattggaattcatttccggaatctttcgaaagttatctgcgttcatttgatattgttcaacggaatatttttgcaggaaacagttttctgactaacctgacctgttgtactccgatagaaacgaatctcagtctgaaagatattttcctccgttcgaaggcaatgtataaattatgggtcagagatcagtttaccgttttctctcctgaaatatttatcagaatccaacaaggaaaaatctgttcttatcccatgaaaggaactcttgacgcctccttgccctcagctgtccggcagttgatggatgacccgaaagaggcagcagaacatgctactattgtagatttgattcgcaatgatttgagtatagtggctgatcgggtatctgtgtcccgatatagatatattgacgaattgcagacgaatcgtggaacgattcttcagacgagttcggagatacaaggaatcctgccggataattatctggaaaatctgggaaatattattttcagactcttgcctgccggttctatcaccggtgctcctaagacaaagaccatgcagatcatcagtgaggcagaaacgtatgaaagaggattctatacgggtgtgatggggtactttgacgggaataatcttgatagtgccgttatgatacgttttgtggagcaggagggagacaggatgtattttaagagcggaggtggaataacctgccgtagtgaagcgcaaagtgagtatcatgaaatgaaacaaaaaatatatgtgcctatttattga

SEQ ID NO: 124 - DNA, 576 bp, Bacteroides faecis
cagaaaagcaatattgtcaaacttaaaaacccaaaccgtatgatcagatttcaaccgattactacatcggacgtgcaacattacaaatttatggaagaacttcttgtcgaatcgtttccaccggaagaataccgccaactggagcatcttcgtgaatacacagaccggataggcaacttccataataatatcatttttgatgatgacctgcctatcggctttatcacatattgggactttgacagattctactatgtagagcatttcgccaccaatccggcattgcgcaacggaggttacggcaaacgcactttagagcacctgtgtgaacacctaaaataccccattgttctggaagtggaacgcccggtagaggagatggctaaacgccgtatcaatttctaccaacgccatggattcacactttgggaaaaagattactatcaaccaccctacaaagcaggagatgacttcctgcccatgtatctgatggtgcacggtaatctggatgcagaaaaggattatgaagaaataagacataaacttcacacagtagtttatggagtcaaagaataa

SEQ ID NO: 125 - DNA, 567 bp, Bacteroides faecis
atgaaaatattacttttagataactacgattctttcacctacaacttgttgcatgtagtgaaagaactgagagctacagacatcgaagtagcccgcaacgaccagatagaccttgatgaagtggaacgatttgacaaaattattctctcgccgggtccggggatacctgaagaagcaggattgttattgcccgtcatcaaaagatatgcaccgacaaagagtatcttaggcgtttgtctggggcatcaggctatcggcgaggcttttggcgcacatctggaaaacctgaaagaagtatatcatggtgtacagacaccgatcagtatcctacagaaagaggtactttttgaaggattaggcaaagagatacctgtcgggcgctatcattcctgggtagtcagccgggaaggttttccagaatgcctggagataacagcagaaagccgggaaggacaaattatggcactatgccataagacctacaatgtacatggaatccagttccatcccgagtccgtactgacgccacaaggaaaagaaattatcaaaaacttcttaaacgaataa

SEQ ID NO: 126 - DNA, 753 bp, Bacteroides faecis
atgaacagcaattataaagttggggatctaatttatgatgcgaatatttatgatggaatgaatactcacatagatgatttgcaattttacaagcggtggatgccccaaaataaagatgcccgtatacttgagctttgctgtggtacaggcagacttactattccaatagcagaagacggatataatattagtggagtagattacactttttctatgcttgaacaagcgaaagcgaaagcttccgaagcaggattaaagattgagtttattgaagctgatatcagaactttggatttgcagaataaatatgatctcatatttattccctttaactcaatccatcatttatatctaaatgaagatctgtttaaggcatttaataccgttaaaaaacatctcaaaacaggaggccggtttctactagattgctttaatcccaacattcaatatatcgttgaacatgaaaaaaagcaaatagaagttgctgcatatacaactaaggacggaagggagatattgataaagcagctaatgcgatatgaaagaaaaactcagatcaatcgaatagaatggcattattttattaatggtaaatttgattcaattcaaaatctggatatgagactattcttccctcaagaattagatacatacttagattggaatggttttaaaattattcataagtttggaagttttgaagaagaagcattttatgacagttcggaaaagcagatatttgtgtgtcaataa

SEQ ID NO: 127 - DNA, 852 bp, Bacteroides faecis
aaacaaatgaacattaagtttttatggtgctggtgcatcttttccttgctaagtattacttctgcattctctacttcacaagaatcagaaatactattcatagacggagtgaaatgggatatgctggcccaaccgattgacatagattccatacataacactaaattcagagaatttttgcccaaagagcgacattggacgactgcaaactgggacggatatacaggagtctgggaaataaagaataatcaattgtaccttcaaaaggtcattattgaaatatcggaaaaccatagcacagaaaagagagaagttaagggaatagattctttttttagtgaatataaaacagacgatggaatctttgctttctggtttagcggaaaagtacggttaggccggggtgatattatacgttttggtgccggaggtttcgacagaaactacatggaggagtgtgtattgactatcaaagacggtgttgtcacagataaagtgttttatcacaatagccgaaaggaagggatcaagctattacaaatcagagatagtctacaggcacatttcccttgggaaaagttccccgaaataagcggaaaaagacatattatctttttatctgatttcgatttatccgctgacggacactatatagacagcaatgtcaaaatccgactggataaagtcatgaccgaagaccagagccatccgataataacagccatcaaaaagaagctaaaagaaatctatccttgggaggttttatatattaatgggaaataccgtccggaatatcaacatttcactttccctattatcatcaaaagctcaaatgatgaaactcctgattag

SEQ ID NO: 128 - DNA, 795 bp, Bacteroides faecis
atgttatctacagtttatgcctccgcccagtctctacgaaaactgatggaaatgcctccccgtattattgaatcgaaatgggaacaaacttcagacggaggaacggaattaaactattacaacgaagacttgtgcagctattatctattccgcgaaaacgaccgttcgtacaatttgaatcccggaaagaacacggtattcagaatagaaaaaggctctaatgccagcaatccatttataggttcaagcagatatatgttcttccgcggacaattccccaaagattttcagatcagcactccctatgcactccctgttaaggccggcgaagaaacccaatggcaaatcgcccttcaggaatctgccaaaacaatgatattccgaattcaggaaggagacaccgtctatgcaacccgcagaggcgtcgcctgtgtgacagcactgccacagcaattgctgatataccaccccgaccacacttttgccgcttacctcatgatgcatcaaaacttcatccatgcgggtgaagaagtcatgaccggacaacccattgggatagccggagtactcggagtatccgtctcttatttttttcttgataacaataagtttaattcaaacggcccgttggggtatccatattcccattttacccctgtattccgtacggacaagggagatgtaaaactagaagagaaagcagtctataaatcagctatagatgacgagttgattatgctcgaaatgaccaaacgggagaaaaagaaatttcagaagcagaaatattcaaaatag

SEQ ID NO: 129 - DNA, 792 bp, Bacteroides faecis
atgaaacctatgtattacatgacaaaaagaaatttgctgactactatcggtatgttggctgtagtatcggcttttgcccagaaagaatatccctctcgtgcgccaatgacccctgccatgtcagagtattggacacctcagcctcccatcgttactccgggaaaagcaccggcagaagcaatcggtgcaccgtctgatgctattatcctatttgatggtaaagacctgtctcaatgggaaaactctaaaggacaagctgcgggatggactgttcatgatggagtattcacagtaaagaagggtacaggtgatatccgtaccaaacagaaattcaatgattttcagttacatctggaatggtgtatcccggaaggtattgaaggtacaaatcaggcaagaggtaatagcggagtatttctacaaggtatctatgagatacagatcttggacaactacgagaacgaaacgtatgtcaatggtcaggccggaagtatctataagcagactcctcctttggtcaatgccatgaataaacccggcgtatggaatacattcgatataatttatactgctcctactttcaaaaaagacggtacttaccgcacacctccacgtgtcactgtcttgcaaaatggagtactgttgcagaacaatacgaccattttggggacaactccctatgtcggttttccggaagtgattcagcacggtgatggtcctatcgcattgcaggatcatggggacccgagtgctccgattagtttccgtaatatctggatcagagaattataa

SEQ ID NO: 130 - DNA, 435 bp, Bacteroides faecis
aaaaagataattaaccaactgccggagaagttagcaagacaggataactctccggcgcttattatcctttactttgcaaaagatatggaaacgaaagatataaataagcaagaatatctgttacgaatcaaaaaagtcacagactatatccatcagaatatagatcagccgctatcattacaaaaaatggccggaatcgcatgcttttccctttttcattttcatcgtgttttcactgttctgattggagagacacctacagaatatattaaacgagcccgaatcgaaaaagcagccctgctactgcaaggcgaaaagcaactttctgcgacagagatagcccggctctgcggtttcagcagcctgtcgcttctcagccgcaactttaagcaacatttcaatatcactatccgtgaatttcgttcactggactaa

SEQ ID NO: 131 - DNA, 729 bp, Bacteroides faecis
caaaaaatgataaagataaaatctgttctgatcgctgcttccctgataatgggacttgcacttccggccaccgcacagattggcgaaccacgccagaatttttctgtcgggtttaatgggggtgtcaacttaaacagtgcttcatttactcctaaaatcaagcaaaactcattaatgggtatcaccggagggttgacagcacgttatatttccgaaaaatattttgcgatgatctgtggcgcgcaagtggagttaaacatctcacaacgtggctgggatgagctattcgaaattatggatgcaaacggacagacagtggaagatcctacccgctcatacacacggaaaatgacttatatcgatatccctttcctggcgcatctggcattcggaaaagaaagaggattgcaattctttgtcaacgccggtccgcagatcggactcttgatcagcgaatctgaaagtatggagaatatagatatgaataaactgacagacacgcaaaaagctgtttacggtgataaaatccaaaacaaattcgattacggtatagccggtggtggtggaatagaattcagaaccaagaaagccggcagcttcctgctcgaaggacgttattattttgcattgtccgacttttacagtacaacgaaaaaagactatttctctcgtgcagctcatggcacaatcacggtgaaattcacttatctattcgatctgaaaaagtaa

SEQ ID NO: 132 - DNA, 690 bp, Bacteroides faecis
tcaaagacgcacaaaagtttatattcctttaaactccttttgaacaatttctatccggattggaacagcagatttcattttattccctctacatttgcaaccgcacttatctacaagtgcgtagatataataggtattaacatatcaaatgaagggactatgcaaaatcaattatcaaaaacagacagattatccaatcaagatatcagaaaacgattgaacgtaaaaaaaacgatcattggagtactcatcctgctaataggactctctcacttgcccgaagcagttctacttaatatagatgagatttcatcgggcaacattttatatcttatcacatgtatactaatctgtgctataggtatataccagctcaaattccggtctaaggaaatgaaatacctgccaaccaaaagtgttgtcaaagagaagaactattcattcaacctgaagtatatggaatcactgaaagaaatgattgaatccgggaatttttccaacagtttcaacataaagaaagaaaagggcggaaacctccgtctggatgtcctcatgtcggctgataagaaatttgcagccgtacgactgttacagtttattccatatagttacattccggtcatagacatgcagtacctgcggaatgacaagatcatcgctctggagaatttcttagaacactataaataa

SEQ ID NO: 133 - DNA, 624 bp, Bacteroides faecis
ataataatgaatcttatatcagacattttatactggatctcaacaggcctacttgttcctgtgatcgttttattaatcatcctcttttgccgtgcaatcatacttgccggtagtttctatggtcaatatctgtctatccgtaaaacagaggctctgctccgtaacgaactgaacaaactgactccggataccgtcggagaacttggctccaatcttccggaaaactccagatcccttgtcattatgtatatgcgccaagtattggatgcgcgtgatactccggcacaggtacaacgcttattagctaattttgaaattgcagcagacaaagatttagccatctctaaaactctgactaaactgggccctatcttagggttgatgggaacgctgatcccaatgggccctgcccttgcaggactggccagtggtgatattgcttccatggcttacaacatgcagattgctttcgccaccactgtagtcggactggtagcaggtgccgtaggtttcctcacacagcaggtgaaacaacgctggtacttacaggatatgaccaatcttgaattcatatccgaactgctcaatgacaaacgttcaatcaataaaactacagagaaatga

SEQ ID NO: 134 - DNA, 1509 bp, Bacteroides faecis
atgctgcgtactatcagacttacagccgcaatcgtgtgttttgcacttattaccttactgttccttgattttacgggaacgcttcacacatggttcggatggctggcgaaaattcagtttctgccggcagtattagccttgaatataggtgttgtactactccttattgtacttacgttattgttcgggcgtatttactgctcggtcatttgcccgttaggagtatttcaagatgcggtttcgtggatttccggcaaacggaaaaagaatcgttttcgttattctccggctttaagatggcttcgatatggagtgctgaccgtgtttgtcattgccttagttgccggatggaacacttttgtaatcctattggctccttatagtgcttatgggcgtatggcttccagcctgttggcaccattctggcaatggggtaataatcttatggcatattttgccgaacgggcagaaagttatgctttctacgaagtggatgtgtggatgaaaagtctttcaacactgatcattgccatcattactctcgtcgttctttttatcctggcatggcggaacggacgtacttattgtaatacgatttgtcctgtcggcacaatattgggatttatctcacgatattcaatcttcaaacccgtaattgatacgtctaaatgtaacggttgcgggctgtgtgcacgtaattgtaaagcatcctgcatcaatacaaaagctcacgaaattgattatagccgttgtgtagcttgcatggattgtttagggaaatgcaaacaaggggctatcagatacacaagacgaattccgaaaaaagaatcggctacaacagaaacagttcaggttaaatcagtcaccgcagaacaagtgaacaatgcccgccgtagtttcctttccgcatctgctgtcgttgcgactactgccgtactgaaagcacaggaaaagaaagtagacggaggtctggcagccatcgaagacaagaagattcccaatcgggaaaatccgatttatcctccaggttcattgaatgcacgtaattttacccagcattgtactgcatgtcagttatgtgtttccgtctgccccaatcaggtattgcggccctccggtaatctggctactttaatgcagccggaaatgtcctacgaacgtggttattgccgtccggaatgtgcaaaatgtgcggaagtatgtcctacggatgctatccatctgaccagcctcgctgaaaaatccgctattcagatcggacatgcagtatggattaaagaaaactgtataccgctgacagatggaatggagtgcggcaactgtgcccgtcattgtccggttggggctatccaaatggtagcttccgatcctgataatgaggattcattgaaaattccggtagtaaacgtcgaacggtgtatcggttgcggagcttgtgagaatctttgtccgtcccggcctttcagcgccatttatgtgaccgggcaccagatgcacagaattgtataa

SEQ ID NO: 135 - DNA, 582 bp, Bacteroides faecis
acgaaaaaaacaatgattaaatatctaattgtcggactaggaaacattgggcctgaatatcatgaaaccagacacaatattggtttcatgacagtggaggcattggctagaatcaacaacgcccctcctttcattgacggacgctacgggtttactactagtttttcaatcaaaggacgccagttaattttactcaagccatcaactttcatgaatctgagcggactagctgttcgttactggatgcaaaaagaaaacattccattggaaaatgtattaatagtagtggacgatctggctctcccctttggtactctacgtctgaaaggaaaaggaagtgatgccggacataatggccttaagcatatagcagccattttaggaacccagaactatgcccgtttacgctttggtatcggtaatgacttcccgaaaggcggacaggttgactatgtactcggacactttactgatgaagacctcaagacaatgaatgaaagactggagaccgccggagaaatcatcaaaagtttctgcctggcaggtatagatattaccatgaaccagtttaataaaaaataa

SEQ ID NO: 136 - DNA, 762 bp, Bacteroides faecis
atgaaaataaaaagaattattctaatggccgcccttatcatttcagtagctagcgttcaagcacaaaagtcacaggttatcgctcatcgtggctattggaaaacagcaggttctgcccaaaacagcatcacatctttgcaaaaggcggattctatacattgctatggttccgaatttgatgtatggcttgccaaagacaataagctggttgtcaaccacgatcctgtctacaagatgaaatacatggaatattccaagggagatgctcttacaggattgaaactatcaaacggagaaaatctgcccagcctgcaaaaatatctggaagccggcaaaaaatgcaatactaagctaatacttgaactgaaagcgcataacagcaaaaaacgtgaaacaaaagccgtacaggaaatccttgccatggtgaaaaagatgggactggaagatcgtatggaatatatcactttctcgctgcacgcaatgaaagagtttatccgtctggcacctgccggaaccccggtattctacctcaacggagaactatctcccaaagaactgaaagacctcggcgctgccggacttgactaccacatgggagtaatcaaaaaacatcccgaatggatcaaagaagcacatgatctcggattgaaagtcaatgtctggacggtagacaaagcagaagacatgaagtggctgattgaccagaaggtggatttcattacgaccaatgaaccgattgtggcacaagatatgctaaaataa

SEQ ID NO: 137 - DNA, 1164 bp, Bacteroides faecis
atggaagtacaaataccaatttattttttatatttgcaactccaaccatttgtatgcaaaaataaaaatagagttatgaataatcttcgaattttattatatgtaattgcactctctttggccgcatgtcatccagaaggaaccaatgtgaatcaaggattggataaagccgcccaactgatagaacaagacccggacaccgcttccttcattctcgagaatattcgggcgaatcaaatgaacgaggctcaactggcagagtacaatctgttatgtacccaattcaatgaagacaagaatattcctcattcttcggatgagcaaatccgtcaggccgtttcttatttcgtgcagaacggagatgaatatcagcaatcaaaagcatactattatctggcttgtgtagaaagtgacctggaaaggaaaaaggaagcagaaattcattttaaggaagcgatcaagttggctgctctcacagagaagtatgattatatggctaagatatgcagacgttgcagcctgtattatcagaaatacggcaacttcgacgaagcactggaaatggaaagaaaagcctatgccagtcaattaatgctcaacgataccagcggtaattcaagaaccatcctttcgtctgcattaggagtcttcggtgttatgtctttgttgctcggactattgtggagaaaaaacaagaatgtctacgcgcaattaaattcattcaaagatgaaatgctgcgcaaagatgtggaatcggataagttagcactgcaatgtaactatctggaagaaaaatatcagtcactccaacaacacatatacgaaagttctcctattgtatcaaaagtccggcagttgaaagaacggtccgttttatcttctaaagccctttcattctcagaaaaagaatggggtgaattattacggcttcaagaaggagtatatggacttgtatccaaactgaaggaaataaatcccagactgacggaagaagatttgagagtatgtgcatttctgcgtgagggcattcaacctgcctgctttgcagatatcatgaagttgacggtggaaactcttactagaagaatatcgaggataaaaacagagaaactaatgcttgtaagcacgaaagaatcgttagaagatttcgtaaaatcattgtag

SEQ ID NO: 138 - DNA, 738 bp, Bacteroides faecis
atgaaaatattgattctatccattacctttttattccttgtgctctttccttcgatggcgcaagagccccggctttctgacgaactggtgtttgaagagcgcgtctttgattttggagaaataaaggaagaagacggattggtttcacatgaatttgagtttaggaatgtcagtcagaaagttctttctatcaatggggtaacgagtggttgtggttgtgtacagtttgaatatcctaaagaaccgcttcgccccaatgccacagggaaagtgaaagtgacttacaatccggcttaccgaccgggattcttcagtaaggaagtcgttgttttgagcaataacaatgcgaactacaaccgcatctgggtaaagggtactgtcattccctgccaacatccggtatcggagaactatccgtatgagtatggtagcggactttggatgaactttgaagtaatggcattcggcacgataggcaaaggtggtacgaaaacgatgaaattgaaatatgtaaatgataccgatcatgatatgcaactgatgtttgtggtgataggtggaaatacggatattaagtttaccagtccccgcatggtgaaagcccgtgaagaaggtgtgatgcctgttgaatatcaatattccggcaggtttccggctgtaacacgtgtctatcccgtgatcaacggacgggcactcgtgaaaccgttggtgataacatgtgccgatccggttgattag

SEQ ID NO: 139 - DNA, 1173 bp, Bacteroides faecis
atgactcaaacacttaaaacgactgaacggctcggagttgtagatgctctgcgcggatttgccttgctggctattgtattgttgcataatctggaacattataatctgtttttaccgttggaatgtaccttgcctgcatggttgcagacggtagataagtatgcgtgggacaccatgtttttcctgtttgcagggaaggcgtacgctacgttctctttattgttcggctttagtttttatattcagtttcataatgcggagaagcggggaactgactttcgcgggcgctttgcgtggcggatgtgcttgcttttcctgtttgcgcagctgcatgccttgttctacaacggggatattctgctgctctatgcagtagtcggctttgccttgattccggtttgtaaactcaaagataaagccgttttctggattgccgttatcttgcttctgcaaccctacgagtgggggcgtgccatctatgcaatgatcaatccggagtatgtaccggtgacaggtcattatattccttttgccaagcttgcggaggaagtgacggctaccggcagtttctttgaagtactccgttccaatatcactgacggacaattatatagcaatatctggcaggtagagaacggtcgcctgttccagacggcagctttattcatgttcggaatgcttctgggacgccggaagtactttatgaaaagcgaagagtccctgcgcttctggaagaggatgctgacaggtgctgcaatcgcttttattcctctccattgtctgagggtgtttgttcctgaactgatcacgaatccgtccatcttggttccgtataagatagctgtcccgtcttatgccaactttgctttcatgattgttcttgtttccgtctttaccttgctttggtttaaaaaagatacgggatatagctggcaaagtctgctgattccttatggccgtatgagtctgacgaactatatctcgcagtccattatgggggtaactatctattatggattcggactggccatgtacaaatatgcaggtgcaacaggaagcttgctgatcgcattacttatcttcaccgtacagctgatattcagccgctggtggcttgcccgtcataagcagggaccgcttgagtttctgtggcgtaaggggacttggatttag

SEQ ID NO: 140 - DNA, 933 bp, Bacteroides faecis
ggagaagattttgaggcaatttcttatctttgccggaaaagagcaaagggaatggaacagaaagaacctatggaattaggcctccagctactgaaggatatcaatatagtacgtcacaacgaatttcgtttcatcaatgccgagttcgggtttgtaacgagcttctcgaaaatggaaacgaccattttcaaaatcggacaaccttaccggttacaggaaggccgtatcgcaatcattaccaatggacgggcacgagttctcattaatctgatcgagtatatctttcgtcctaattatatctctctgatcgccccgggctctatcatacaaattatagagacctcccaagactttgatgctcatatgatggcgatagagcataatttcctgccagtatccggtaaagaagaattctttgcccatttcctccaacggaaaaagaatctgctgcttccactgactaccactgagcaggtacaaatagagaattttataacagtcatgtgggatgtattacaagaacctgtattcagaaaagaagtaatccagcatctattggcaggattactatataatatagaatatatagccaaaaacaaaggacagtccgagtcgagcccattgacacatcagaacgatatttttcaacgtttcatctctttggtcaacacttatagcaagacagaacggaacgtcagtttttatgcagacaaactttgccttactccccgttatctgaatacagtgatccggcaagccagtcaacaaacagtaatggactggatcaaccagtccattatactagaggcaaaagtgctgctcaaacacagcaatcgccttgtttatcaaatttctgatgaattaaactttcccaatccgtccttcttcagcaagttctttaagcgaatgacaggaatgacgcctcaggaatat

SEQ ID NO: 141 - DNA, 474 bp, Bacteroides faecis
tgtgccatggcacaagaaatagaacgtaaatttttagttaccggtgatttcaaaccctttgcatttgcccaaagccgaatagtgcagggatatatatgcagcgcccgcggacggacggtgcgggtacgtattcgtgacgataaaggttatctcacgatcaaaggggcctctaatgcatcgggaaccagccgttatgaatgggaaaaggaacttcccctgtcggaagccgaggaactgatgaagctttgcgaaccgggcatgattgataaaacccgttatctggttcgttgtggcaatcatgttttcgagattgatgagttctatggcgagaatgaagggcttattgtggccgaagtggagctggagtcagaagatgaggcttttgtgaaaccggagtttatcggtgaggaagtaaccggagatatacgctactataactctcatttgatgaaaaagccgtatcaaacgtggtga

SEQ ID NO: 142 - DNA, 597 bp, Bacteroides faecis
gcaaacagagagatgaagaaatggtatgccatattgcttcttttgtccgcactcaaagtgagtgctcaggagatcagttttataccagaagtaggtttaggattatccaatataaccaatagcgacaataatagtaaggtgcgtcccggatttaatataggtatggggatggaagttatctggaatgaaagagtcggtatgggcataggagttaattatctggtgctgggcaataggtttacaactgattacatctcttatacgaccaagttggattacgtcagtataccggtttacgcaaaaggatatgtgtacaaagggttgtttgtatttgtaggtccccagttcggttttaatgtagtccgggatgatggaagagattatgatgaattgtcagatctggacaaaatgcgtaaatttgacttttctataggagtcggtatcggttatcagtgggactttggtcttcagctttcggcaagtcacaatttggggctgattgatgtctggaagaagtatcccgatgaatggtcctcttccggcaagaagtataacagcatttttcaatttaatgtaggttggagaatcggattttaa

SEQ ID NO: 143 - DNA, 1101 bp, Bacteroides faecis
atgaaaaagtatctgaaaatcacgttattggtaattatcgccataatccttgtcggaacatttgtatttctttatcagaaatccaagccaaaggttatagtttatgaaacattggcagcagaagtgacagaccttgaaaaaacgacagtagccaccggaaaagtggagccaagagatgaaattctaattaagcctcaaatttccggtattgttgacgaggtttttaaagaagcaggtcaaagcgtaagaaaaggggaagtaatcgccaaagtaaaagtaatccccgaactcggacagctaaattcagcagaaagccgtgttcgtctggcagaaatcaatgcaaagcaagcagaaaccgattttgcccgtataaaaaaactgtacgaggatcagctgatcagccgcgaagactttgaaaaaggggaagtggcagtaaaacaggcacgtgaggaaaatcagactgccaaagataacctggaaattattaaagaaggaatcactaaaaacagcgcttcattcagtagtaccatgattcgttctaccatcgacgggcttattctggatgtgcctgtgaaagccggtaactccgtaatcatgagtaacaccttcaatgacggcactaccattgctacagtggcaaacatgaacgacctcattttccggggaaatatcgacgaaaccgaagtaggacgtatccacgagggaatgccgatcaaactgacaatcggtgctttgcagaacctgaccttcgatgctattcttgaatatatctctcccaaaggagtggagaccaacggagcaaaccagttcgagattaaagcagccatcacggtgccggataccgtacaaatacgttccggttattctgcaaatgcagaaattgtattgcaacgtgccaacaaagtgctggcagtacccgaaagtaccatcgagttcaatggtgattctacgttcgtatatatcatgacggattccgtgccacaacagaagtttaaacgtacacaggtgactaccggaatgagtaacggtatcaaaattgagataaagaaaggtgtaaccgctcaagacaagctacgcggtgctgagaaaaaagataaataa

SEQ ID NO: 144 - DNA, 537 bp, Bacteroides faecis
aaatataaatatatgagtacatcattagcgacttattatgccaaacttctggatatgccggatagtgaatataaggtagagattctggaagacggaccgatcaagaagatagcggtcaacggtaagatatacgaggtcgattacaatatgggaggcgactctattcattcgattatcatcgatcatcactctcatggagtgcagatatctccttcttccaataattcctatacgatcatgaataagggagaactttatcagatagagttacagggagagatggagaaaatacataatgcccgtgccggtacggaagctgtgggacgacaagtggtacaggctccgatgccgggagtcattctgaagatatatgtaaagaagggggatacggtgaaacgtggagatccgctttgtgtattggtagcaatgaaaatggaaaacgaaattcgttcgaccacagacggagtagtgaaagaagtctttgtagaagataatatgaaggtcgctttgaatgaccgggttatggtgattgaatga

SEQ ID NO: 145 - DNA, 1038 bp, Bacteroides faecis
atgaaaaagaaaacaaggaatatcttattatccattctgatcggagccttccttctgtgcgccattgtcggaggaacagtctattattatctgttcgctccgcagtttcatccttccaaaacagtctatgtatatatagaccgggatgatacgacagattctatctacaataagatcaggcaaaccggtcatgtcaaccaattcaccggcttcctctggatggcaaaatataaaaaactgaatcaaaacatacacaccggacgttatgcaatacgaccgaatgacaacgtatatcatgtattcagccgactttccagaggttatcaggaaccgataaacctcactatcggaagcgtgcggacattagaccggctcgcacggagtgtcggcaagcaactaatgatcgactccgccgagatagcccgccacttattcgattccacatttcaggcagaaatgggatatacaccgatcactatggcttgcctctttatccccgaaacctatcaggtatactgggatatgagcgtcgacgagttcttcaaacgtatgcaaacagaacaccaacgattctggaacgacgaacgccttgcccgggcaaccgccatcggcatgacaccggaagaagtctgcaccctcgcctccattgttgaagaagaaaccaacaacaatgaagaaaagccagtggtagccggcttatacatcaaccgcctgcacacagatatgccactacaggcagacccgaccatcaagttcgccttacaggatttcggcctgcgacgcatcaccaatgaacacctgaaagtcaattccccctacaatacgtacattaacaccggattacctccgggccccatccgtatcccttctaaaaaaggattggacagtgtattaaactacacgaaacacaattacatctacatgtgcgcgaaagaagatttctccggtacccacaatttcgcatccaattatgccgatcacatggcaaatgcaagaaaatattggaaagcacttaatgaaagaaagattttcaagtaa

SEQ ID NO: 146 - DNA, 735 bp, Bacteroides faecis
atgatgatgaataagataataggattggcagttctactgctttgtatgtcaggttgtgtcagagataatgatgctatatattaccccgtaggcgatgtggatattgaaagaggaggtccggcactggaagtcggagagggggatgtcttggtggtgcgaagctataatgaagaagattatgtattggatacgatagctcaatacccgaatgacccgactttgggtaaactgacgtttatgattgatctgaaaaaccaacagaaggatcagaatgttgccagttttaacggagctggtaaatcaaaactgaccatgagccttggatataaggatggcaattaccctgcggaaagccaggttcctatatacacttcgcaggatattaccgctaaatatgcaatcaaacttcgtctgaaaggagaactgactgtatccggtgatgaatggatgatagattatgtatatgcccaactggctagcctgttccagccttatcctccgacaagctttcctgaagtctttatgtgcaagggagggatgaaactgggaactttcgactccttccgcagaacctgtacttttgatatcgtttatgatcgttccgacctctcttttagtcagttatacttcaatttatttatcaatttagccggtcagaagcgggaaaacagggtcaaactgcggattgataaggaatcttacttcgaactgtatgagcagagtgaagaactgtaa

SEQ ID NO: 147 - DNA, 675 bp, Bacteroides faecis
atgaaaaagaaactgaaagccgtcctgttcgatatggacggtgtactctttaattccatgccctaccactccgaagcttggcatcaagtaatgaaaactcacggcctgaatctgagccgggaagaagcttatatgcacgaaggacgaacgggagcatcgactatcaacattgtatttcaacgcgaactgggcaaagaagccacacaagaagaaatagaaagtatatacaaagaaaaaagtatcctgttcaattcttacccggaagcagagcgtatgcccggtgcgtgggaactcttgcagaaaataaaaagcgaaggactaacgtccatggtagtcaccggttcgggacagctttcattgctggaacgtttggaacacaactttcccggtatgtttcacaaggaactgatggttaccgcttttgacgtaaaatacggtaagcctcatccggaaccttatctgatggcccttaaaaaaggggacctgaaagcggacgaagcagtagtgatagaaaacgcaccattgggtgtggaagcaggacataaggcaggcatcttcacaatcgcggtaaatacaggccctctggacgggcaagtattgctggatgcaggagccgatctgttgttcccttctatgcaggcactctgcgatagttgggatacgattcttttataa

SEQ ID NO: 148 - DNA, 831 bp, Bacteroides faecis
tatcccggattatgtctacttttgtcatacttcaatccaaaaacaattccacaaatgccagaaaccaagtctatagatatcacacgggaagaattgtgggcaaaacaacgcttgtcttttactgacatagactactccgtatgggaacgtgataaatccatgcttcaccagttttccaagataagcggcaactgtacatttgtagttgatgtatacaaatgcagatacgcttatgcctctcagaattttgtggatttactgggatatgacagccataagatagcaacattggaaaaacagggagactatctggagtcacggattcatccggacgaccgtgcacaactgttcaccttacaaattaaattaagtcagtttatttacaacttgcctccggaacaacgaaacgattattctaatatttacagttttcgtattcttaatgcaaagcaacaatacatacgtgtcgtcagcaagcatcaggttctggagcagacagtcaatggaaaagcatggctggtaatcgggaatatcgatatttcgcctgatcaggaagagtccgaaacagtagactgtactgtactcaatctgaaaaatggagctatattctccccttctctatcgcttcatgtccctaaccctctcaccaaacgggaaacagaaatattacacctcatccaaaaaggactgttgagtaaggaaatagcaaacaaactgtgcgtcagcattcataccgtcaatattcaccgacaaaatctgttaaggaaactaggggtgcaaaattccatcgaagctatccgcataggatatgagtcgggcatattgagctga

SEQ ID NO: 149 - DNA, 1017 bp, Bacteroides faecis
atgaaacagccccacaaacgtaccgccctcttattcattacgctaagtatggttgccgtactattattactgatagatatggcaaccggagatacgtatatccccatctctaaagtatgggctgtactcaccggaggcgaatgcgacgaaatgacacgcaacattctcctttccatccggtttatacgggtagtggtagcggcactgataggcgtggcgctctccgttagcggtctgcagatgcaaacggtattccagaatccattggcggatccttacctgctgggagttagttccggtgcaggattgggagtagcgctctttatactaggagctccgctgctcggatggacggagtttccggtccttcaatcgctgggtatcgtcggctcgggctgggtaggaacagctgccattttattgggagtagccattgtcagccggaaagtaaaaaatattctcggtgtactgattatgggggtcatgatcggatatgtggcaggtgccatcatccagatactgcaatacctgagttctgccgaacaactgaaaatgttcacgctctggtcaatgggatcattaagccacattacagccactcaactaggaattatgattccgatgctgtgcctggggctgctgatttccgtagcctgcatcaaaccactaaatctgctgttactcggcgagaactatgcgcagaccatgggaatgaatatcaagcgctcgcgtacctttattttcatatccaccgcactgctcactggaacggtcaccgccttctgtggtcctgtcggtttcatcggactggctgttccccacgtcacccggttactgtttaacaatgccgaccaccgaatactcgtccccggcaccatgctgaccggattcatcagtatgcttctctgcgacatcatcgccaagaagtttctgcttccggtcaactgtatcactgccctgctgggtgttccggttattttatgggtaatagctaaaaacttgcgtataatcaaatga

SEQ ID NO: 150 - DNA, 261 bp, Bacteroides faecis
gttcttgagatgtgtatagataaaaatagtatgattcatgcaggacgacttattgaacgcacacttcacgaccaagggcgtacggtcacttggttcgctgaacaattgtgttgtacacgtccaaatgtctataaaatatttcagaaagaaaatattgacattcatctcctttggcgtatctcctgtattctcgaacatgatttttttcgtgacctctctgatagcattgatgttcgggtttctttgagtgtctccaaatag

SEQ ID NO: 151 - DNA, 3090 bp, unclassified Barnesiella
atgaaaacaaaaggtggtattatagaagctgccatgaaatacaggcagatcgttattctcatcgtggcgttgatgtttgtactgggaatttactctttggtgaagatgcccaagcaagagttccctgcctttaccatacgccagggggttgtggtggccgtctatccgggggctacatcgaccgaggtcgaagagcaggtgaccaagccgctcgaaaactttatctttgaattcaaagaggtgaaaaaggccaagactcattcgctcagccgcgacggcatgtcgattgtctttgtcgagttgaacgacgacgtaaacaaccgcgacgagttctggaccaagttcaagcatcgtatagctgcctttaagtcgcagttgccctcgggggtgctggctctcgtgaccaacgacgactttggtgacacgtcggctatgctggttaccatcgagtcgaaagacaagacctatcgcgaactcgaggagtacctcgacgatctcaaggatcgattgcgccgcatcgatgccgtgagcaacctgcgcacctatggcttgcagaaagagcagatcagtgtctacctcgacccggccaaaatctcgcgctatgcaatcgacaacactacgctggctacccaactgctctcccagggtttcacgacggtgagcggagcggtcgataacagccggtttgtagctcccattcacctggccgatacctacgactgtataaacgatgtagccaaccagattgtttttagcgatccgcaagggcacgccatccggctcaaagatgttgcccgggtggtgcgtgaatatcccgatcctacctcttatattaccaacaacggcaccaagtgtctggtgctctccatggagatgcgcgaaggcaataatatcgtagagatgggacaagaggtcaacaaggttctctcggactatgagaaagagctacccgacgatgtgtcgatattccgcattaccgaccagtcgcaggtcgtaggcgattcggttgtaaccttcctgcgcgagctgctcattgccatcattgccgtgattgtagtcgtcatgttgctcatgcccttgcgggtagcttcggtagccgcttcgacgatacccatcaccatattcctctcgctgctggtcttctatgcctgcggcatggagttgaacacggttacactggcggctctgattgtcacgctgggtatgattgtcgacaactcgattgtcatcatcgactgctatatggagaagctcgacaacggcgtgccccgctggacggcagccgtcgagagcgccaaggagtttttccgctccattttctcggccacgttggcaatcagtatcaccttctttcccttcctcattacctcgacgggtatgattaacgacttcgtgaagtccttcccttgggctatcaccattatcctggccttgtcgctgctggtagctgtattgttggttccctacatgcagtactactttattcggaccggattcaaaggtgcgcccaaacctgaaaagaaacaacgccgttcgttcctgaccgtattgcaatcgtcttatgacaagctcattaccaagtgtttcgctcatcccgtacgcacaatgggcgtaggtctcctcgcggtggtagccggtgtcgtgctgttcctggcgctgcccatgcggctgatgcctattgccgagcgcaaccagtttgccgtcgagatttacatgcctttcggtacggcgctcgaaaagacctctgccgtggccgatagtctcgaatcgattctccgtaaggatccccgggtggtatcggtggcctcgttcaagggagaagggtcgccccgcttccacaccacctatgctccgcagatggccggttcgcactatgctcagtttatcgtcaatacgacgggcaacgaggctaccgagcagatgatcgacgagtataaggataaatacctcaactacttccccgaagcgcgtgtacgcttcaaacagctcgaatactccgatgcggtctatcccgtcgagatacgggtcaagggtaacgaccgcgacagccttcgtgtggctgccgaccgagtgaagaaggtcatggatggcttcgacgagctttcgttggttcatagcgactgggagggacagcttcccggggtcaccttgcaactcgacgacgatgagatggggcggctgggcatgagcaaagccatgctttcggccaatctggccatgcacctgggcaacggtctgcccgtgactacggtttgggataaggattatcccatagatgtcgtacttaaggacgacggccgtagcgagctctcctacgatgaggtgggcgatacctatgtctcggcttggggcggagctgcctcggttccggtgcgccagattgctcgggtcgaacccgactggcacgatgcccagatagcccgtcgcaacggtattcctaccattacgctccagtccgatgtgaagaatggggtcaacgcttcggccatgaccagcaagatcgtgaaggccgtcgagcaaatcgatatgcccgaaggcatcgaatgggaggtgggcggagcccgtgagagcgacagcgataccttgaatatgattgtgagcggactggtcattgcggtcgtcatcatcttcttcatcctgttgttccacttccgtcgcatcaatatggccctgctcattctcgggtcactcgcgctctgtctgttgggagccggtgtaggtatctgggtgatggggctcgatgtgagtgtgacggcagtcttgggtatcgtcagcctcatgggtatccttgtacgtaacggcattatcatgctcgactatgccgacgagttgcgtatgaaagagggattgagcgtgcgtgaggccgccttgcactcggccaaacgtcgtatgcgccccatattcctcacctcggccgccgcttcgatgggtgtgattcctatgattttgggaggcagtccgttgtggtctcccatgggttcggtcgtatttttcggaaccatcatctcgatgatattgaccctcaccatattgccggtagcctattggttgatattcagccgggccgatcgtaaaacagaaaatcgttga

SEQ ID NO: 152 - DNA, 699 bp, unclassified Barnesiella
ggagctgccgcatcggtcgacggggtagtctatgtaacgggcggaaaccagtccgatggcggtcgtgccctctatgccctcgacctgaagagtcgggtctggacccggcttcccgactatccggctccgaatcgggtgcaacccgttctgctggctgcgggcggcaagctctatctggccggaggtttcagttacgacccgtcgacgcgcacctgtacgattcctgccgatatggtgccctacgatgtggcgacccggcagtggggcaatcctgtgcctttccctgtcgcgcccgacggtggacggtatgccatctcgggagggagcggggctgttgtcggtaattgcctgctgttgacgggaggtgtagattataaaatatttaaagaagccatggaaggcagggctcccgccgactacatgaagaaaccaatcgaatggtatcgatttaataacgaggtgcttatctataatacgacccgtggcgactggtcggtctcgccctcagtcgaggggctgaaccgagccggaggggtgctgttgcttgacgattcactcttgataatggtatgtggcgaggtgaaacctggtgtaaggagttcacaaataggcgcttttgagtggcgcgataccgatggcgctacgtctgtcgtactggcgggaaaggtatactcctctgagcagaaggagcaaatttga

SEQ ID NO: 153 - DNA, 396 bp, unclassified Barnesiella
atgggattgttttctttcacgcaggagatagccatcgacttgggtacggccaatacggtgattatccacaacgacaagattgtggtcgatgagccgtcggtggttgcgttggacaagcgtaccgacaagctgctggcagtcggggaaaaagctcgtttgatgtatgaaaagactcatgagaacatacgcacgatacgccccttgcgcgacggtgtgattgccgacttctacgctgccgagcagatgattcgcggcatggtgaagatggtaagttcgaagagccactggttttcgccctcgctgcgtatggtgataggtatcccttcgggtagtaccgaagtcgagattcgtgccgtgcgcgactcgtcggagcatgccggcggccgcgacgtctac

SEQ ID NO: 154 - DNA, 762 bp, unclassified Barnesiella
atgataagccgtcgaaaatccttacgcgagatatacgtctgggagttacccgtgcgtatcttccactgggccaatgcagtcgccattgtcgtactgtgtgtgaccggttacctcataggcaatccaccggccatccagcacgccacgccccccgaggccaactactggtttggctgggtacggtttatccatttcgtagccgcctttgtctttatcctcaactttctcgtacgcctctactgggcctttgccggcaactcgtttgcacgctggaacaactacctgcccctcacccgaaagcagtggcggggcatacgcgacacgaccaaggtcgacgtgctgctactctcgcccaaacccctctacgacatcggacacaacagcctggccgcctttacctacttcggggtattcgtgctgtttatcatccagactgtcaccggtctggccatgttctgcgtatcgaccaacaacgtgatggagcccttcttctcgtggatactccaactatgcggcggattcttcgtcgtgcggcagattcaccacctggccatgtgggcctttatcctcttctccatagcacacatctatctggtcttctaccacgactacatcgagcgcaacggcatcgcctcgtcgattatcggcgggtggaagttcatccgggaagatttggccgaggagtatgaaaccgagcaaaaccagcaacaacagatacaccgacaaaaagaagagataagccatgaaacgaaacgaaaatag

SEQ ID NO: 155 - DNA, 711 bp, unclassified Barnesiella
atgtttaccgataaaattatgccgaatattttacatatagagacctctacgtcggtctgctcggccgcgctctcttccgacggagtggtacaatgccatttcgagaacttcgacggcccctcgcacgcctcgctgctgggagcctatgtaaaagagttgatgacctttgcccgcgacaagtcgataaaggtcgacgccgtagcggtgagcagcggcccgggctcctacacggggctgcgcatcggggtctccgaggccaaggggctttgcttcgggctgaaggtgccccttattgccgtacacaccctcgaactgctggcttgcgccaccatgtttaaaacctatttcgacgaagatgtgttatattgtcccatgatcgacgcccgtcgcatggaggtctataccgccgtctacgacaatgcgctcaacgccgtgcgtcccgtgcaggcctgtgtggtcgacgaaaactcctttgccgacttgttggccgaccgtcgtgtcgtcttctcgggcaacggagctgccaagtgcaaggaggtcatccgccacgagaatgccatctttgtcgacgacatcgtacccctggctaccgatatgctggcacttgccgagcgggcttaccggcaaggtcagtttgaggatgtggcctatttcgagcccttctacctgaaagagttcatcgccaccactcccaaaaacaaagtattgtaa

SEQ ID NO: 156 - DNA, 480 bp, unclassified Barnesiella
atgaatatagagatcgaacgcaaatatcgggtgaccgatacctcgtatcgcgcccaagccacccgctgcacctactacaaacagggatacctgtcggcagcccctgcggccaccgtgcgcatacgcatcgccggcgaccaggccttcatcaccatcaagggtaccaccaccggctgctcccggcaggagtacgaataccccatacccgtagccgacgctacccgaatgctcgactcgttgtgccagtcgggcctcatcgaaaagaggcggtacctctacccctatgccgggcacacatgggagattgacgaatttatgggcgacaacgaagggctgattgtggccgaagttgaattgcaatcggagtcggaagcggtacagttgcccccgttcatcggccgcgaagtgaccggcgacccgcgttactacaactcttgcctggcccaaaatccctataaaaactgggaggagaaagaataa

SEQ ID NO: 157 - DNA, 1827 bp, unclassified Barnesiella
atgcgttcgctcgacgattcgctcgagggacccgaatatgctatcaatctgctgattgccgaactctcgaccgacactctgcccgacccggtgcaagaggtgtcgattcgcatctactctacccgttatcaactgctgggtgccgacgtgtggcaaaaacccaacggccgaaaggcaccccgcaagatacgtttccaactggcctccagctcctattggctcgaagattgctgccacctgtttctctattgcaacggactcctgcggggctacgcctcgtttgcgctgttcagcgactatgacaagtgggaaaacatcgccctcgaagaggctgccgaccaccccgaagcgctcttcttcgtcggccacctgtgccaccaaccgtggtggagccgattggctcaggggtcgatttcgcccacggccattcgcaaactcatcgacagtctgctctggtacacctccgctccctccccgaagcggcactgggtggtatcgggcgacgaggcgcaggcggctgcttttgccaccagcattctggcggccagcctcaccgacagccatccgaaggcctgttgccggtttgccctcaacgacctgctatcgggccgcttgagctggtcgctgttgcgagacaacctcgacgacaaaaagacggtcgtggtgcaggtcgatcgcatgggcaccagcacctgtaacgaaaacatgctcgacttgctgagcgactggctcaagagtgccgatgccctgcccttcgtgttccacggctcggaaaagaacatcgacttgctgttgcagtatatcccggctctggccgacctcttcgacgagcatacgacctttgctctgtcggagatgccggacaactcgatatggaacgacgacgaggagacagaattgccgctgcccgaggaggccggcgtctgcgacctcagacagccctgccccgaaacgaccgacacctcgtgcaatgccactcagaaactggaaagactcattggcctctctcaactgaaagccgacatgcaggatgcctgcctggcggcccggtttgcccgggagcgccgcgaacttggcctcgacccccacgaagagaatcgtcaccacatgctgttctatggcaacccggggaccgggaagactacggtggcccgtctggtaggcgaactgtatcatcaaatgggagtgctctcgaaggggcacacggtagagacctgccgcaccgacctagtgggcgaatacataggtcacaccgagaaccgcatgaaggaggtgctggagcaggcccgaggcggggtgctctttatcgacgaggcctacacgctggtgggccgcagcaaggagtcgaacgacttcggcaaggaggtgattcacgccctgctccccatcctgtcggaacccgaccccgacctgattgtgattctggccggctatgaagagaagatgcagactctgctccagtcgaacccgggattgaaggatcgcttccccctgaaattctatttcgaagactataccaacgacgaactctacgccattgcctgccagacgctgcaagaccggggatttgtactgacccctgctgccgaacagcggctacgggcggcgattgcccgagctaccgctcaccgcgacgcccacttcgggaacggtcgctgggtgcacaacctgatagaacagggcattgtcaaaagcatggctcgccgcatcatgtccattcccggccacgaccgtaccgaccgggtgctgctcagcaccgtagaggcgaccgacatcgacgaagccgaagcgcgactggcccttcgccccgacttgagagttcctcag

SEQ ID NO: 158 - DNA, 1425 bp, unclassified Barnesiella
atgctcaaactggccggtgcagccgacggcatgaacctcgacggcggcggttcgagcggtatgtacatcgagcagtatggtttggtcaacagccccagcgacggccacgaacgggccgtgagcaacggtatattcgtcgtgtcgaatgctcccgacgacaacaacatcgccgaaatcctctgcacacaagagtattgcgtactgcccaaatatggcgtattcaccccccacttcatggggtataaccagtatggctacctcatcaataccgaggtgaccggcgtcaccctgcgttgcgacgagtcactgggctatatcaaggacaataccaccctcgtagcctcgggcgaaggccgcggcaaactctatgccagctacaatggcgccgaaacgtcggtcgatattgtaatcggtgcacccgaagggctcaccctccgactcgactcggtcatcaacgacggactctacgaataccccatcgaggtgacctcgctggtcaacaacgagccgatgattatcgctcccgaagccttcgaatggacggtacaagaccccgccatctgcagcgtaaccaacggtaacctgaaggggttggccaacggcaagacctatgtctactgccaacaggacgatttccgcgacaccctcgccgtgaccgtgcagatacccgcctaccgcaacatacccatcgacaattttgccgatgcctcttcgtgggaaatcaccaactcggccctgaaagacatcgccatcgtccccacggccgaaggtaccgaactgcgctacaccttcaattcgggccgcgccccctacctgcagctggccaaggatattgccctgtacagcctccccgacagcttgagcatcatcctcaacacgggcgaaacgctggtaagcaaagtgacgctcacgatgaaagagaatgcctcgatgacctcgaccctcaccgagtttgaagatattccccagaataccgactatgccatctccatccccatggacggctatttcgaaaactaccgcgacatgtcgcactaccccgtcatcttcaagagtttgaagctcttcatcaccggttcgtcgcagactgccggcaaccaatacgccctcaagctcaaggagttctcgctcatctacgacggcatcacggtgaacgtatcgaatcccgaggtagcctcgctgctgcgggtatatcccaaccccgtgaaggctggcgacgcacaggtatacttcgcccttcccgagagcgccgaagtgagctgcgagctctacaacctgggcggccaactgctcaaccgggtagagatgggtctgatgccggccggcgaaatagctctgcctaccggcaatctggccagcggcacctatctgctcaccatccgtcgcggcaaccaagccgatacggtaaaactgattatccgataa

SEQ ID NO: 159 - DNA, 717 bp, unclassified Barnesiella
atgagccacgaagagatgcaccgtcgggggttgcctcatgggcacgacacggcggtcgatattgccgtagagcaggatatattgagtgacaacaatcgggtggcccggcaaaatcgggctcgctggagttcgatggggtgtgtggccatcaatctggtcagttcgccgggatcgggcaagaccgcattgctggaacagaccctcgtccgtctggacgagcggggattccggcgagtggcagttatcgagggcgaccaacataccgacaacgatgccggccgtatccgtcgactgggtgttcccgccgtccaaatcaatacccacaacggttgtcacctcgatgcccgcatggtggccgaggcgttcgacgagctgcaagtctccgactcgctgctctttatcgagaatgtaggtaatctggtctgccccgccatgttcgatttgggtgagcatctgcgggttgtcttgctgagtgtaaccgagggcgacgacaagccgctgaagtatccctatatgtttgctggggccgacatctgtgtaatcaacaagatcgatttgttgccctatgtcgatagtcgtatagaccggctgaaagagaatgccttgaaaatcaacgcagatattcgtttttttgaaacatcggccactcgaggaacggggctcgacgcgtggtgcgactaccttggctcgtgtctcgagagaaaggaggcaatatga

SEQ ID NO: 160 - DNA, 717 bp, unclassified Barnesiella
atgaaaccgtcgtatacggacggtatcgtcggtcctgaaaatagtgttatgagtcacaatacccttaccatgctgggcacgggcaatgccatcgttacccgctgctacaatacttgttttgtgttgagtaccgaaacctcgcgatgtctggtcgatgccgggggaggaaacggggtgctttcgcagctcgagaaggcgggcatcgacctgagctccctgcacgatatgtttgtcacccacgcccacaccgaccacatactgggtgccgtgtgggtagtgcgcatgattatcaaccgcatgaagagcggccggtacgaaggagccttcaccgtgtatggccacgacaaggtgctgacggtactcgactggatatgccgcatgaccctctcggccaaagaccgggcctatctgggtaatggggtactcttccacgaggtgaaggacaaggagcgtttcgaggtgggcgacatgcagtttcagtgtttcgacatcctgtcgaccaaggagaaacagtttggtttccaggtagcgctgcccggcgggcagcggctggtatgcctgggcgacgagccctacaacgaggccaaccggtcgtatgtagagggggccgactggatgctgtgcgaggccttctgcctctatcgcgaccgcgacatcttcaagccctatgagaagcaccacagcacggcactcgaggcagggagtctggccgagcag

SEQ ID NO: 161 - DNA, 444 bp, unclassified Barnesiella
atgagtaccctggccgacagcgtgttggctcacggtggcgaagtgctgggagtgattccccagtttatgattgacgaggggtggtgccacccgggtctgacccagaccgtagtaactgccgacatgcacgaacgcaaggagcgcatggcccaagaggccgatgccgtcattgccctgccaggcggctgcggcaccttcgaagagctcttcgagattatcacatggaaacaactggggctcttcctcaaccccatcgtgatacttaatatcgacggatattacgaccccctcatcgcgatgctgaacaaggctatcgacgagaacttcatgcgccacgaacacgcccgcctgtggcaagtggcccagactcctcaggaggccatcgacgacatcttaaacgctccggcctgggaccccagtatccgcaaaatagctgccatctaa

SEQ ID NO: 162 - DNA, 939 bp, unclassified Barnesiella
atgagtcaaacacctcccttcaaggtattttcgggaaccaattcaaggtatctcgctgagaaaatctgtaatagtctgggttgcgaattaggccaaatgaacattcagcattttgccgatggtgagtttgccgtctctttcgaggagtcgattcggggctgccaggtatatctggtgcagtcgaccttccccaattccgacaacctgatggaattgttgttaatgatcgacgccgccaaacgcgcttcggccaaatctatcgtagctgtcgttccctacttcggttgggctcgtcaggaccgcaaggacaaaccccgtgtttccatcgccgccaaactcctggccgacatcttgagcgtggccggtatcaaccgcctcatcacgatggacctgcacgccgatcagattcaaggtttcttcgatgttcccgttgaccacctctatgcttcgtcggtattcattccctatatccagtcgctgaacctcaaggatatggtggtagctacccccgacgtaggcggttccaagcgtgccagcacctatgccaaatacctgggtgtgcctctggtactttgccacaagcaacgcgccaaagccaacgtagtggagagcatgaccgtgattggcgatgtagagggcaagaatgtaatcctcgtcgacgatatggtcgacaccgccggcaccatcaccaaggctgccgatctgatgataagcaagggtgccctttcggttcgtgccatcgcttcgcatgccgtgatgagcgaccccgccaccgagcgtgtacagaactcgtcgatgaccgagttgattttcaccgacagtatcccctacaccaagcagtgcgacaaggtgcacatcatcagcatcgccgacctctttgccgacaccatccgccgcgtgtacgaaaacaaatccatcagttcgcaatacctgctgtaa

SEQ ID NO: 163 - DNA, 915 bp, unclassified Barnesiella
ctcgaccgggccttggcccgggccgaacgctatcggtcggattacgagttccgcagctacacgatgaaggaggagaacaaggtaatcagacgtcaccaaatcgagatgtacaagaagtttaccctctcgtttgcctgcatcatcttcttcttcataggggctccgctgggggctatcatccgcaagggtggactgggtatgccggtggtggtgtcggtgttcatgtttatcttctactacatcatcgacaacaccggctacaagctggcccgtgatggccgctgggaggtttgggaaggcatgtggctcagctcggcggtgcttttgccattgggtatcttcctcacctacaaggcggtgaaggattcggccgtattcaaccccgacgtctatgtcaacttcttccggaaactgattgggcggcaagagctgcgcaaggtggttttgaaggaggtgattatcgaagatatgtttccccgggtggccattgagaaggccgaacagttgtcggtagcctgcaaccggtatctcgacaaggtggggcgcaagcgacagtcgtattggaggtattgtctgtatggatatgccaaggaggatattacggccctgggagcccagatcgacgatttggtcaactacacgtcgaatagtcacagtcagctggttatcagtaagctgatggattatcccgtgttgcgtaacctctgggtgtatcgtccggctccttcgcccaaatggggctatgtgctggccatctttttccccctgggattgttgctttacggggtaggggcgcaccagcagcgtctgttgcgcaacgaggtagaaggggtgattcgcaccaatggcgagttgcaggctctgctcgagaaggatgaggccgatcgaatgaacgaagaagataaaactatataa

SEQ ID NO: 164 - DNA, 828 bp, unclassified Barnesiella
atgaaacgctcgaccatagtcctgttaattgttctggcagtgatgatattcgcccccatcatcgccatcaaagtcatcagcaacctctcgcccgaaacgaaattgaagagtctgaaagagttgctggattataatgaaaatgccaacgcccccgtgcggtacctcgttatcgacgataccgacaatgactcggtatactcctgcatctgcatcttcatctcgacccgcgacaagaaagattcccggaagggtatcgtctttgccaacggcgaaaactacacgggcgacaccctgcacctcaccgaccagtggctggagcagccgtcggccgacgactcaaacgactcgataccccagtcgtggttcggcaaacagactctcgactacgaccataatacccaactcatcgtcgagaaccacaaccccaacgtcacgctccatttctcggagagcaacttcgataaactcatcgttcaatcgcaaggcgacgtggtcgtgcgggaatcgaacgtgggcatgctcgtcgtgcaggacagcataggccacagtgggactgcctgccagcaatgcaatatcggcacactatttgcataccttaacgacaaatgttcgttgagcctctcgaaaaacaacataggcaccgccttccttcccaaggcgctcaactccctgtcgatcgagggcaacaacattggtgtgaccggctctatcgacctcatggagttcaacctgtcgaagtcgatcgacaacgacagtatcgacgccgtgagtttcggcatcggtatgaaatacacctccgacgacaaggataaaaaagagaaaaaataa

SEQ ID NO: 165 - DNA, 690 bp, unclassified Barnesiella
ttcgtgcagatccagctcaactacgtcgactggcgccacgcctcgggcaataacgtcaatgccgaatatctctatgccgagctggaaaaacgacacatccccgccatcatcatggagcccctgttgggcggccgcctgtccaacgtacccgaccacattgccgccaccctcaagcaacaggctcccgagtcgagcgtggcctcgtgggcattccgttttgccggctctcacgccgatgtgctcaccgtgctcagcggcatgacctacatggaacacttgcaggacaacctgcgcacctattcgcctctcgacaccctcaccgaggccgatctggaattcctcgaagagacggcacaactgatgctgcgctaccccaccatcccctgcaacgactgcaagtattgcatgccctgcccctacgggctcgacataccggctattctgctccactacaacaagtgcatcaacgagggcaacgtgccggcctcgtcgcaagacgaaaattaccgcaaagcgcgccgcgctttcctcatcggttacgaccgcagcgtacccaagttgcgccaggccagccactgcatcggatgtgggcagtgcgtatctcattgtccgcaaagcatcaacatacccaaggaactgcaccgaatcgaccgctttgtcgaggaactgaaacaaggtaaagaattttaa

SEQ ID NO: 166 - DNA, 447 bp, unclassified Barnesiella
gtgaagacctcaaaaatttatccttggattgttgttgctcttttgtggggtgtcgctctgctcaactatatggaccggcagatgctgagtaccatgaaagatgccatgcaggtcgatattgtcgagctgcagtcggccaccaacttcggttggcttatggccatcttcctctatatttacggattcatgagccccgtgtcgggcattatcgccgaccggctgaaccgcaaatggctcattgtgggcagcctgttcgtgtggtcggcagtgacctacctcatgggtattgccactaccttcaatcagattttctggcttcgggccctcatgggggtgagcgaggctctctatattccggcggggctttcgctcatagccgattatcacacgggtaaatcgcgctcgctggcagtgggcattcacatgacgggtctctataccggccag

SEQ ID NO: 167 - DNA, 327 bp, unclassified Barnesiella
atgaaagagtggaatgacgaccagtggcgggagcttttcgaccgacacactccccaaccccggcacgaccggtggtttacccgccgggtgatgaaccgactgccgcgcaagcggtggagcctcgagacgaaaatttcgctggtggttctggtgctgatattgctcatctgcacggccttgtgtgtagcttttgcccgcgagctgacagcgaacccctgctggaactgtgccggtacctgggtgatgtatggagccttgaccgtggcctgtatcctgttgggcgcacaggcgaactctttcttccggtcgatttacgacgcttcctga

SEQ ID NO: 168 - DNA, 2100 bp, unclassified Barnesiella
atggaaaatgttcggaaatacttcaaacgcgatatcagttggttatctttcaattaccgggtattgatggaggctatggacaaaacggtgccgttgttcgaccgcatcaggtttctgtcgatataccagtcgaatcaggaagagttttatcgcgtgagggtttcggagtatcaccagattctgtcggactcttcgaaaagcgaagaggagaaggagcaggccgaacggactctggagtcgattaaccgggaggtcaaccagcaggtcgacgacttcaacaaattctttttcaacgacatcatccccgaactcgagcgcgagggtatggtgctgtaccatcaggagaaaatcgaggagtgccaccgggacgaggtgcgtaacttctttaaagaagaggtattcccttttttgcagccggtgttgatattgaaagacgacatcgtctctttcctgcgcgacaaccggctctacctggccatcaaaatgtatcggaagagcgaacgcaacaaccccgaccgacaaccgttctatgcccagataaagattccgttcagcaaagtgccgcggtttatcaagctcacgccgcacaacggaaagaactacgtgatgtttatcgacgacatgattgccttgaacctcgacatcgtcttcccgggattcgacatcgactcgcactatgcgatacgggtctcgcgcgatgccgacttttccatcgagcccaaagagggggtcaacattgtcgatgccgtgcgcaagcgggtcaagaaacgcaagataggcaacgccaaccggttggtctacgacggctgcatgccccacgacatgctggagtatatctgcgaggcctacgacattccgcacggacagtgcatccgctcgagccggtatctgaatctggaggacctgaccaaactgcccaacctcaccggcaaggtattgagcgagacactcccctcgcccatgcggttacccatcttcgacaatgcgccatcgatgttcgaggtaattcgtcaccgcgactttctgatacacttcccctatcagtcgttcgactacctcacccggttcctgaccgaggctgccgagaacccggccgtgactgaaataaaactcacacaatatcgggtagccgaaaactccgaagtgatagaccagttgctctacgccgccaaacaggggaaacaggtgacggtatatgtcgaaatcaaagcccggttcgacgaggagaacaacatcatcacttcggaactgatgcaggagtcgggtgttcgtgtcgtatacagcaccccgggattgaaggtccatgccaaggccttattggtcaagtgtgcccctaccgacagctctcacccccaagcctatgctttcatgagtaccggcaacttcaacgaagacacagcccgcatctactccgacatggggctgtttaccgtcaaccgcgccattacgagcgaactcgacaagctcttctccatactcgacggttcttcaaaagaccgcgatttcaagacgttgctcgtggcccagttcaacatggtcgacgagttgaaacggaaaatacgtttcgagatggaagaggcccgtcagggacggaaggcacacatcattctgaaaatgaacggcctgcacgacacgggcatgattgatgccctctacgatgccagcgaggcaggcgtacacatcgacctgctggtgcgcggcatcaactgcctggtacccaaccagccttacagccgcaacatacacatgacgcgcatcatcgactcgtacctcgagcatgcccgcatctggtacttctatgccgggggacgcgaagaggtatatctgtcgtcggccgactggatgcgccgcaacctgaaccgccgcatcgagaccgccgtacccattttcgaccagcatatcaaaaacgaaatcctgtcggtcatagacctacagttgcgagacaatgtaaaagcctgccgcatagacgaatatctgggtaaccaatatgtccgcaccccaggcccacccatacgctcgcaacggatgtgcttccacctgctggagcagtactctacccccgactctgctgcgggcatgcccgagatatttatcagctag

SEQ ID NO: 169 - DNA, 1659 bp, unclassified Barnesiella
atgaaaagaatatataagaacctcattggtgccgtttcgttgctttgggcatttggtggatatgccgaaactactttgtgccagtttgagaaagttgattacagcgcaatctccacctatgattattgggaccagtctccgttcaataccggcttgctgaccggtcagattgaggtggtagacaacccggtatccgacgatataaacgggtcggccaaggtgctggctttccagcgttcgcgatatggcagccacttgtacggtgcccgcatcgatttgacttcgcctattgctttgtcgcccacaccgcaatacatccatgtactgatgtataaacctgtggccggtcgtgtagctcttgtcggactcggtaaacgtaacgactgggccgaccagccggctacgaccgtacagtttgtgacggctgcaaccaaggagatcgacgccaacaagtgggtcgatgccgtattcagtgtatatggcaacgatgctgccgagctgcatagcattgtcattgtgcccgatgtagattcgcacctggctaccgaaaccgattacgtagcctatttcgatgatattctcatcaacgacgattcgcaacagcgctttacgttcgatccctatcctttgaacttcgatgccacgcaagagaaaactcgtaatgaccgtgctctcgagggccttgcattctcgggtgatatgggcgcttcgtatgagtcggatatcgcaagcgaaagaaccgtatatgtcgataagacttcggccgatcccatcgaattgaaggtgggcgagaccgtcaatgtagaatttacctacaccggtagctggatgcaccggtatgtatacatcgataaaggcaatgacggtcgtttcgatgtagatattcagaacaatgttcctaccgccagcagcgatttggtcgcctattcttatttgtcgggctataacagtaccggtgcatcggcttcgaacgatacaagcctcgatcctcctgcatttacgcttgcttccaacatggcgccgggcttctaccgcatccgttgcaaggtcgactgggatagctcggtggctgccggtaacccggcttccgacaactcggttgtagccaatggtggtggtattgtcgattacctggccaatgtacaccgcgacaatgtggctttgaatgtagtagcgagaatgtgcgaagtgactgccgccgacggttcggctctgcctgccgagattccctttggcgaagacttctcgttcaacattgccatggacgacaactacgacattaccggtcttgaaatcaagcacggttacaaccacgagggcgaagagtatctgttcggtaaccgtcagtggaaagtcgataatatggagcttagcgaagatggtttgattacaatcccggccgaatatatcgacggcgatgttgccatcacaatcttgttcgaaaacaaatcggttggcatccaggagccggagaacgacggcttgagagtgattgccggtgaaaaccaaatcgagctgctcagcaacgaggaggttgactattcggtagttcatgtcaacggcgcttgctatgctacgggcaaatttgccggacgtgaagtaatcgagttgccggccggtgtctattttgtaaatggtcaaaagtgtattgtacgttaa

SEQ ID NO: 170 - DNA, 828 bp, unclassified Barnesiella
ctggagaccggggtcgtgcacctgtcgcctgccgtgatggactatgtgtgcaaccgtcggaaatcggacgagctgacgacctatcaggtgagcgagtatggtttcatgctgggcttgaactcgaattacacgacgattgccgagaagtttaccctccccgacaatgcccggggcgaggtcgacgaggtggtcatctatacctacctctatgctctggatgccgcgaaccagaagaagagtttgattttgagtatctatgacgagggtcccgacggactgccgggcgaagctgtcgcttcgttctcggggcgcctgggcgaactcttcgggagtgaaaactcggtgggccagttctgtacggcattcttcccggccgtagaggtgacgggcagtttcttcgtggtgctggaattccccgagattacacccgatgccgacaatatgctcgggttggtttcgacgaagagccgtacccaagacgactgcacggcttatgccaactatcagggccgctggtatgcgatgaacagcctctatggcggcgccaatctgtcgtcgatgatttcgccccgctatcggtttgtagcggtttcggcggttcagaatgtcgcaaacgactcggccctctcgctgagtatgacgggcgagacactgtatatacggggaaccgttgccggtgacctctatcgcgtgttcgacctgtcgggccgtatggtggccaccggtgctacggatgaggccgaaacggtcgtatcgctgtcgggcctttcgagtggcgtctatgtggtttgtgttggcggtaggcctgtggggaagatggtgagatag

SEQ ID NO: 171 - DNA, 441 bp, unclassified Barnesiella
atgttggtcgtcgtgctgggaagcgcgggactgctattcgctcaaaaaagcaaccaaaaggaggtaaaacaactgcagagtttcttgcagcagacctcggccaaaggcgatgccaattatgtgcgcttggaaatcaccaatatcaataatccgacctcttggaagggggtgacctggagcggaggtcgggtaatctcgattgagtggtcggacaagaatctggccggagagctcgacctggccggctttaccgccctgcaaaaggtcgattgctcgcgcaaccagcttaccggtatcgaggtgtcgggctgtacggcactcaataccttgaacgtaagccgcaacaaactctcgacgttgaatatcgacaactgtccggccctgatcaagctcgattgctataagaatcggcttaccgacctgtcgctcgcggggctgccg

SEQ ID NO: 172 - DNA, 789 bp, unclassified Barnesiella
tttggttacgagtatgccatctgccgcgataccctctgtatcaagaggggcgaggaagaccatctgcaaaacaccgcttttgccgtgccggtggggagtctcgatttgaaagattcattgccgctgctgggggcttactgccgccagcacgggttgccgtttatcctctcggccgtgcctgaaccggcggcgcaggccattgccgaactctatggttgccccatcaccgagctgcccgactggggcgactacctctaccgggctaccgacctggctaccctcgtggggcaccgcttcaacaagaagcgcaaccgggtgaacaagttcaagagcacctatcccgatttccaatacgaagccatcacgccgcagaacctgcccgaactgattgccttcttcgaccgctacatgcaggcctatcacaaagacagcgagctgtttgcctacgaagagagcatggtggctcaagtgctgcgcgagtatgaccgattgccgttcgaagggggtgtactgcgcgtggggggcgagattgccgccttctcggtgggcgaagtggtgggcgataccctggtcgtgcatatcgagaaagcccgtaaggaggtggtgggtgcctacgaagccatcaatctgttctactcggcacagatggtcgaggctcaccccgaggtgcagtacatcaaccgtgaggacgatgccggcgatccgggtctgcgcgaggccaagttgtcgtacaaccccgagaccatcctgaaaaagtacaacattccgctcgacgactatctgcgttaa

SEQ ID NO: 173 - DNA, 1053 bp, unclassified Barnesiella
atgttggatattgagaagataagagccgattttcccattctgaaacgtgaggtgtcgggccgtccgctcatctatctggacaacgccgccacctcgcagaccccccgctgcgtggtcgaccatattgccgatacctactatcgggtgaatgccaacgtgcatcgtggggtgcataccctcagccaggaggctaccgatgcccacgaggcggcccgtcgccgggtgcagcagtttatcggggccgcttcgcccgccgaaattgtctttacgcggggcacgaccgaagccatcaatctggtggcctcgtcgtttggcgacgagttcctgcacgacggcgacgaggtgattctcaccgtcatggagcaccatgccgatattgtgccgtggcagctcttgcagcgccgccgcaaaatcaagttgcaggtggtccccatcaacgagcggggcgaactcgaactcgaggtctacaagcagctcttcaacgagcacacgcggttggtgtgtgtggctcacgtctccaacgtgctgggcaccatcaacccggtgcgcgagatgattgcctacgcccatgcacaaggggtgccggtgttggtcgacggggctcaggccatccctcacctgcgggtgaacgtgcaggagctcgatgccgatttctacgccttctcggctcataaggtatatggtcccacggggataggtatcctctatggcaaggagaagtggctcgatgccatacctccctatcagggaggtggcgagatgattgcgcatgtcgacttctcggggacgaccttcggcgaactgcccttcaagttcgaggccggtacgcccgactatgtgggtacggccgcttttgcctcggcgctcgactatgtcgacagcatcgggctggaggctatcgccgctcacgaaaacgagttgttgcgctacaccaccgcgcagatggagcaaatcgaggggatgcgtatcttcggcacctcgccgcacaagagttcggtcatctcgtttctggtcgacggtatccaccactacgacatgggcatgttgctcgac

SEQ ID NO: 174 - DNA, 936 bp, unclassified Barnesiella
cgtcaccccgagtgggccatccactaccccaaccgcgacacctactactaccgcaaccagctggtgctcgacctgagcaaccccgccgtgcaggagtatgtatacggcatcatagacaagctgctgaaggagaaccccgacatcgcctacttcaagtgggactgcaacagccccatcaccaacatctactcgccctacctcaaggccgaccagggacaactctacatcgaccatgtgcggggcatataccgggtgatgcaacgggtgcacgacaactacccgcaggtggccatgatgctctgctcgggcggcggtgcccgctgcgactacgaggcgttgaaatactttaccgaattttggtgcagcgacaacaccgaccccgtggaacgtgtttatatacagtggggcttctcgcacttcttcccggccaaggccatgtgtgcccacgtgacgagctggaacaaagaggcgtcgatcaagttccgcaccgatgtggcgtcgatgtgcaagttgggtttcgacctggggttgaaggagttgagtgccgacgaactgctctactgccaggaggctgtggccaactggaaacggttgcaaccggttattctcgacggcagtcaatatcgcctggtttcgccctacgagagcaaccacatggccgtgaactatgtcggggccgacagccgcaaggcggtgctctttgcctatgacctttacccgcgctaccaggagaagctgctccccgtgaagctgcagggcctcgacccgcacaagcgctacaaggtcgaagagataaacctcatgcccggtgtagagtctaccctgccggccaacggcaaagagctctcgggcgactatctgatgaaggtaggcctcgacgtgctgggtttcacccccatgcgaagccatgtaatagaaattaccgcgatagattga

SEQ ID NO: 175 - DNA, 738 bp, unclassified Barnesiella
tttacacgggccgaggagcagtatgccatcgctaccgacctggccccctccaaccccgagaactggttgcagctgatcgggctgtatctctatcaggagaagtatgccgacgtgatacgggtgggcaagcgggccatacagtatgtgcccgaccagaaggatatttacatgtatgtggcggtagccagcacgcagacgaagagctatgccgaggcgctcgagatgctcgagacgggactcacctatgtcgacgagggcgacaacggcacgaagtcgttcttctacgggcagatgggcgatgtctatcactcgtcgggcgaccgcgagaaggcctatgccatgtacgacctggcgctgtcgtacaacgcctcgaacataccggtgctcaacaattacagctatttcctggccgtcgaagggcgcgacctcgacaaggccgaacggatgagtgcccaaacggtgaaagccgaacccgacaacgccacctacctcgatacctatgcgtggatatttttcaagaagggcgactactcgctggcccgtctctacatgaagaatgccatcgacaagagccccgaacccagtgccgaactgtatgaacactacggcgacatactggccatgctgggcgagctggacgaggcggtgacctattggcaaaaggccctcgacctggggagcgagtcggccgatgtattgaaagagaaaatcgagcaaaagaaatatattgagaaatga

SEQ ID NO: 176 - DNA, 453 bp, unclassified Barnesiella
atgaaaaacaaatggcttgtagcggctttgcttgccggtaattcctgggcctgggtcttggctgccgatgtagacccggtcattatgagagtaaacaacaaggatattcacaaatcggagttcgagtatatctacaacaagaacagccagcagcaaatcgaccagaagtcgctcgacgaatacgttacgctatttaagaactataaactcaaggtggccgaggccgaggctctgggcatcgacacgaacgccgctttcaaaaaagagttggccgggtatcgcgacgagttggccaagccctatctcatcgattcgtcggtcgacgagaagttggcccgcgaggcttacgaccgcatgaaagaggatgtagaggttagccacatccttatcggcctcaatgcccgcactcccgaggagcgtgcagccgcacggcagaaagccgactcgatattg

SEQ ID NO: 177 - DNA, 1542 bp, unclassified Barnesiella
cggttggccgaggccatgaagaatttgccggccggctttgagaccgacaagatattcttccagcccgacaaggtcgacgaggccatctcgtcgttcatgtggaatctggtcgagtcggtcgttatcgtcattctggtgctcatcttcacgatggggtggcgcagcgggctcatcatcggcttcggtctggtgctcacggtatgtctctcgttccccatcctgctcatgtgcggtaccacgctgcaacgcatttcgctgggggcctttatcgtggcgatgggcatgctggtcgacaacgccgtggtgattatggacggtatcctgatagacaagaagcggggcctcccgcccgagacctatctctaccgtatcgggcgcaacacggccatgccgctgctcggggctacgattattgccgcctcgaccttcctctgtgtctatctctcgcccgattcggccggcgaatatgccggagacctctttctggtactgtgtgtgagcctgttggccagttgggtgctggctcttgtgcaggtacccgtttgcgcccactcgtggctgccgcgccgcgagaagaggcggggcagcgataccaccggggcggtgatgaactcgccggtacaccggttcgtgcgcaagaccatttcactactgatcgggtacaagcgggttacgattgccgtagccgtggcgctgctggtcgtttgtctggtgggtatgaggcaggtgaagaacctcttcttccccgactttgactacaaacagtttgtggtcgagtgctttttccctgcggaagccaatgccgatacggtgtgtgcccgcctgttggagatgagcgaccgggtgtcgcagaatccgcagatcgagcgggtggccgtcagccagggcagtgctccggcccactactgtctggtacgccccatgacctcgggcggtgactgctacggcgagctgattgtcgattgcaaggattaccgcacggtggtcgagcagatacccgtggtgcgggagcagttgcgtcgcgagtatcccgaagcctatatccgcatccgcaaatacaacttttcgatttctacctcgcataccgtcgaggtggagttctcgggtcccgacccggccgtattgcgccggttgagtgcccaggccgaggagattatgcgccgttcgccctatgtcgatgcctattcggtgcagaacaactggaagccgcggggaaaggtgctggtggccgagtatgaccagcaggacgccttgcgttcgggtgtcgggcgcggcgatgtggccaatgccctgctggctgctaccgacggcatgccggtgggtgtgctcaacgaccaggaccgtatggtgatgctcaacctccaggtgcgcaacgacgacggcacgaccatccgcaatcttgcggatataccggtgtggagcatgctcaacttccacctctcgaacgaggcgttgcagagtgccttgtcgggcgggcagagcatgagcgacctgcaggaccaacttttcaaggccactccgttgagcaatgtggcccaccat

SEQ ID NO: 178 - DNA, 534 bp, unclassified Barnesiella
tacgacagccacattgtcgaccagtttgagcaggagggcaattttgtctatgtcgatgtaggtggtggcagtaccgaggtgagcatcatcagcaaccgctcgttgttgcagtcccagtcgtacaacatcggtacggtgcgtatcctcaacaagaagttgagccgcagcgaactcttccgcatgtaccgcgacttgaggcgggtgaaagagtcatatccccgaatctccatcatcggttcgggcgggaacatcaacaagctgcaccatctggccaaaataccggctcgcgagcccctcaccgtagagcgcctgctcgagttgagaaacgagctcaacagctatcccattgtcgagcgcatcgagcgtttcggcctcaagcccgaccgtgccgacgtcattgtgcctgcagccgacatctatctgcagatagccacacacatcggcgcgcaggagatatgggtgcctaccatcggtatcgtcgacggtatcatctattcgctctgctccgattatctggagatgcacaaaaagtaa

SEQ ID NO: 179 - DNA, 2082 bp, unclassified Barnesiella
atgaaacttacaatcaagtcctacaccatactattgttgttctcgctctcttctctctggtctgtggctcagatcaacaccgaccgggtgatgaatatcgggcgcaacgctctctacttcgaggattacatcttgtcgatgcaatatttcaatcaggtaatcaaggtgaaaccctatatggccgagccctatttctaccggggtatcgccaagctcagcctcgacgactacaagggtgccgaggaggattgcacgctctgtatcgagcgcaacccctttatcgtgaacgcttaccaggtgaggggtatcgcccggcagaatctgggtaattatcaaggggccatcgatgactataccgaggggcttcgctatgctcccgaagatcgtactttcctgaacaacaaggcgattgctgaggtacagctgaaaaaatacgacgaggccgaaaagagtttcgacaagcttatcgccctgcatcccaactactacaacggctacatgagccgggcgcagttctacctcgagaagggcgacaccatcaaggccatggccgacatcgacaaggctatctcgatagacaagtacatgtcgggggcatacgcccagcgggccatcatcaaggtgttgcacgatgccgactacgactcggcgctggccgatatgaacgaggccctgcggctcgaccccaaggaggtttcgtactacttcaaccgggcccgtatcaagtatcatcaggacgatctgcaaggtgccatggccgactatgaccacatactccagctcgaccccggcaacaccatgacccactacaaccgcggtctcctgcgcatgcaggtgggtgagcgcaacaaggccatatcggactttacagaggtaatcaaggccgagcccgacaactactttgccatctacaaccgggccctgctctacgatatgataggcagttacggcaaagccattgccgacttcgacgtggtgctgaagcagtaccccgactttgccgccggtttctttgcccgctccgaggccaagcgtaaaatgggcgatatgaaggggggcgagaaagatttcatgctggccctcgacctgcagaagaagaccaagtacgaacccatcgacgaggctagggctgccgccggtaccacgagcaaatcgggacaggctgccgacgagcgttccgagtcggacaagaacatcaacaagttcaaccagatactcgtggccgatgcccaaaccgagtacaaacccgagtatgagaacaaaatacgtggccgggtgcaagaccagaacgtgcaggtgtcgatacaacccatgtatgtgctcacctactacgagcgccccgatgccgtgcgccagaacatctactatgtcaaggagctggaagagctcaacgatacccatgttttcgccaagaaactgctgcttaccaactccgaggccgctttgctctccgaccagatcaactaccatttctcttcgatcaacgacttctcgcgtctgatcgagatcaacccctccaacccgttggcctacttcggccgggcggtcgacttcatgctcgtgcaagactttgccagtgcgctcgacgacctcaaccgggccattatgaccagccgcaacttcaccatggcctacttcctgcgggctgtcgtgcgggccaagcagattgagtatgaaatctcttcggcatcggctcagaatctcgacttccaggcccagcgcaagaaagagggcaacgactttaccccgatgggctttgcggcactggggaacgaaaacctgaagatggagtacgaaatggtattgcgcgactacgaaaaagtgattgaagattcgccccgattcatctatgcctactacaatcgcggcaacctgcgctgctcgcaacaagactatcggggagctattgccgactacacccgggccatagagttgcgtcccgactttggcgacgcctactacaatcgcggtctcgtctacttgaggcagggcaacaccgctgccggtactgccgatttgagtaaagccggcgaattgggcgtggtggcagcctacaatctgttgaaacggttgagtgactaa

SEQ ID NO: 180 - DNA, 831 bp, unclassified Barnesiella
atgagagcgataaccgttgccatcacttcgttatgcctgctggcggccatgctgctgaccggctgcatcgacgacgacttcaccacgagcccgtcgcacgtgcttgcgttctcgaccgacacggtcgccttcgacaccgtattcaccacgataggtacctcgacccgctcgttccgcatctacaaccccaacaagaaatcgctcaacatctcgagcatcaagctggccgacgccgaacactcgggattccacatcaatgtcgacggcatgtcgggcgactactttaccgatgtcgaaatccgaggcaaggacagcctctatgtctttgtcgaggccaacattgaccccaccaaccaggacaaccccatctttatcgtcgactccatcgtcttcctcaccaacggcgtgcagcaggatgtgaagctcaccgcctacggacaggacgtcatcatcaagcggggtgagaccctcactaccgacacccggctcacggccgaccgcccctacctcatctacgacagtctggtggtggctcccggtgccacgctgcaactcgacccgggcacccggctgcacttccacaaccgggcctcgctgctggtgcagggacgcctgcaggccgagggtactcagcaggctcccatacagatacggggcgaccggctcgaccgcctctttgccgacctgccctacgacaatctgggcggacagtggggcggcatacacttctaccccgaaagcacgggcaatgtcatctcccatgcctatgtgaggggcatgagttcgggcatcgtgctcgactcgtgtgccactgaagagatgcgcctcgag

SEQ ID NO: 181 - DNA, 435 bp, unclassified Barnesiella
atgaatattcttctcgatgtacatacgcacacgatagccagcgggcatgccttcagcaccttgcaggagatggtacaggccgcggccgacaagggtttgcagatattgggtattaccgaacatacggggggaatccccggcacctgctccgacatctatttccgcaacctgccggtagtgcctcgccggatgtatggcgtggagttgctgttgggtgccgaaatcaatattgtcgattatgcagggcggctcgatttggaagagaagtatttccggtttctcgacctgcgcatagccgggttgcattcgctctgtttccggccgggcgacatcgaccagaatacggccgccgtgctgggggctatctgtaacccgcatatcgacatcatcagccatccgggcgacggcacggccgagttgtatttcgagccgctg

SEQ ID NO: 182 - DNA, 396 bp, unclassified Barnesiella
ttccgcggctggcaattccgcgaggcccgtctcgaccagctcacccccggcaagagctaccgggtgagcggcatcaaggtggtgcgcaagggccccttcttctccaactcgggcagcttctacctcgacaacatgctggcctacacctcgtcgggtatccagtccgtagccacctcggcctcgattcaggtataccccaacccggccaccgacctgctgcacatccagtccgaggctcccgtgcaacgcgtagccctctacaacctggccggtagctgtgtagccacaggcaccgaagccgtgctcgacgtcacgggtatccccgccggtacctacctgctccagatcagagccgccgaccacaacttctgctacccggtattgattgttcattag

SEQ ID NO: 183 - DNA, 2091 bp, unclassified Barnesiella
atgggaaacaacaacatgtctccattagggcctaataagaagaagcgcatccggttcaacctgtactggatgtatgcgattatcgcactgcttctgtttggcctctactatgccaacgatccttcgatgagcaaggaggtgaactggtcggaatttgaaaagatagccaaggagggcggcatgaccaacgtaacggttcatgccaagaaagactacgtcgaggctcaactcaacgacagcacggccaaagctattttcaaaaccgacaagattaccggcaagcccatcgtatacaccaacataccctcgggcgacagttttgccactaccctcgaggcgtggaaaaaagactacggtttcaaagccgatgtcaactacgagaacagcagcgatctgaccaatatcctgtggaccttcggccccatcgtattctttattatcttctggatttatctggcccgccgaatgaccaaccagggtggcggcggtggtggcggcgtgttcaatgtgggcaaggccaaagctcagcttttcgacaaggacggagccgtgaaggtaaccttcgacgatgtagccggactctcggaagccaaacaggaggtcgaagagattgtagagtttttgaagaatcccagtcgatataccgacctgggtggcaaaatacccaaaggcgctttgctggtaggtcctccggggaccggtaaaaccctgctggccaaagccgtagccggcgaggccaacgtgccgttcttctcgctgtcgggttccgacttcgtcgagatgttcgtaggtgtgggtgcgtcgcgtgtgcgcgacctcttccgccaggccaaggagaaagccccctgtatcgtcttcatcgacgagatcgatgccgtgggtcgtgcccgtggcaagaaccccaacatgggttccaacgacgagcgggagaacaccctgaaccagttgcttaccgaaatggatggtttcgggtcgaacagcggcgtcatcattctggctgccaccaaccgggccgacattctggacaaggccctgctgcgtgccggacgtttcgaccgtcaaatctacgtagagttgcccgagttgaacgaccgaaaggccatcttcaaggtacacctgcgcaacgtgaagatcgacgactcggtcgatgtagacctgttggcccgccagaccccgggattctcgggggccgacattgccaacgtctgcaacgaagccgccctgattgccgcccgcaagaacaagaagagcgtacagcgtcaggactttatggatgccgtcgaccgtatcgtaggcggtctggagaagcggtcgaaaatcacgactcaagaggagaaacgctccatcgccatacacgaagccgggcatgcctcgatcagctggctgctgcaatatgccaacccgcttatcaaggtgaccatcgtaccacgcggtcgcgcgctgggcgctgcctggtatctgcccgaagagcggcaaatcaccacccgcgagcagatgctcgacgagatgtgtgccacgctgggaggccgggccgccgaagaggtattcctcggacgcatctcgaccggcgcctcgaacgacttggagcgggtcaccaagcaggcctacgccatggtggtctacttcggtatgagcgagcagttgcccaacctctcctactacgactctacgggtcaggagtatggattcaccaaaccgtacagcgaagagacggccaaactcatcgacaaagaggtgagccgaatcgtaaacgaacagtacgagcgcgccaagtcgattctgcgcgagaatgccgagaagcatgccaaactggccgaggtactgattacccgcgaggttatctttgccgaagacgtggagcagatattcggcaagcgtccgtggatttcgcgtaccgaagagatactgcaagacgaagaggcagccaagaaggaggaagaggccgaacacaaaaaaccggaggccgaaggcaacccgacaccatctgacgaaaaacctcaaccgacagctgaaggcacggccgaccaacccaaggctgaaaacggcgaaacaaaaggaaatgaaaaagatacctccgactcgaaggcctaa

SEQ ID NO: 184 - DNA, 1866 bp, unclassified Barnesiella
atgaaaattcatcgcatgaaaatttctacacttttgctatgtgctaccttctcgctggcaacagttgctcaaccgcaagccgcaaccgaaccaataacaccgccctacgcggagagtttcgctaacgatgctttcgtaaacgactacaccattgtcgatgtaaacaacgacggagtaacctggggcccctatctgggatcggttcaaatctcgtacaactcgaatgaggccatgaatgactggctgataaccccggctctggccctcgaagggggaaaaatctacaacttctcgattgaagtaatgaccggcaacggctcttacaacgagagctttgaggtgatgtatggcaaagagaatactcccgaatccatgaccgagaccatcatcgaaaaaatgcaggtcgcacacaccgtctacaagagttacagcggcaccctctcaccgagcgaaagcggtacctactatatcggcatacacgggtgcagcgatgccgatatgctctcgatcagtctgaaaaacctgagtgtgggcgaagccaaaggggcctcggctccggctgctccgtcggacttgacagcaactacccgcaccaatggtgagttaaaggccgacatcgccctcaccgcccccaccctcgacctgaacggcgatgccctcgagagcctcgagagtgttcgcctcatgcgcaacgacagcctcatacacacctttgactccccggctcccggagcagaacttacctatgtcgacgaagtgcccgaatgctcgcgctacacctactcggccgttgccgtgaacggttcgggcgaaagtcccgccatcgaaacaagcgccttcgtaggagtgctggaaccctccaatcccaccggaatcagcctgaccgaagggagcaaaccgggtgaggtgattctgaaatggacacccgttaccaccgacatccgcaacaacacactcgacccggccttcgtgacctaccgcatctacggcggcgacggcctggccacactcctgttcgacggtattaccggcgactcctataccttccaggcgaccgacgacgtgtcgacacaatcgtttgtgcaatatgccctcgtagccgagacccgaggcggtatctcagacttcatgaactccccgttgctgcctctcggtccggcctatgcaaccccgttcgtcgaatcatttgccaacggaacaccggctactatcataggactttacagcgacaatctggccacctggaaaggatttaccaacgaaacgggcatcgaatcgcaagatggcgacaacggctttttcggctcggagggctcctacctgcaagactcggctaccttcgtaaccggcaaaatagacttgagcggtctcgaaactccgacacttaccttctatacctacaatatcgtagatggtgaagatcgcgacatcaatacgttgagggtttctgcaatcgccaacggaactgtacaggaggtaaaatcgttccagatttgcgacctcggcgaccaagagggatggctgaaggtagaggcttcgctcgaggcttacaaaagccagaccatacaactggagttcacctcgctccacgcactctatccctatatctttatcgacaacctgcgcatcgacaactatggcgccagtgctatcgaaacagccacatcggcctcggtattcatcgccggcggccaaggcgagataatcatcgccagagccacccacgagcgcgtggaggtatttaccatcgacggccacctcgtgacccagcagacgatagcggctcccgaatatcgcctgccgttgacaccgggcatctacatagcccgtgtgggacaaactacgcaaaaggtaatcgtgaaataa

SEQ ID NO: 185 - DNA, 1512 bp, unclassified Barnesiella
atggcagataaatttggatatatcacgcaggtcatcgggccggttgtcgatgtcaccttcgaaggcgaaggtaacgacgtgccgcctatttatgctgcactgaaaatcgagcgtgaaaacggctccgacctgattgtcgaagtggagcaacatatcggtgaaaatacggtacgctgcgtcgcaatggattctaccgacggtcttgtacgcggtatgaaagcaatcgacttgcaacggcccttgtcaatgcctacgggctcacagttaaaagggcgtttgatgaatgtgttgggcgagacgatcgaccatcttcctgctctggattataccgaattgaaatcgatacaccaggaggctccggcttttgacgacctctctatcagtaccgagatactttatacgggaatcaaggtaatcgatttgctcgaaccctattcgaagggtggtaaaatcggtttgttcggtggtgccggtgtaggtaagaccgtgctgattaaggaacttatcaacaacattgccaagggacacaacggattctcggtattcaccggtgtaggtgagcgtactcgtgaaggtaatgacctcttgcgcgagatgatcgaatcgggtatcatgtcgtatggcaagaagttcgaggagggtatggctcgtggcgaatggaatctgcaggatgtcgatatgggtcaggtgaaccagtcgcaggccaccttggtgttcggccagatgaacgaaccgccgggagcccgtttgcgtgtggctctggccggtttgacggttgccgagcaattccgcgactccgatggcggtggtaaagagattctgctctttatcgacaacatcttccgtttcactcaggccggatccgaggtgtcggcgcttttgggccgtatgccttcggccgtaggttatcagccgacgctggcctccgagatgggtaaattgcaagagcgtatcacctcgaccaagcagggatctatcacttcggttcaggccatttatgtgccggccgacgacttgaccgaccccgcaccggccacgaccttcaacttcctggatgcaactacggtgttgagccgtaaaatatcggagctgggtatctacccggccgtagacccgctggagtcgacctcgcgtattctcgacccccatatcgtgggcgaggagcactatcaggtggctcaggccgtgaaacagttgttgcagcactacaacgagttgcaggatattatcgctatcctgggtgtcgacgagttgtctgacgaggacaagctggtggtaaaccgggctcgtcgagcacaacggttcctctcgcaacccttccatgtagccgaacagtttaccggcgtgcccggtgtgatggttccgctcgaggagacgattcgcggtttcaagatgattctcagcggcgagatggacgagtatcccgagcaagccttcttgaacgtaggtacgatcgacgaggctattgccaagggtaagaaattgttggagcaggcccaagcggctcactaa

SEQ ID NO: 186 - DNA, 1155 bp, unclassified Barnesiella
atgagaagcgtgaaacggtgtatagtcgttgtttgtctggctgtttggacggtgttcgttcgggccgaagagtccgactcggccatcattgccaactttttgagtggtttttccgatctttatcagaaagcctattcgtcccggatactgcctgccgattcggtcgactcctcggtaatgtgtgaactctcagtcaggggcgacagcctgcgggtaggcagtgccatcatgcttgtgttggagtgcaaccgtcggcccgatgccgagcccccgattatcgtggccaacggccggtcgatacgccctcgcagcaacagtagctcaaccgtttacagcaatggagagacgacctcgtgctaccgctatttttatccgttgcgactcgagacagacggacactacgagtttcgttgcaaagacctttcgttcgacaacattgcttacgaccagggaatggtgattctcgatattaccctgccggggtacgccgtaaatcacgatttcgacactcctgcttccggcacagagtggggatggatattagtgggcattgtcgtcttctgtattgtggcagagtggtttttgttttggctgttctttcataaggagggcgatgaaccgctggccgactttgtgttgcgcacacggcatttgccgcttacgaccgattgggccacgacccactatgccctgccctctttgatggtgtttattttgtgttgtatgctgttgttcaaccttttctccctgatttattcctggggtgtattgttgcccttatgggttttgtgcataccgttactgctggcgttgttgctgtttcatgtgcagcgcaaccggcttgacttcgaagaggtgccaacccgcctttcgatcgaggagataggtaacctctttatcgaattggccgaggtacacgagtggagtatcgaccacctggggtacgactgtatcgtagcccataccaatccctcgatgtggagtttcacttggggcgaacatatatttgttgtctatgacagcggtcgggtgtggctcaacagcgtgaataatctcgaccgacgtagttcgattgtctcttttgggtatacgcgtcgcaatctccgttggatagtcgaggccatccgggcgcgggagtatggaggtgcgaaatga

SEQ ID NO: 187 - DNA, 960 bp, unclassified Barnesiella
gagcgcaacacgaccccacggctcagtgcccgacatgacgtcatccacttcgacgacgtgctgacccaaatcaacgctacccacaagagcgtacctctcatgctcagtccggccgacgctctcgacttcaaccagatttatcggcagaagagtctcatcacggccttcaagcaggccggattccgcacggcgttcatctcgaatcagttgcgaaacggctcgtttaccgatttctttgccgacgaagccgactgcaccctctacctgctggctcccaaaaacaagactcacctctacgacaatgtcctgttgcccgtggtcgactcgctgctccaaagcggccccaccaagcaactcatcgtgctgcatacctacggctctcacttcaactattgcgaacgctatacggccgagaaccgcagctttacgcccgactacatcaacgaaatcaaccggaaagacaggcaggccatgatcaatgcctacgacaactcgattgtggcaaccgactggttactcgaccagctgatcgaacggctcgaccgcacggggaagacctcggccctgctctacctatcggaccatggcgaagatttgctcgacgacgaccgcgaccgctttctgcatgcctcgcccatccccacctactatcagttgcacattccgtttgtcttgtggttctcgccccaatatgtcagccagttcccactcgacacccaacaggctcgcgagcagcacaaaacgcccttcgactcacgggtcgtattccacaccttgctgtctatcggcggcatcgagaccgactatcgcatcgacagtctctcgctcgtgagtccctcgttccacctggacaaacgatactatctgggcgagcgcaacatacctgtacccgtgaagtatctccccttcgacgacgaagatcgacaggctttcgaacgccacggcatcgctcctcgataa

SEQ ID NO: 188 - DNA, 627 bp, unclassified Barnesiella
atgaccaccgcctacctctctaccgcctactttgccccggtgtcgtactacatggccctgcttgcctacgaccgcatcgtgattgaacagtggtgcaactacaccaagcagacctaccgtaaccgatgccacatagccggtgccaacggtgtgctgtcgctctcggtgccggtagtcaagcccgataccctcaagtgccccacccgcgacatccgcatctccgaccacggggagtggcgtcacctgcactggaacgccatcgcctcggcctacggctcgtcgcccttcttcgagtattaccaggacgatattcgccccttcttcgagaagcgatacacctttctgctcgacttcaacgaagccatccgacagaccctctgcgaactcatcggcttggaaccgcacgttgaatacaccgaccagtatgcccaacccgcccctggcgaagcagacctgcgcgaagccatacaccccaaacgaaatattgccgagactatcccctcgatgcacctcaaaccctactaccaggtgtttgcccccaaatatggtttcctgcccgacctgagcatactcgacctcttgatgaatatgggacccgagtcgattcttatcctcaaagaatcataa

SEQ ID NO: 189 - DNA, 798 bp, unclassified Barnesiella
tccggccgctcgctcaaccgggccgagttccgcgaggtgtcgccggccgtctactacgacttcgacctcttcaacgaaatcggcggtaacgaaaatctgaagacctgcaagatcgacaacctcgatttccgctacgagttctatcccgcccggggcgagatggtgagtgtagggctcttctacaaacatttcgagaaccccatcgaatggaccttcatcgacatgggcggtaccctgcgctacaactacgagaatgccctctcggcccagagtctgggtgccgaggtagagatacgtaagagcctcgacttcatcgggatgcgcaacttcagcctgctgttcaacgccacgctcatcaagagcaatgtgcggttcgacgagtcgggcatcatcaagaccgaagaccgccccatgcagggccagtcgccctacatcatcaacgccgggttgtactaccagaacgagaagtggggcctgatgtcgtcgctcctttacaaccgcctgggcaagcgcatcatcggtatcggcaagtcgaacagcaccacccacgacgtgagtgtgaacatacccgatacctacgagatgccccgcaacagcctcgacttcaccatctccaaaaagctgggtaagctcatcgagctgaaggccggcgtgaaggatatactggccgagaaggtggtctacaagcagttcccgcagttctacgatgccgccggtcagttgcaggagcgcgagcaggtgacgaaatcgtatcgtccgggccgtgcggtgagtgtgggtatcaccttcaatttctaa

SEQ ID NO: 190 - DNA, 669 bp, unclassified Barnesiella
atgagccactgtatcaaatcgtttatccagaacctgaatatcgtcatcgggtgtaccatcggatgcagctattgctatgcccgcaacaattgccggcgcttccatatcacggacgacttttccgtacccgaatacatgagccgcaagctgcggctgctcgacaatccccgcccgcacaacttcctgctcaccggtatgagcgacttctccgactggcaccccgagtggaccgacgaaatattcgaccgcatagcccgtaatccgcagcacgcctgccttttcctcaccaaacaccccgaacggataaacttccacaccgacctcgacaacgtatggatgggagtcaccgtcacctgcgaggccgagaagagacgcatcgccgacctgcgccggcacatcggggcccgtcactaccacgtcaccttcgaacccctcttcggcgacatacccgacctcgacctcgagggcatcgactgggtggtcatcggtaccgaaaccgggcggcgcaagggaaaaatcgaggcaaatccccaatgggtagcccacattgccaaccaggccaaagcctgcgggatacccctgtttatgaaggaagaactcgtcccgatcattggcgaagagaagatgattcaagaattaccgcaatcgtttatacaccaaagactatga

SEQ ID NO: 191 - DNA, 447 bp, unclassified Barnesiella
atgaaacctatatacgtagcggtctgtatcgcgttgctgtcgatgctggcaggctgtaaagggggaaaagagctggccacccaccagccggtgtcgcgagaggtgcgtaacaatttcgagaccctcatggcatcgtatcccgagtggaccaccttctcggcgaaggggtcggccgatgtggggctgggcaaagggggctcgctgagcacgaacacgcaggtgcgcatggtgcgcggtgagtcgttgcagatttcggtgcgagtctttttgggtatcgaggtggcgcggctctacatgacgcgcgacagcctctttgtcatcgacaagatgcagcgccggtacgtaggcgagtcgctggcctcgataggggcgcggctctcgcaggagctctcgctggccacggtgcaggatgccctgctggggcgcatctttctgctgggcagtagc

SEQ ID NO: 192 - DNA, 1710 bp, unclassified Barnesiella
atgaatgtaaagaatcttttcttatgtggcgcaaccgtgctattgttagtatcttgcgcaaacgaggagaatcaggtcgattcgggatacggttccataaacgtaaaagtttcagccgattaccaagtagtacctgtcactcgctcgaccaccgaaattaccgaaaccaccaatcccgatgtcagtgaatttgccttaaagttggtatctgccgacggcagtttttcccgcgcctgggacagtctggccgacttcgacccggccgaaaaaattcccgtaggcacctacaccatgagcgcctactacggcaacctcgaggaggaggggttcgacaagccctactacctggggcagtccgacgtagccgtacgctatcgcgagaatacgccggtcgagatactctgcaccctggccaacgtgaaggtgacggtcgaatactccgatgccttcaagaaatactttgccgactatgccaccaccatacatgcggccgagggtgactatataaaatttgagaaagaggagacccgtgccgcctatgtgaaacccggcaagataaccatacagacctatctgaagaaacaaaacggcatcgagtcgaccttcgaaccggccgccatcgagaatgcgcaaccgcgtcagcactaccgcatcaaactcgatattgccgacaatgccgcgggcgaagctcaactcagcatcagctttgacgaaacaaccgagacacagcctatcgccatcgacatctccgacgaggtgatggtagccccggccccctcgttcctcccggccggattcgagccgggcacgcccctcgaagtgaaagagaacagctaccccgacaaccggcaggcaaatatctcgctcacagccaaggccggcctctccgcctgcacactcaccacctcgtcggcctgcctcgaaagcgaagggtggccccgcgaaatagacctggtgaacctgagcagcgaaaaccacgccctgctctcccgtctgggactgaagttgaaaggctttaccgagatgggcagcaagatgggattcatcgactttgccgaactttttgcccacctgcacaccctcgacgggagcgaccagcacaccttcaccctctcggccaaagacatgtatggcaaggtgagcgaatcgcccatcaccttgtcggtcaagagcatacccatcacctttgccttgcagacccccgaaccggtattcgtgggcagcaaatcggttacgattcccatcgagttcgatggagcctacatcgaccaggtgaaattcagctacctcaacgccgaaggtgcgaaggtaaacagcaactcgaccgtggtctcgagcgaaggcaacctctaccagataaagatttcgatcgaagctaccgacaagcccgtcgtagtcgagggctcgtatgccaacggagccaagacctcgaccatctcgataccggtcaagaccccggccttcaccatcaccgccgaggagtatgacatctgggcccgccgcgccaccgtcaaactcactgccgaagattcgcagtatcaagaggccgtagaccgctatgccgtgctctttgccaacagtaccggccagtgggaaaccgtcgcctcgaccttgagccagggccgccgcgtcatcaccggcctcaaccccgacacccgctaccagttgcgaggttcgtgcaacagcggccaggacaacgtcaattacagc

SEQ ID NO: 193 - DNA, 1290 bp, unclassified Barnesiella
atggatatggaaaagattgcaaacattcaagctcgggagattctcgattcacgaggtaaccccacggtcgaggtcgatgtagtgctcgattcgggtgttagaggccgtgccgctgttccttcgggcgcatcgaccggggcacatgaggccctcgaattgcgcgacggcgataaatcgcgctatggtggaaaaggtgtgcagaaggctgtgcatcatgtcaacgatgtgattgcaaaagctctcaaaggggccgaccctttcgagcagagtcgtatcgaccggcagctgatcgacctcgacggtaccccctcgaagtcgaagctgggagccaatgccatcctgggtgtctccctggctgtggccaaagcggctgccgctcaattgggtatccctctgtatcgttatatcggtggggccgatacctatgtgatgcccgtccccatgatgaatatcatcaacggcggctcgcattccgatgctcctattgcttttcaagagtttatgattcgtcccgtaggggcatcctcttttaaggaggggttgcgcatgggggccgaggtgttccaggccttgaagaaggtgctgcatggcaaagggttgagtaccgccgtgggcgacgaaggaggctttgcccctgccttgccgggtaccgaggctgccatcgagaccatactcgatgccgtgaaccaggccggctatatgccggggcgcgatgtgcgcattgctctcgactgtgcgtcgtccgagttttatgtcgatggactctacgactatacgcgtttcgagggacccggtggtgtcaagcgcacgactcaacagcaggccgaatacctgcaagaccttatcatgcgctatcctatcgactcgatcgaggacagcatgagcgaagacgattgggaaggttggcgtctcctcaccgatttgattggcgacaagtgtcagctcgtaggcgacgacctctttgtgaccaatgtcgactacctggccgagggtattcgcaagcattgcgccaactccatattggtaaaacttaatcagataggcacccttaccgagacgcttcgggccgtacagttggcgcagcgcaacgggtacacggctgtcatctcgcaccgttcgggcgagaccgaagatgccactattgccgatattgccgtagcgaccaatgccgggcagataaaaaccgggtcgctcagccgttccgaccgcatggccaaatacaatcaactgctccgtatcgaggaggagctgggtagcgtagcccaatatggttataaaacgattgtctaa

SEQ ID NO: 194 - DNA, 1158 bp, unclassified Barnesiella
tacgactcacacgaatttctgcggcaggccactccgctgcacaccgtaggccaggctaccgaagagtcgatcatcgggctgcgttacgaacacagcggtccatcggagtatgcctacctcgactacattcgcctcaactaccggagggctctgcaactctacgacggacaggttgccttccgcttcatcaaccgccgggacaacgattgctatcagataggcaacaccaccgactcgacgcaggtgtgggacatcaccacgcctcatgcaccgcaacaagtcgcgaccgcctttgacgggcaaactacccgcttcgtcccgggcgacatccaactgcgcgagttcatcgccttcgaccccggctacacgttcccttcaccgaccttcgtcaagcaggtcgagaaccagaatctgcacgcatcgcccatacccgacctcaccatcatcacccccaccgtcttgcgaagcgaagccgagcgagtagcccgcctgcatcaagccgaaggactgacgactctggtcgtggaccaagagcagattttcaacgaattttcgtcgggaacccccgacgccacagcctatcgccgattgatgaagatgttttacgaccgggctgccaacgagagcgaacgcccccgttacctgctgctcttcggcgacggctcctacaacaaccgccaggccatggcctcgctgcataccccgcaatgcaacagcctgctcacctaccagtcgaagaccagcatcgacgagcgggaatcgttcgtgatagaagactatttcggatttctcgaggacggttcgggcacggaaatcaagagcgaccgcgtgtgtctgggcataggccgctaccccgtaacctcgctccagaccgccagactggccgcagacaaactctaccagtatgcacagaacaccgacctcggcccgtggaagaataccttctgcatagcagccgacgacggtgacgaagccgtacacaccaaacaggccgaccagggatgcgacaccctgctactcgaaaacaccgataccccccggctggagttccgcgtcaacaaggtgtatgtcgactcttactacctggaccccgtttcgaaaaaatgccccgatgccaaccgggagttgatgaagaatctcgacgaaggggtactcgtg

SEQ ID NO: 195 - DNA, 642 bp, unclassified Barnesiella
atgaacctcgaagagattattgcccatattgtaacggttgaaaatggatttcagcatattttggatgcggctcatcggatacacgagtcgtgtagtgacgaagggtgttacggcctttcgctcgaattattcgaacatccggcttatcaggtgcgtatgctgtcggtcgttttattggggtatgccggagtagacaatgaaaaagccctgagctttttgaaagagcgggtaagccgcgatgagaattggcgtgtgcaggagatgctggccaaatcgtttgactttatttgtaaagagcgtggatatgaaagagctttgcctcttattgctgaatggttggccgatggtcatccgaatgtagtacgggctgttaccgaggggttgaggatatggacctcgcggccctatttcaaggagcatcctttggaggctgttgcttttttgagtagacacaaggccgattcgagcgagtatgtgagaaaatcggtaggtaatgcgttgcgagatatcagcaagaagttcccacagttgattctcgatgaactggacacttgggaccatagcgacccgaatgtgcgttatacctatcggttggcggcaaagcaccttctcgagaaggagaagcggggaaagcagatgaat

SEQ ID NO: 196 - DNA, 1023 bp, unclassified Barnesiella
gctcccgaggggttgccggagcgctcgctcaagcaggaccgtaagatttcgttccgcaaatacctccgaatggtcgacgacccggacttttcgatggagcggctgtacgatcgggggacggtcaacagcgtgaagacgacgcccgactcgattgtggtggtgcccaatctggtgctgctcgacgactggtggaacatgtttcgggtctcatttacctttaaccccgacggctcgtttgccgggtcgcattattggcctacctctttccgacattggctttcggcggttacctcgcacgaaccgatgatggggggcgatggcttgcgggctcatatcaccgacctcttttcgtgggtcatttcgcgccccgaatttccggccgtgatgtcgacctggctgctgtcggggatattcctgaatctggttcccttcctgccgctttgtctgctcatggggctgctggcgttgcgtcgcccgctctactatgtgcccaactgggcggtcaatctgctgatagcggcctgcattcttttcggtttctggctgtggcccaagctgatgctgttgcggggctatccctttatctcggcctatccgctggtatgggtcattaccattctggtcgtggggctcttctgggggctctaccgagggttgaggtgccctcgctgcaagcggctcgaagatcacgaactggtgagtaccgaggtactcagccagcggtatagggaccggaagggcgagacggtgaagcgccgcacgcatatcggcacgacgaccgcctacaccgagcgtacacgcaacgggcaggtggaggggcgtgaaaaggagtgggaagagaagcacttcgacgaggaggtcgagacctgggtcgaccgggtgcgcatcgacaaggtgagggagctgtaccgatgtcgccattgtggtcacgaacgggtgaagatacgacgcaaggagtcgtgggtgagccgccgcgataccggtagcgagaatcgcaagacctccgatttcaaacgattttga

SEQ ID NO: 197 - DNA, 2196 bp, unclassified Barnesiella
atccgggcctcggccatcaacgacatggccggccgcgtgggccgcaaccccgtgatgtggtggaacaaccctgtgaacgacgaccacgacgaacgcatctacatgcgcgagatgactacccactggaccatcgagaactcgggggccatcaataccctcaacggacttatactcaaccccatgagccaggcccaggcctcgaaggtagctctcttcggcgccgccgattacagctggaaccccaacaccttcgacgtgcaccagaactgggaagatgtctttgcccgcatggctcgcccgggcgatagtcaaacggccgaagccctcaaatgctttgcccgcttctccgacgccctggtcgaggacgacgagatgattgccctctacgacggtttcaaatcgcacttcgggggctcgaccttcccggccgaagctgcccaactgcgcaccgagctggggaacctcaaccaggcctgcaactacatcgagaccctgaaagacagcgaatacaacgactaccgtctgatctacgaagacctgcgctgctggaatgccaagctcaaaaccttgagtgcgattgctctcaccgccctcgacatactcgaaaacgacggctccatgtcgcgggccgaagggtgggagaaatacctctcgctgcaacagctctacaacggcatgagcaacgactcgacctacctcatcagcgcactcgaagggtacggcacatcgacctacgaggtacactacgaagtgaccccgggcgacagctacctgcggccgtttgtcgaatacctggtcgggaaagccggcaacaacgtgccgggaacatggcccgaaaaggataccattcaaatcatctccaacctcgagagttgggaaggggtgaacctcacgaccgagtctacctcgttcgagttgagcggactcgacgccctcaccctcgacccgaatgaatatatcggtatctacttcggcaacctcgagaaaatcgacgtggccgccaccgagctcacgcccggcatcgaggtagaggtatcggtcaacggcaaacagtggagcgcagtacaactgcccgtcagcgaacagaccgtagcctacatacgactcaagaataccggcgacgagagcttgaccgtcggctccgaccggctgagcggctcgtgcctgttcaccccggtaagcaccacccccacggtatcgaccaacataccgcaatacgaatattacgacctcgaccgcgttatcgacggtaaccccgactccttcttctggagcagcgaagcccaggccgaagggcaatacatcatgctcacctaccccaactcgcaaccgcaatacgagattacggtcacctttaccgccaacgaccaaccctcgggaacggtcgccatcgaaatatcggacgacaatacccagtggactcccatagccgaatttaccgccgagcagctcgacgatacctactcgttcacctgcaacgccaacggagagtcggcccgctatgtgcggttcgtcatccgcagctactccggcggctattggctgcaagtagccgagttcaagagcgagatggccgccaaagagacccaaaccgccgaccaggacggcaagcagattgccaccctctcagaccgcgaccttacgaccagctatcgccccaccgcagccggatacatcgagcaccgcttcatcgaaaacctcaacatcgagacaatcgagattttccacaacacgacgttcgacaaccggtatgagctccccaccatctacgtcaacaacggtaccgaatggatagagacggggcaactcagctcgctctgcaccatcatcgacacccacgaaatggaactggttacagccatcaaaatcgagtggaacgaagagaacattcccactctgtacgagatactcccctgtggtaccccctatgtagagaagcccggaaccgctaccgccatcgagcaacccgccagtgcaggcacacgcctctatacccgcgacaaccgtctgcatgtagagtccgatgctaccatcaccagccttatgctgtacgacttgagcggccgtatcgtagcccgcttcgctcctcaggcaagcacattcgagacgatgctcgacaccaccatgccccgggtactcattgctcgagtaagcgacggcaatcaaaacatctcgacttataaaataatatggtaa

SEQ ID NO: 198 - DNA, 1098 bp, unclassified Barnesiella
tcggcgaaaagctcaacgaagagctggacaaagcatgatgctgccatgcccacgctgcaatacgaccgctccgactctcaggtactcaagggtataggcattttactcattgtcctacacaactttttccacaccttccccgagttcccggccgagtgcgagtttgaatatatccccgataacgtgggacggtttgtcgacaccctggacaggggcaacctgcgcaccatcgtgctgtcgcttttctcttttctagggcattacggagtatcggtttttgtcttcgtgagcggttacggactggccaagcgatacggacagagccccgatgcggggtggcgcattctgctgcaccgggccacgcaactgtggaagtggatagtccccatggccctgttgctcctgctcgaccgctactcgggccacacccacattacctatcagtatctggagaatcaaaagatatggaccgacctgctggcgatgcttacctttaccgccaacttcctggtcgaccgcttcgtcattgccggtccgtggtggtacttcggcatggcctttcaactctatgttatctatgtgctgtttctgcgccgggccggtgaccgggcggtgtggattgcctcggccgtcgcctgggcactgctgcttgtgcttcaagggttgggctgcaacgacctcgtctttaccctccgttacaactttgtggggtggctgccggtattctgcatcggcatactcgcagctcggcatccgctgcggctcccgtggggttgggtggctctggggtgcgtgctctttgtattgagtctcttcaacccctatctgtgggtattcagctcgaccctgatgctcttccccttcacggcagttctgccgcttttcaagagaggcattctctacaaaatcactctgggattgggcggactgtcggccgcgctgttcatcacccacgccttcgtgcggcaacagatactcatctatgccaagccgctacctgccgaatggtcggggctgctctacctggctctgtgcctggctgttgcctggatttaccgccaggtactgctcgccctctacaagcggcttcactggtga

SEQ ID NO: 199 - DNA, 936 bp, unclassified Barnesiella
atgtttttctgcaaacagctgcgagcagagtcgaaagaattgtgtacctttgcccacgaatcccataatgaaacgggtattgcaaatagaatcggtatgttacaaatcggaaaattcaatacactcaaggtcgttaagacggtcgattttgggctctatctcgacggtggcgagaaaggcgaaatcttgttaccccgcaaattcctccccgagaagccgtatgccgagggcgacgagctgtcggtctttgtctattacgattcggaggacagactgattgcaactacccgtaagccgtacgtgcaggtggggcagtttgcccgcttgcaggtaaagtcggtcacgaaggtgggagcctttctcgattggggcgtagaggccaaagacctgttggtgccgtttcgcgaacagcatggcgaaatgcagcccgaccgatattatatcgtgtatgtctatctcgactttgctaccggccgtattgtcgcatcggccaagctcgacaagtttctcgataatgtcccgcccgagtatacccccaaccagccggtcgagattctggtggtgcaagagacccaactcggctacaaggtcatcatcaacaacctgcattggggtgtaatctatcacaacgagattttccgccccgttgccatcggcgaacatctgcaagcctacatcaagcaggtgcgcgacgacgagcgaatagacgtgtcgctgcaaccgatcggttatgagcagcgcattgacccgttgagcgaaaccattttgaaacggttggacgaagccggtggccgtctgcccctctccgacaaatcgccggccgaggagatagcccgctacttccagtgcagcaagaagagtttcaagaaggcgataggggctctctacaaggcccgccgcatcgttatcgacgagcgggagatacgcaaggcctga

SEQ ID NO: 200 - DNA, 918 bp, unclassified Barnesiella
atgacaaacaaacgattttcgactctcccggcaggctacctcatccagcggttctggctgttgatagctctgttgctgcccctgcaagcaccggcctcacagcctcaagaacagtacattgtcgaaggtcccgactggaaagcctttattcgactttccgacggcaccatcgaccgatacgaatatttcgccgacggcgaatggcaaaccatccctttccgtcacgaccgtctgtcgggccctgcctgggaggaggtcatgctcgcccattatgccaaagaaccggggagctttatcggcgaacgcgaccacatagcctatcgcatgacctaccgctcggccggcgaccacctcgtggttgagtgttccatgaccaatctgagcgacaagcccttctgccccaaacgcagccggctgattctgggcatcgacagcgaaatgcactcctatccgcaatgggataataagtttttccctaccctgctgcgctgcgaaaaagattttgcctggggctatttcatgtctccccgacaagttctattcggctttgccacctcgcaaccggtcgcctcgtatgcgctcaactacatctacgaagggtggtataaatggaaatggggacaccagataaggacggccagcctcgaactgttgcaccccctgcctctgcccgaacgccatccgcagcacctcacgcaactggctccgggcgaaacccgcagttgggagattcacctgggacgcatcgactcgctcgaccatgtcaagtcccagctgtcggcctgggccgatatacctctgatcgaatgcaaccgatataccctattgcccgacgagcctctcgacatacgggtcaactcgaccagcccgataaccctatcaatcgaaggtcccgacgcgaaacacatcggcacggca

SEQ ID NO: 201 - DNA, 1089 bp, unclassified Faecalibacterium
atgcagtcttttaccgaactctacgaggtcgagcgccgctatgaggagctggcccacagaatgtccacgcccgatgcggcggccaacgccgacgagtacgcgcggatgatgcgtgattacaaagagcttacccccctgatcgaagaataccgccgttacaccgacctgcagcagcaggaagcggacgcaaaggaaatgctggccgcagagtcagacccggcgtttgctgctatggtacagcaggagctgtgcgaaattggccggaatctggcacagagcgaagagaatctgcgtctgctgctcatcccgaaggacgccgatgacgaaaaaagcgtcattctggagattcgtgccggtgccggcggcgaggaggctgcgctgtttgcccacagcctgtggcgcatgtacacaatgtacgccgccaggcgcggatggcagtgcgagacgatcagcgaaaacccgacggagctcggcggcgtgaaggagatcgtcttttccgtcgaggggccggacgtctacagccgcctgaaattcgagagcggcgtccaccgcgtccagcgcgtgcccgagacagagacgcagggccgcatccacacctccaccgtcaccgtggccgtcatgcccgaggccgaggaggtcgagctggagatcaacccaaaagacctgcgcattgacacattccgctcgtcgggcgcgggcggccagcacatcaacaagacgtcgtccgccatccgcgtgacccatctgcccaccggtatggtcgtggaatgccaggaccagcgcagccagcgggagaacaaggaccgcgccttaaaggtcctgcgcagccgccttttgcagcagaagcaggatgcctacgacgaggaatacaacgcccgccgccagagccaggtcggcagcggtgaccgcagcgaaaagatacgcacctacaacttcccgcaggaccgcgtgaccgatcaccgcatcggcctgacgctgcgtaatttgcagggtgtgctggacggcgacctggaccgcgtggtcgagccgctgattttggcagaccgggaagaaaaactgaagcaaagtagtacagaagaaggaaaataa

SEQ ID NO: 202 - DNA, 1557 bp, unclassified Faecalibacterium
atgaaaaaacggaactggcgtctgatgctgcgccgggtgctgaacctggtgttcagccgcattgttgtgaccggcgtgcttctgctgctgcaggcgttctggctgtttgcgctgttctactggctggcggactacgccaaatggttcggcggcgtgggcgttgccatgagcattatcatgtgccttgcgctgatccggcaggattccacggtgccggagtttaagatcagctggatgatcctgtttgccgttatgccggtgcagggcggcattttgtacctgctgtggggcaacaagcgcccggcgctgggcttgcgccaccggctggagcgcgccgaggacgcaatggccccggcgcggaaggacgaccccgacgccgcggcggccttgcagcggcaggacccccgcgccgcgctgacggcccgctacctgcacgactacggcccgatgccggtctgcggcggcacggcggcgaaatattacccggacgggcagagcatgtttgccgatatgctgcccgcattgcagggggcacagcacagcatttatgtggagagctttatcatcggcatgggcgagatgtgggggcagatccacgagattttgcgccggaaggccgcggcagggctggacgtgcgggtcatctacgacgacgcgggctgcctgagcctgctgccccacaactacgccgagatgatgcgggccgacggcatccgggcgttcagcttcaaccgctgcgtgccggtgctgaacctggtcatgaacaaccgcgaccaccgcaagatcatggtcatcgacggacagatcgcctttacgggcggtgtgaatctggcggacgagtatatcaataaaatcgtgcggttcggctactggaaggacagcggcgtccggctggatggccccggcgcagcgagcctggcaaacatctttttgacgttctggaaggcaaaataccccgacgaggatctggacgcgggctgcgatctgcccgccgccgtgccggtggaaacggactgtctggtgcagccctttgccgacaccccggtggaccgcgaggctgtggcgaagaacgtgtatctggagcttatcaaccaggcgcagaagcggctgtacatctgcacgccgtacctgattctggacaacgacctgctgtcctgtctgcggctggcggccaagcgcggcgtcgatgtgcgcatctacacgcccggcgtgccggacaagccgacgatctaccagctgacgcggagctatttcccgcatttgctgcgggcaggcgttaaaatttacagctacacgccgggctttctgcacgccaagacctggctggtggatgaccgcattgccgcggtgggcacggtgaatctggattaccgcagcctgtacctgcattttgagaacagcgtgctgctctacggcggcgcggtgctggacgatgtgcggcgcgatctggcggagatcgaaaaggaaagtgccgcggtgacgctggcggactgccggaccggattttttggcacgctgtacagcgcggtgctgcggctggtggcaccgttgtgctga

SEQ ID NO: 203 - DNA, 1452 bp, unclassified Faecalibacterium
atgacaagtaaacgcgaaaagctgcaatacgcttatgtatttttcgccgacctgctcacgatggccgtcagcgtgctgctggcgtggctcatcaccgacgggctgttcggcgtgctgatcccctacaccagcaccgattggctccagaccctgtgcctgctgtttgtggcgttcgtcgtcaccttcttcttctttgaccaggacaaaaacatcgtaacacggtctgaaaacgaggaaatcggcctttccctccggttcaacatcgcgttcggccttgtttatgcaggctgcatgctgctggccaaggccacgatgctggactcccgttattttgcggtcacagtgcccgcggtcaacgcggtgctgctgccgttctcccatgcgattttaaagcggctgctcatccggttccagcgcagctggggcatggagacgctcgtcggcgtcgtcacaacgtcggaccgggccgagcggctgatctccgagatccgaaaggactggtcccgccgggtcgtgggcgtctcgctgctggaggccacgcccgccgcgatctccaccagagtctgcggcgtcgaggtcaaggcgacgttcgacgacttcatggactggatccggcgcgaggcgctcgacgaggtctatgtcgatgtgccgatggacagcggcgagagcttcatcccctatctggacgagatggagagcatgggcctgaccgtgcacttccgtctgccgctgctggaccgcattgaggaagcctgctgcgatgagacgagcgccgcgcggctgagccggtccttggggcgctgcgccgggggcaacatcgtcacgatgggcaccgttgaattgcagctgcgcgaccagatcgccaagcgctgcatggacgtggtgggcgctgtcatcggctgtatcatcagcatcccgatcatcgcggtggtcgccatcccgctcaagctcgaaagccccggcccgctgttttttaaacaaaagcgtgtgggccgcaacggacggtatttttacatccacaagctgcgcagcatgtacgtggacgccgaggcccgcaagaaggagctgatggcccagaatgaaatgaacggcctgatgttcaaaatggaggatgacccccgcgtgaccaaggtgggtaaattcatccgccgcaccagcattgacgagctgccgcagttttttgacgtgctgcggggcgatatgagccttgtgggcacccgcccgccgacggtggacgagtacaagcagtacgagagccaccacaagcgccgcctgtcgatgaagccgggcatcaccggcctgtggcaggtcagcgggcgcagcgacatcgaggattttgaggaggtcgtcaagctcgacgtagcctacatcgacaactggtccctctggggcgacgtaaagattttgttcaaaacgatttacgttgtgttcgcggggaaaggggcgaaatga

SEQ ID NO: 204 - DNA, 1851 bp, unclassified Faecalibacterium
ggcgcgattcgcccggtggctgatcgtacagagcggctgttttacagcaatgagagtggtaccgcgggtacagcaacgttgattttgctcccgtctctcaaaggtctttcgcctttgggggacggttttatgtatgcctccttcaaagcgcgaaccgaacgctttgaaggaggcagttttattatgatggacgcaaccaagtacagtgtagggtattatccgccgccagtagagcccggccatgtctatgagtggccccagaaggaccatatcgagcaggccccggcctggtgcagcgtggacctgcgcgacggcaaccagagcctcatcgtgccgatgagcttggaggaaaagctcgaattttacgatatgctggtcaaaatcggcttcaaggagatcgaggtcggcttccccgctgccagcgagaccgagtatgagttcctgcgcaccctgatcgacggcaaccgcatcccgcaggacgtgaccgtgcaggtcctgacccagtgccgcgaccacatcatccgcaagacgtttgaggccgtcaagggtgcgccccgtgccatcatccacttctacaactccaccagcgtcgcccagcgtgagcaggtattcaaaaagtcgaaggaggagatcaaaaagatcgccgtcgatggtgccaagctcgtcaagcagctgagcgaggagtacgagggcaacttcctgttcgagtacagccccgagagcttcaccggcaccgagccggaatacgctgtcgaggtctgcaacgccgttctcgacgtcatgcagcccacgccggaccgccccatgatcatcaacctgccggtcacggtggagatgagcatgccgcacatctacgccaaccagatcgagtggtgctccaaacacctgaaatatcgtgacagcgttattttgtctacccatccgcacaatgaccgcggctgcggcgttgccgacgccgagctggccgtcctggccggtgcccagcgcatcgagtgctgcctgttcggcaacggtgagcgcaccggcaacgtcgatgccattacgctggccatgaacatgtacagccacggcgtagacccgcatctcgatttcagcaatatgcccgccatctgcgaggtctatgagcgcgtgacccggatgcacgtctatgagcgcacgccctatgcgggcgcactggtgttcgcggcgttcagcggcagccatcaggacgccatcgccaagggcatgacctggcgcaaagagaagcagctccaccagtggacctgcccgtacatccccattgacccgcacgacattggccgtacctacgatgccgacgtcatccgcatcaactcccagagcggcaagggcggcatcggcttcctgctgcagcagaactacggctacaatccgccgccgaagatgcgcgaggacctcggctaccgcgtcaaggacgtcagcgaccacgagcaccgcgagctgagcgtgaaagaggtgctgggcgtctttgagaacagctacctcaaccacacccagccgctcaatgtgccggacgcgcacttcatccagaactcggacggcagcattacggcaaatgtcgtcgtcaccagcggcggcagcacggtcaagtgcacagccaccggcaatggccgcctggatgccgttgccacggccatcgagcagcagaccgggatgcactttacgctcgtacactacagcgagcacgccctggattccgacacgaactcccgcgcctgctcctacgtcggcctgaaatgggcctccggcgaggagacctggggctgtggtacccacaccgatattatcgtggcgggcattaaggctttagtcagcgctattaacaataagtaa

SEQ ID NO: 205 - DNA, 1029 bp, unclassified Faecalibacterium
atgacacgttacacaggaaaccattgccctgtctgtgaacaggcatttaccgacgaggatgacatcgtcgtctgccccgactgcggcacgccctaccaccgggcctgctggcagaaggtcggggcctgtatgcacaagtcggagcacgccgccgggtttgaatggcagcccgagttcggtcccgaggccgaaaaagccgcgcacgaggccacctgcccgaactgcggcacccacaaccagccgggcgcggcgcagtgcagccactgcggctgtcccctgccgaaggacgacggccctcgacccgacccgaaggacgaggacgcgcaggtgccgatctacgcccgcgacccgtccaccgtgcataagcccgacaacagccgcacggcctccggcggcccccgcatcgacacctacaccgacgacgacaacggcggcatctgccgccgcgagattggccccgaggataccatcgacggcatcaaggccaaggactgggccgcctacgtgggccgcagcccgatgtattacctgatgcagttcttccgcatgagcatcacgaagcagaaggtcacagtctgcctgtcggcattcctgttcgggcctgcctatctgctttaccgcaagatgtggaaggagggtctgctgacagccctgctgtccctcgttttgagcgtgccgtcgctcatcgccattgtggcgaccttcaacccgtcgctgttcggcagtatgccgctgcattgggtgcccgtggccgccgacgtctgtgccattgcggactggatcgtcaggattttgctggggcttttctcggtctggctgtaccgcaacacctcaaagaaaaatattgataaaatctacagcgaataccccgagggcgacgcccgcaccgatgccctgctgcaaaagggcggcaccagcatctgggcggcgctgctctactttggcatcgtgctgctgctctcctcgctggtcatcaatctggccgggccgggctttgttcagtacgccatggccatggccgggtattaa

SEQ ID NO: 206 - DNA, 1689 bp, unclassified Faecalibacterium
gtgaaaaacatccgcctcggcgacgttctgatcgagttcggctatatcacgcccgaccagctgaacaccgcccttgcctaccagaaagagcaccgcgacctgcgcgtcggccaggctttgcaggagcttggctacgtcaatgagcgtcaggtcctggaggcactggcccagcgcctccagcttacaatgatcgacatcgagcacaccaacgtcgatgtgaccgccgttgagaaggtcccgcaggagcttgcgcagaagtacgatatgctgccgattgcgcagagtccgcgcgcgctgacgattgccgccaacgacccgctgaactactacgcccttgaggacatccgccagctgaccggcctcgaaccggagatcgtgctggccgagctggagccgctgcgccgcgccatccgctactattacgccgaggtcagcgcccgcaaggcggcccgcaccgccaacgacagcgacatggccgccgcccagaccgaggatctggccatcgacatgactgccgagggcggcgacctcgacgcgcccatcatccgtctgctgaacagcctcgtgcagcgtgccgtcacgacgacggcgtcggatattcacatcgagccgttcgagggcgagacgaaggtccgtatgcgcatcgacggcgtcattatcgactatgtgacgctgcagcgtgctttgcaccagccgctgatcgcgcgtatcaaaatcatgtcgaaccttgacattgccgagcaccgcatcccgcaggacggccacttccgcgcacgcctcgagaccggccccgacgtcaacgtccgtgtttcgatcctgccgacggtctttggcgagaaggccgttctgcgtattctgtccagcaacacctacatcaaaaatgccagtcatttcggcatgaacgacgagacctacaagcgctttctgccgctgctgaaccgcccgaacggcatcgtctacctgaccggaccgacaggctccggcaaaacgacgacgctgtacatggtcctgcagacgattgccgagcggcaggtcaacgtctcgacgattgaggaccccgtggagcgcaacctggcccgcatcaaccagacgcaggtcaacaacattgccggcctgacgtttgagagcggtctgcgcgccctgctgcgccaggaccccgacgtcatcatggtcggcgagacgcgcgacgccgagacagcgtccatctcggtgcgtgcggccatcacgggccacatggttttctcaacgctgcacacaaacgacgcactgtcgtccattgtccgtttggaggatatgggtgtcgagcggtacatgatcgcaaactccgtcgcgggcctcgtggctcagcgtctgatgcgccgcgtctgcccgcactgcgccaagcagatgccggtcacggcggaggagcgcacctatttagggcctgacatcccgtttgtgcgccgcggcacgggctgtacccagtgcaacggcacgggctaccgcgggcgtatcgccatccacgagctggtcatcatcaaccgtgagctgcgcgaactgatttctgccagggcaacgcaggcgcagctgaccgaggccgcccgccgcagccagggcatgacgagcctgcgcgaggccgccctgcagctcgtccgcgagggcgaaaccacccccgaggagctgctgaagatcacgttctatgaggagtaa

SEQ ID NO: 207 - DNA, 1284 bp, unclassified Faecalibacterium
ttggaaaaatacgttattcgcggaggtaagccgcttgttggcgatgtcaacattggcggcgcaaagaacgccgcggttgccatactcccggccacgatcctggccggcgggaagtgcctgattgaaaacctgccctgtatcagtgatgtcatggcgtcgctgcagattttgagcgagctgggtgcgagcatccgcatggtcagccgcagcacctatgaaattgacacgtcgcatttggacagcactgaggtatccaatgaactgtcacgccagatgcgcgcaagctactactttctcggcgcattgctgggccgctttggttccggtcaggtcgccatgccgggcggctgcaatctgggcccgcgcccgattgaccaacacctgaaagccttcaccgcctttggtgcagaggattccgtggagtacggccagatccacgtcaggtcggagcatctggtcggcgggcacgtcttttttgacacggtctccgtcggtgccacgatgaacgccatgctggccgctgtcctggccgaaggcacgacgattcttgaaaacgtggcccgtgagccgcacattgtcgatttggccaatttcctgaatatgatgggtgcagacgtacacggcgccggtaccgacgtcatcaagatccacggcgtcaaggagatgcacggctgcaactactccatcattcccgaccagatcgaggctggcagctatatggtggccgccgctatcacgaagggggacatcacgctgcacaacgttatcccgaagcacatggagcccatcaccgccaagctgcgcgcggccggctgcgaggtggaggaattcgacgacgcgctgcgtatcacgcgcaccggcgagctgaagccgctcaagctcaagactatgccgcaccccggcttccccacggatatgcagccgctgatgactgcactgctgacgctggcgaagggaacctccatcgtgacggagggcatctgggagaaccgcttccgctatgtggatgagctgatccacatgggcgcaaacatccaggtcgacggccaggtcgctgtcattgaaggcgtgaaggaactgcatcccgcgccactgcgcgctaccgacctgcgcgccggtgccgccatggtcatggctgctctggccgccaacggcgtgagcgaggtcgacgagaccatccacattgagcgcggctacgagaacatcgtagaaaagctgcaggctctgggcgcggacatccgccgcgtcgagattccggccaatgcagtgagccgggcaatctaa

SEQ ID NO: 208 - DNA, 1446 bp, unclassified Faecalibacterium
atgacgcagaaaccgctgtaccgctcgctggatgccaatcttgcgcttctggaggaaatgtttggccgttccgacgatttttataccaagcgcctgatgcttgccggtatcccgtgcgctatcgtcatgttcacagggctgtcctcgccggaaaagctctgccacatggcgttggatatgctggaccgcgaccccgccatgctgggcggcggggaggggctgtgcgactatctgctgacccagagccgcgtccccgctgagcctgccgcggtggaggatcgcaccgcgctggtggagctgctctccaacggactgtccgttttgctcatcgacggcgtgcggcgcggcgtcgcgttttcgacgcaggagatgccccagcgctcgatctcgacgccgatgagcgagggcaacctgcgcggcccgcaggaggcattcaccgagctgctgcgcaataacatttcgctgctgcggcggcagttccgcaccggaacgcttgtggcagaaatctccaccgccaggacccgtgccaagaccgaatactgtctgtgctacgacagtaccctggctccaaaggaaaccatcgacgctctgcgggagcggctgaaacgggtggagattcccgttctgctggacagtgcctactttgcgtcgtttctcaagcaggacaagctgaatcttttcccggcagccgcctacaccgagcgccccgccacggcctgtgcccgcctgtgtgagggcaaggccgtcgttcttgtagcgggctgtccgtatgcgctcattgtgcccagcttttttgccgagcacttcgagtgcctcgacgactacgcctcgggcgcagtgttcgccggacttatccgtattttaaaatatctcgccttcctgctggccgtgttcgggccggggctctacgtcatggccgtggcctttgcgccggagatcatccctatccggcttttgaccaagctggcacagggcgaggtatccacgccgctgccgccaatgctggaaatgctctgcgtaacgctgcttttagaaatcgtccgcgaggccgggctgcgtgcgccgcagtctatcagccatacggtcagtctggtcggcgcgctcatcatcggcgagaccgccgtcagcgcgggcatcgtcagcgtgccggttttaacgatggccgctgcagcgacgattgccacgctggctgtgccgtcgctgtatgagcagtcgatcctgttccgctttgccgtcatcgtgctggccgggtgcttcggcgtgccggggctggcctgcgccgcactgacgattctggcgatggcctgcggcagtgagccgttcgggtacgactatctctacccgctcatgccgccgggccgggccagcgtgcgggacggctttgtgcgcagcatctggagccgccttgccaaatccggggaggtgatcagccgccatgaagcgtga

SEQ ID NO: 209 - DNA, 2421 bp, unclassified Faecalibacterium
atggagcctgaagcgttggcactgacgctgcccatacggcgtctggtggagtttttattgcgcaccggcagcattgacagccgctttaccggctttgaccgcgcgctggagggtgcacgcctgcaccgcaaattgcagcgtgccgccgtaaaagagtacccggactaccaggccgaggcggcgttgaagcaggactacgcctgtgcccaaatcacctacacgctggagggccgtgccgacggtatttttaccgatactgacggcatgccgaccattgatgagatcaaaaccaccactctgccgcccgagctcatcaccggtgagcaaagcccggagcactgggcacaggcgcagatctatgcggccatctacgcgcgccagaacggcctgcccgctatgcgggtgcggctgacctactttcaggtcgatgaggaactggaatttcgtttcaatcatgactacaccgccgacgcactggacgccgttgtgaccgacctgctgacgcagtacgcgccgtgggccaagcgtgccgccgagtggcagcgcatcagccgcgcgtcactggcggcgctgcaatttccgtttcccggctatcgtccgggccagcgggccatgatcggcgcggtgtacaagatttgcaccgagggcgggcagttgctctgccaggcacccaccggcatcggaaagacgatgagtgtgctgttcccggcgttaaaggctgtggggcagggcggccccgtcttttacctgacagcccgcggcacgacccgtgcggcagcggagaacgcgctggcgctgctgcgggcgtccgacgcccatttaaagctgcgcagcgtaacgctgaccgccaaggacaaaatctgtatgcaggatcggcgcgagtgtacgcccgaggcatgcccctatgccaaaggctattatgatcgcgtcaggacggcgctgtgggatgcgctggacacccacgctctgaccgctgacgccctgcagatgctggctcgcagacataaggtctgtccgtttgagctggggctggatctaagcctgtggtgtgatgtagtcatcggggactacaactacctgtttgaccccgtcgtgcacttggaacgcttttttgacacagcgggggactatctgtttctgctcgatgaggcacataatcttccggaccgcgcccggggcatgcacagtgccgtccttgccaaaagcgccttctatgatgccaaaaagcggctgggcaagggcaaaagcagcctgaaaaacgcactgacaaaggtcaacgacatcttcatcgagtggcggcaccgctgcgaggaagcgcccggcgacagccgctttggccgcacgttctttgaaaagtcccgcgccgatgcgcttgaccgcgcgctgacaaggctctgtgagtcgctggagatctggcttgacgagcaccgcgaccccgacgagacccacgaggcactgctgcaattatactttgacatccgcgcctggctgcgcgtggcggacacgttcgacgatcactttgtactgcaaatctctgcccacggcagtgaggtccgtgccgcaatgctctgcctggacccgagtgactttctggcggcggactttgccaagggccgcgcggcggtgctgttcagcgcgacgctggctccggcaggctattacagagatctgtgcggtctgcccgatgcccgcgctgtagcgctgcgcagcccgtttgatacggagcatctgggcctgtggtgtgcccgccacgtcagcacccgctacaaggaccgcgcggacagcattgccaaggtcgctgacctgctggccgtgatgtccggggcgagggccgggcactatctggcgtttttcccgagctacagctatttacagcaggtgtgggaggatttcaccgcccggtacccggaccagccgaccctctgtcaggaaagcgccatggacgagggaaaacgcgcggagtttctggcacagtttcagaaatccgacggcagatcgctgttgggctttgcggtgctgggcggcgtttttggcgagggcgtcgatctgacgggggagagcctcatcggtgcagccatcgtcagcccgggcctgccgcaggtcggcccgcggcaggagcagctgcgcgactactttgagcagacgcgcggctccggctttgactatgcctaccgcttccccggtatgaacaaggttttgcaggcggcaggccgggtcatccgcacgccggaggaccgcggcgttgtcctgctcattgatgaccggttcctggcccccgacacccgccgcttgatgccgccgcactgggagcagctgcgggtcgtggaaagcgccgagacgctggccggggagctggaacggttctggggcagagcagcttctcctgagggggaagctgtcagcagccccgcccgcttatga

SEQ ID NO: 210 - DNA, 951 bp, unclassified Faecalibacterium
atgacgaaaaacaaatacacaaacctgcttttgcagaccctgggctgcttcatctccgccgccggtatctacagctttgccgtggccgccgaggtcccggtcaccggcattgcgggcatctgcgccatcttataccgcctgttcggcatccccatgggcctgagcaatgtgctcatcaacatccccatcatcctctgcacctataaattgctcggcagatcgttctttattcgcagtgtttactgcatggtgctctttgcattctttacggactatctgctgccgctgatgccggtctaccagggggaccgcctgttggcgacgatttgcggcggcgtggtcggcggtatcggcgacgcgctgatctacatgaacaactcgagcaccggcggccttgacttcatcaccatgggcatcaaggcacggcatccgcacctgccgttcggcaacatcacgtttgcggcggcgctggcggttatcctgctcaacggtgcggtgttccaggatgttgattccattatttacggtatcatgtttaattttatcgtgtctgctgtcatcaacaagatgatgttcggcttctcgtcctcgatgcttgccatgatcgtgaccgatgacggcaaggccgcctgcgcggaaattgaccgcgtggcggaccgcggctcgacgattttgcagggtcacgggggctacggcggccagccgaaggacgtcgtgctctgcgcctgctccaacaagcagctctacgagatcgagcacgccgtgcaagccatcgaccccggctgcttcatcatcatgctgcaatccaacgaggtccacggcgagggcttccggcagctggagttggggaagagcgagagccggagaacaaataaacaacatattaccgccggtttcagcgactctatgacgcataggttgccgaaaccggcggattttctttatactggg

SEQ ID NO: 211 - DNA, 591 bp, unclassified Faecalibacterium
atgcgcccctacggcggcagaaattttgagcggagcgcagcgacgcgaaccaccgattttattatctattctctaaaaaaaggagcagccatgaatccaaccttcaagcaagtaaccaagacccgctatgtccagctggtttccgagctggcgcaggagattttcgtccagcattacaccaagctgacgcccaaggtcgccgctgcactggccgataagtaccagagcgacatcctgaccgacgacgagatccacagcggcgtcatcaattacttcttaatttacctcggcaccgagccggtgggctatttcgcgctcgacctcggccccgcgggtgccatgtgcctgagccgccttttcttaaaggaaaaggcccgcgggcagggcattggccgcagcatcgtggcctatgcgcagaagctggccgagggcgatggccgcagccgcctgtatatgcgggtgtgggcacgcgacctgaaggccgagggctttgccaaaaagtgccgcttccgcaaggctgagacagcccccgtggaggtcctgcccggcatcacgctggacatcacgacctgggagaagctgtggcggtaa

SEQ ID NO: 212 - DNA, 1167 bp, unclassified Faecalibacterium
atggagttttctcgtcgtctggacctgttcgggccggagattttcgcggcgctcaacgacaaaaaggtcgcgttggaggccgagggccgtcatctttacaatttaagcgtcggcacgcctgattttgcaccggcggactacctgaagcaggcgctcatcgacgccgcacaggacaacaaaaactggaagtacagcctgcgcgacctgcccgagatgctggaggctgtctgcggctactacaagcgccgctttaacgtggacaccatcacccccgacgaggtcatgagcttctccggcagccaggacggcatcggccatctgggcctggcgctctgcaacgacggcgatctggtgctgttgcccgacccctgctaccccgtctttataaccggctccaagctgggcggtgccgagccgtggtactacaagctgacgaaggagaaccacttcctgcccgacgtcacctccatcccggaggacgtggcccgcagggccaagctcatgctggtcagcctgcccgccaaccctgtgggcagcatcggcacgccggagctctacgccgaaatcgtcgatttctgccgtaaatacgacattctgctggtacatgacaacgcctacagcgatattatctttgacggcgcccacggcggcagcatcttcaacacgccgggtgccggggaatgcgcggtggagttcttctctttgagcaagagcttcaacgtcacgggtgcgcgcatcagctttttggtggggcggcgcgatgtcatcgccgcctgcaaaaagctgcgcacccagatcgatttcggtatgttcctgcccattcagaaggtcgccatcgctgccctgaccggcccgctggatggcgtgcagcgccagtgcggcgagtaccagcgccgccgcgacgccctgtgcggcggtctgcgcggcatcggctggaatgtgcccgacagccacggcagcatgtttgtctgggccccggtgcccgccgggtacaagacgagcatggaattctgcctggccctgatcgacaaggccggcgtcatctgcacccccggctcgagctttggcccgagcggcgagggctacgtccgttttgccctgacgatgcccgttgagaagatcggcgaggccgtacaggcgatcaaaaacagcggcatcctggggtaa

SEQ ID NO: 213 - DNA, 987 bp, unclassified Faecalibacterium
atgactcagaacgtagaccgcgagacggttgtttcgcgtctgcttgctgcagatgacatcctgattttgtgccataaaaaccctgacggtgacaccatcggctcgggcacggcgctctgcctggcgcttcagcagctgggcaaaaatgccgccgtgctgtgcagtgatccgatccctgccatgtacgactacatgcccatcacggtgtttgacggcagcttccgccccgcgtttgtggtggcggtggatgttgcgggcattcagctttttggcgagcgcaacaacattcaggaatacgccgagcatgtcaatctgtgcatcgaccaccacggctcgaacagcggctatgcctatgagacgctggtggacgccggggctgccgcagctgccgagctgctgacgacgctcatccccgagatgggcgcgaagatcacgccggaaattgcctcctgcctgtatacgggtgtggcaacggacaccggctgcttccgattcagcaacacgacggcggagacccacaaggcggcagcggctctgatcgaggccggagccgacgtggaaaggctgaacgagcgcctgttcgagagccgctcccacgcgcgggtcatcgcggaacgcatggctttagaaagcctggagttttactacgatgaccgctgtgcgctcatctgcctgacctgggaccagatccaggccgcaggtgtggccggggccgagctggaggatctgacgagcctgccgcgctccatcgagggcgtcgaggtcggtctgaccctgcgccagcagaaggacggcagcttcaagatcagtgtgcgcaccgggcacgacaccaacgcctgcaacattgcgcggcgtctgggcggcggcgggcatccccgcgccgccggctgcgagattagcggcaacccggacaacgccaagcacgcgatcctcgaggaagtcaaaaaggaactggaccgcgccgacgcggagaaagaagcgcaataa

SEQ ID NO: 214 - DNA, 1890 bp, unclassified Faecalibacterium
atgttgttggaacttcaaaacttaggcaagagcttcggcgaacacgaggtactgcgtgatgtaaatgcaggtgtcgagcggggggaccgtatcggcatcatcggtgccaacggcaccggcaagacgacgcttttgcggatcctctgcggcgagagcctgcccgacgccggagatgccgcgttcggcaccggcgtgaccaccggctaccttgagcagaacgcccggctggacccgtcactggacatctatgccacaatgcggctggtctttaccccggcgcttgacgccatgcaggagatggacgcgctgcaaaagcagctggccgcagacccgcacaatgcggaactgaccgaaaagatcgcccactgcaccgctgtcatcgacgcgatggacgcttataacatggacacccagatcaaaaaggtgctcaacggcatgggctttcccgccgacacctggacaaagctggcgggcgtgctttcgggcggtgagcagacccggctgcgtctggcacggctgctgctggagcgccccgacctgctgatcctggacgagccgacgaaccatctggacctggaaacaatggagtggctcgaaaattatctgaaagcctaccgcggtgcggtgctcgttgtcagccatgaccgctacttcctcgacgccgtctgcacccgcatttgggagctgcgcggcaagagcatcaagacctaccgcggcaactactcggcctatctgccccagcgcgaggccgctgacgagcgccagcagaagctgcatgacgccgctgtagaaaaagctgccaaattgcaggactacgtggaccgcaatcttgtgcgcgcctccacgacgaagatggcccagagccgccgcaagcagctggaaaagctcgagatcgtcgaggccccgaccaccgaggcgtgggagctgaactttcgctttgagtacgacattgagccctatgacgagctggtcatcatgaagaatctgagcgtccatatcggtgaacgcaccctcatcgacgccctggactacgtcgttcaccgcggggacaagctcgtcattgcaggtcccaacggcgcgggcaagtccacgctcttgcaggtgctggacggcaagcgccgtccgtcgggcggtatggtccgcctgggcagcggcgccaagccgggcgtattcacccagcagcaggcccgccgcgcaggccgcgtcattgatgccatctggaaccagtacccgcgctttaccgagctcgaggtccgcagccatctggcacgcttcggctaccgcggcgaggaggtctttaaggactgtgcgtcgttgtccggcggtgagctggcccgcctgcgctttgccgagctggcgctcgagcgcccgaacctgatgttcttggacgagccgacgaaccacctggacatctacatgcgcgagagcctgacccaggcgctggcggcctacaccggcacactgctgctcgtcacccatgaccgctacctgatgcagacgctgggctgcccgatcatgtacctgcaggacggaaaagcgacgttttacccgaactttgccgccctgcaaaaccgtgacgcgggcaagacccaggagcagcaaaagaccgaggacactgccaaaaagcaggcatacggcaaggagcagcgcaagcgccgcgccgaggtccgcgcccgcctgaaaaaggtggaaagcgagatcgaggagctgggtgcgcatattgtcgagctggaaaatgagatcaacgaccccgaggtcctgcgcgaccatctgctgctgcgcgacaaatgcgacgagcttgacgacacccgcttccaccagcaggaactctacgacgagtgggaaaagctggccgaggagcaggaaacctttgaaaacgagggcgaatga

SEQ ID NO: 215 - DNA, 1434 bp, unclassified Faecalibacterium
atgccgcgcggagcagtgttttttatggcgttttcttcggtgcaatttctgttcgtttttctgccgctgtcgctggcggtctactggctgtgccccaagtggctgcgcaatgccgtgctggctgcgttcagtctgctgttttttgcgtgggcgggcttaaagggcgcggccatcctggtgctgctggccggtatcaactggctgggcgggctttcgctggggcggctggcccacaaaaggccactgctgattttgttgatcttgctggatctggcggtgctgggcggctttaaatatgcgggctttacggcggagacggtcaacgcccttgtgccgggtctgctgccggtgctctcccccgccctgccgctggggctgagcttttacgtgttcacggccatcggctactgtgccgatgtggccgcgggcaaggtggaatcggaaaagaaccctatccgttttgcggtgttcctcgcgttcttcggccacgggccgtccgggcccatcgtgcggtacggccagcaggccccgcagctggaccccggcagcgagacgcgccgcgtctcggcggaccgcttctgctacggcatcaagcggctcgtgctgggcctggcaaaaaaggccatcattgccgaccagctcgctttgatttacgccaaagtcgcgtcggtcccggcggccacgctgcccgcaccgatcctcgtgctgggctacacggcctacatgatgcagctgtattttgacttttccggatacagcgatatggccatcggcatcggtgagttcttcggcatcacgctgccggaaaactttgagtatccgtatcttgcctgctccgtcggtgaatactggcggcgctggcatatctcgctgtcgagctggttccgcgactatgtctacattccgctgggcggcagccgctgccgcctgcgccgcacctgcctgaacctgctcatcgtctttgcgctgaccggtctgtggcacggcgcggcgtggcagtatgtggtgtttggtctgctgcacggcataattttgtgcatggagcgcctgggcctgcgccgggcgctggagcagctgccgcgactgttccggcacctgtacacggtggtgctgctctggctgacgctggtggtcttcggtgcgccgggcttgtccgaggggctggccgtgctcaagggcatttttacatggcagagcggggccaagggctatacgctggcggcctttgcggacaccaagctgctgctgattttagcggcgtccttcctgctgtgcggccccgtgcaggcgctgtgccccaagctgaaggcggctttgtacgcgaaaaaggcaccgtcccctgccgggatggcggggctgctcgtgctgctgtttctgggacttatgcgcgtcacggcaggcacctacagtgcgtttatttattttcaattttaa

SEQ ID NO: 216 - DNA, 786 bp, unclassified Faecalibacterium
tcgtcatgctggtataaaatttatcataacggcagcaccttttcctgcaaaggtgttgctttttttgctgtcttttgccataataaatatatatgcaataggcaggcttatgcaggaaaggaggcacagcagatggcgaaaatcgccgtggtcgaggacaacgacgccatgcgggcgcagctctgcgggttcatcgcgcagtatgcgcaggagagcggacaccagctggacgtgaccgccttctcggacggggcacagcttgtggagccgtaccgccccgggtttgacatcatctttctggatattgagatgccaaagctcggcggtatgccgacggcggagcgcatccgcaggcaggacccggatgtggtgcttgtgttcgtcaccaacatggcacagtatgccatccgcgggtatgaggtcgacgcgctcgactttgtgctcaagcccgtcagctactaccagttcagcaccaagctggagcgcgccttgcagcgcatccagcgccgccgcggcgggcaggtggccttgcaggtcagcggcggggtgcagctgctggataccgacgacatcctttatctggaaacgcgggaccgccttttgcactaccacacggccacggatacctggtcggtgcgcggcagtctgctgaaggccgaaaaggatctggctgcctaccactttgcgcgctgcaaccagtgctatctggtcaacctgcgccacgtcaggggcgtgcaggatgatctggtgcaggtgggggaggagcggctggagatcagccgccgc

SEQ ID NO: 217 - DNA, 867 bp, unclassified Faecalibacterium
atgctgacctataatatggacgtggaggaacgcagcacctggctgcgcgccacccccggcgcggcggcgctggcacagccgttttactgcaccgaggccggcaacttttatggccgcgcccattttgccacggcccgcaccgataaggaaagctatctgctgttttatacgctgtccggctccggtctgatcgagcaaaacgaccagcgtgtggagctgcccgccggcagcgccctgctgttgaactgccgcgtcccgcaaagctactgcactgcccccgggcaggaccactggcaccactactgggcgcatctggacggcgcgggcgtcgccaatctggccgaggtactgcagccgcaggggcggctgtcccccgttacggtcagtcggctggagatgcagccgctgtttgagtcactggccgccgagtgggagcacggcgctgccgcacagatcgagatctgcttggccctgcaccggatgctggccctgatggcccgccagctgctggccggggacgagagccgctccaatcgcaccttgatcgaacaggccgccgagtacatccgccagcactatgccgagccgctgtcgctggacagcctgctggcccagacgccggtgagcaagagctggttcctgcggctgttccgccagtacatgggcacgacgccctacaattttttgctgtccacgcggatcacacgcgccaaggagctgctggtgctgacggatttctccgtctgcgagatcgcgcaccaggtcggctttggggatgaaagcaacttctcgacccgctttaccgccatggtgggccaaagcccccagcagtaccgcaaaagtgcaatgaagcccgcggaaaactga

SEQ ID NO: 218 - DNA, 1449 bp, unclassified Faecalibacterium
atgcagtatttgagcaccagagattccgcactccgcgtttccgcacaggaggctatcgtccgcggtctggcaccgcagagcggtctgttcgtgccggagaccttcccccaggctgatttggacgcatggaaaaatctctcctatccagagctggccgagaaggtcctggccggttttctgaccgattacagcgctgatttcctgcacaccgcaacggcatctacctacggcgctgcctttggcggcaaggcgggcgagaccgtcaaggtccgcgacggcctgtattctctcgagctgtggcacggcccgacctgcgccttcaaggactacgccctgcagctcatgccgaagctgctcgtcgaggccaagaagatgctgggccgcaccgagacgacccgcattctggtggcaacctccggcgacaccggcaaggccgcgctggcgggctacgccgacctcgacggcattgaaattgaggtgttttacccgaacgacggcacaagcgagatccagcatctgcagatggcgacccagaagggcgaaaacgtgcaggtctacgccgtgcagggcaactttgacgatgcccagaccggcgtcaagaaggtctttgccgacgccgacgtcgccgccgagctggaaaagcgcggcatccgcctgtccagcgccaactccatcaactggggccgcctcgtgccgcagatcgtctactacttctacgcctactttcgtctggccgagcagggcgcagtcgagtggggcaagcctgtggatttctgcgtgcccaccggcaacttcggtgacattctggcgggctactacgccaagcagatgggtctgcccgtgggcaggctggtctgcgcgtccaacaggaacaatgtcctgaccgacttcctgcgcaccggcacctatgatgcccgccgcaccttctacaagacgacctcgccgtcgatggacatcctgatctcctcgaacctcgagcgtctgctctaccacgtcagcggcagcagcgaaaaggtcgcgggctggatgcaggagctttccgccaccggcaagtacaccgttgacgccgagacgctggcaaaaatccagcagagcttcgccgcaggctacgccgacgatgccgacggtgctgctgaaatcaaggcccgctttgacggcgaccactatctctgcgacacccacaccgccgtggccttccgcgtggccgagacccggcgcaccgacgcgccgatggtcgtgctctccacggccagcccgttcaagttcccgcgcgacgtcctgacggctctgggtgtggaggcccccgccagcgactttgccgccatggccgcgctgaccgccgggaccggcgtcgaggctcccgcctcgctgcgtgagctggataagctcgaggtgcggttcaaaaccgtgctgcagcccgccgacatccgcaccgcggctcttcgttaa

SEQ ID NO: 219 - DNA, 948 bp, unclassified Faecalibacterium
atgctaacgctgggcatcgacaccagcaattacgcaacctctctggcagtgtttgacacagacgccggagaggttgtttgcgattgcaaaaaatttttgccagtcaaggaagggcagctcggtctgcggcagagcgacgcgctgttccaccacacggcagccttgcccgccatgctggtggagctgggcgcaagggccgacctgacgcaggtcagggccgttggcgtgtccgccaggccgcgccccgtggaggggtcgtatatgccgtgctttctggccggtgtcagcgccgcgacggcgttcagcctgtcccgcgcgctgccgctcatcgagctgacccaccagcaggggcatattgccgcggcgctgtacgcggcgggggatttcacgctgtttgagcgtgagtcacttgtatttcatgtctccggcggcaccaccgaccttcttttgtgccatggggccgagcgcatcacgccgctgggcacaagcagcgatctgtacgccgggcaggctgtggaccgcctcggcgtcaagctgggctttccgttcccggcgggcgtctatgtcagcgagcaggccgctttgtgtaaagaaaaagtccatcccaaggtcagtgtacacgggctgacgtgcagtctgtccggccttgagaaccaatgcgcaaagctgctggccgacgggcatgacgcgccctatgtctgcaaatactgtctgctctgcgtgggcgaaacgcttgtgcggatggcaaacaacgccctggccgagcatccgggtctgcccgtggtttttgcgggcggcgttatgagcagcgatctgatccgcacctatgtgacgaaccgcgtgccgaacgcacattttgtaccgggaaaatttgccagtgacaatgccattggcatctcgatcctggcggcgagggagtgtggcgcatggccgactacatcaatgtaa

SEQ ID NO: 220 - DNA, 1299 bp, unclassified Faecalibacterium
atgcgggtaactttttacaccttgggctgcaaggtaaaccagaatgaaacgggcgcgctggcccagctgtttgaggaaaacggctacaccgttgtctccaatgaagaaggtgcggatgtctacatcgtcaacagctgcaccgtgacgaacttcggcgaccagaagagccgcaaatggctgcgccgtgccaagcgagagaaccccggcgcggtgaccgtgctgacagggtgctacccgcaggcgttcccggacgaggccgccgagatcgccgaggcggacgttgtgaccggctccggcaaccgtcacgcgattctgaccgacgtacagaaggtgctgaacggtgaggaagagcgcgtcgtcgacatccgcccccacgagaagggcgagcgctttgaagagctgcccatggataagtttgccgagcacacccgcgcctttgtcaaggtcgaggacggctgcaaccgccgctgcgcctactgcgttattccgcgcgcccgcggtccggtgcgcagccgcgatgaggcgagcgtgctggaggagctgcgccgcctggccgacgcagggtataaggaggtcgtgctgacggccatcagcctgccgagctacggcaccgacagcggtacgagcttagtggagctgatcgaaaaagccgccgaggtgcccggcattgagcgcatccggctgggcagccttgaccccgacatgctgcacgatgacgacatccgccgcatggccgccgtaaagaagctctgcccgcagttccatttaagcctgcagagcggctgtgacaagacgctgcgcgccatgcgccgcccctacacgacggcccagtacgccgatattgcagccaagctgcgcgcggcattcggtgcggacaacgtcagttttaccaccgatgtcatcgtaggcttccccggcgagacggaggatgactttgaagccagcatggcctttgtgacgggaatgagatttttgaaggtgcatgtgttcccctactcccgccgtgaaggcacggcagccttcgactttgctgaccagctgcccgagcatgagaaggaggcccgcagtcgccgtatgaccgccgctgtggaggaggtacgcgctgccgaagcagccgctatgcagggccgcaaagccagcgtgctgctggaaacgccgctgtccgccacaatgttcaccggctacacgaagcagtacctgcctgtgctggtcagcgcacccgggcacaagaccggcgacattgtggaggtcacgctgggtgcctgggacgggaagcggtgcagggcggagatcgtttga

SEQ ID NO: 221 - DNA, 1146 bp, unclassified Faecalibacterium
gaggggttgaaccttgccacagcccgaaatgcttcggattgccgcaaggctctctcccccacccgctgcggcgggaaccccctcgcagagggggccgagaaatttcttcatttatataaggaaaagcctatgtccgaccatcccaaaatcagcataatctccacagtctacaacacagggccgtacctgcgcccggctgtggagagcattctggcccagacgttcaccgactttgagttgttgcttgtcgatgacggcagccacgacggctccgctgcggtctgcgacgcgctggcacaggaggatgcccgcatccgggtgttccaccagccgaacggcggcccggcccacgcccgcaacaccgggctggacaacgcccgcggcgactacatcggcatggtcgattccgatgatttgatagaaccgaccatgtttgcaacgctgtacagcgccgtgcaggtcgatggcgtgcggctggctgcctgcgcgggcgactgcatcgacgccgacggcaaaaaaatcgaaggccgcatggtcacgatccgtcagggcggtgtgcgcgatgcgcaggagcttttgcttgaggcgttccagaccggcagcttttacggacctttgagctggaacaagctgttcgacgcgcggttgtttaaggaaaagggcattcattacgatgagacgatgcttttcggtgacgatgccagcgtgctgcaccgtgtatttgagggggagcgctgcaactgcctgaccgatgtgctttaccattaccgcacccgcgccgggcagatcacaacggcgggctttccgccgcgcaagaccgacgacctgcggatgtactgggagtggctgcaatacttctcggcccgtcccgggcgcgaggagtactacgactgggccgttgtgcggtactggaagatcttttaccagttctggtgccagtccgatgcggcgggcaacctgcccgaggtcaggccaaagtttatggcgcacaaaaagcatttggatgccgttttgcccgacatactggcaagcaaatacctgccgctgggcgagaagctgcgggctgccgcgttctgcgccagccccacgctgacctacggcgcggcggctgcctggggacgcctgcatacgaggaaggggaaataa

SEQ ID NO: 222 - DNA, 1062 bp, unclassified Faecalibacterium
gtgagcaagccgaccctctgcgtgatcgtgccggtctacaaggccgctgcgacactggaccgctgtgtggccagcgttctggcccagcaggtcgcaggcgggatgcactgtattcttgtggacgacggcagccccgacgaaagcggcggtctgtgcgacgcctgggccgccagagacccccgcgtgacggttttgcatcaggagaaccgcggcgtgtccgccgcgcgcaacgccggactggctgcagcggacagtgagtaccttgtctttctcgacgcagatgacgcgctgcgccccggcgctttgcaggcggcgcttgacgcccagaacactgcgccgcagagctttgtgctctggcactacaccactgacgagctggacactgcaacggtaacttcggatactgccacccgcccacaaaatatgctggcgcggctttggcttgactgtctgctggctatgccgtggaataagctctaccgcaccgcgtcggcacagcagctggcatttgacaggcagtatactttaggtgaagatttacaatttgtattggattatatcgaccagtttggcaggactgcccccgattttgcctacactatcctgaccgcaccgctgacgttttacgattgcagccgcgagggaacactctcgacgaaataccacgccaactactgcaagatctggcccgagcattttgcccggctgaacaaggcgtgctacgcggcgcactgcccgcaggaggatatgcgccccctgcaccgcgccgagctgaccgtttacgccgagggcgtggcggacatcctgcgccgcgaccccgccaagcgcagggccgtgcgccgggacaaggcttatgccgccctgcgcagcccgtggctgcacgcccttttggagcggatgcgcattgagggctgctacagtgcctactacctgccctgccgctggcgcagcatccgccttgtctgggtcatggccgaggccagacggaccggctctcccctgttcggcaagctggactgggccggatattatctgctgggcaggaggctgcgcagggattga

SEQ ID NO: 223 - DNA, 1023 bp, unclassified Faecalibacterium
atggaagaaaaaatcaaggagctgcgcgccgctattgagcaggccagcgcagacgtcaccgacaaagcgcggctttctgacttctggcagaaatacctgagcaagaacggcgaggtcgcgggcctgaccaagagtctgcgcgatgtccccaaggaggaccgtcctgccgtcggcaagaccatcaatgagttcaagcagtgggccgaggcacagtatcaggccctgtccgagcaggtcgaaaaggccgcgctcgaggcccgcaatgccgccgagaccgtcgacatcacgatgcccgccaagattcgccaaaccggcagcctgcacccgatcaccctcgtcaagaatgagatcatcgacgtgttcgccggtatgggctttgagatttacgaggggcccgagatcgaggacgacgaccacaactttacccgcctgaatgtgccgaagaaccatcccgcccgcgacatgcaggatacgttctacgtcgcagacgacattgtgctgcgcacccagaccagcggcggccagatccgcgtcatggacatggaaaagccccccatcaaggtgctggtcccgggccgcgtgttccgttccgactccgacgcgacccactctccgatgttccaccagatggaaggcctcgtcgttgacaagggcatcacgctctgcgacctgcagggaatgctcgacaaattcgtccaggcgctgttcggtgcagacgtcaagacccgcctgcgtccgtcttacttcccgttcaccgagccgagcgtcgaggtcgacgtttcctgcttcgagtgcggcggcaagggctgcccgctgtgcaagcacaccggctggatcgaggttctcggtgccggtgtcgtccaccacagcgtactggaaaactgcggcattgaccccaacgtctactccggcttcgcattcggcatcggcattgagcgtatcgccatgctgaagtacggcatcaacaacatcggtctgatgtttgaaaacgatctgcgcttcttgaagcagttcgaggattga

SEQ ID NO: 224 - DNA, 900 bp, unclassified Faecalibacterium
agggaaatgacctccaagctaaaagaaggcgttatgcagggcgtgttcactctctgcgcctgtgtgtccatcctggcggtggcgctgatctgcatcttcctgtttgccaacggtgtgcccaccctgttcaagatcggcccgctcaagttcctgctgggcacgacatggaagcccggcaacgacatcttcggcatcctgccgatgatcctgggcagcatctacgtcacggcgggggctatcctcgtcggcgtgcccatcggcctgctgacggccatctacatgtccaagttcgcgtcgccccgcatcaataaggtcatgctcccggcggtgcagctgctggccggcatcccgtccgtcgtttacggcttcttcggcatgatcgtgcttgtgcccgccgtgcaggccatggtcaagtcgccgttcttcaaaaccgtgctccacgtcaagagcggcaagggcatgagcctgtttactgccgccgtgctgctgggcatcatgatcctgcccactatcatcacggtcagcaaggcgagcctcgacgccgtgcccgacagctactacgagggcagccttgcccttggcgcgacgcatgagcgcagcgtgttctacgccgtgctgcccgccgcaaaatccggcgtgctgtcggcagtcatcctcggcattggccgcgccatcggtgagacgatggccgtcgtcatggtcgcgggcaatcagacctggatgcccaagggcctgttccagggcctgcgcacgatgacctcgaacatcgtcatcgagatgggctacgccgccgacctccaccgcgaggcgctgatcgccaccggcgttgtgctgttcgtattcatcctgcttatcaacctctgcttcagccttgtgaaagggggtaaggactatgcctga

SEQ ID NO: 225 - DNA, 1140 bp, unclassified Faecalibacterium
atggctgcacttgtacaaaggattcgggcgcgggcggcatcgctgccgacattcgacataccgtttctgctgatcttactgctgctgttgagctacgggctcatcatgctgttctccgcggggtacgcggtggcgctctaccgccgcggcgacgcctatacctacatccgcccgcagctgctgtttgcggcgctgggcgtgctggctatgtacgcggccagcctggtggactaccatgtttggcacaggctggcctggccgatgctggggatctcgctgcttttgcttgccatcgtgcttttcatgccggagtacaacggctgcaagcggtggatcgtgctgccggggctgggcacgctgcagcccagtgaaatcgcaaaattctcgattgtgctggtgttctcgcatatcatctcactgaatcacgacaggatgaagtcgttttccacaggcgttgtgccgttcgcgttgattctgggggtcgtcacggtgctcatgctgctggagccgcacctgtccggcacgctgctgatcctgtccatcggcgcggtgctgatgtttgtgggcggcacggggctgcactggtttgggctggccggggggctgggcgcggcggccattgcggcggcggtcattgcgctgccggagctggtgccctacgccacggaccggctcgcgtcgtggcgcgacccctttgccgacccgctgggcgaaggtcaccagacgatccagagcctctacgccatcgcgtcgggcgggctggccgggctggggctgggcaacagccgacagaaatatctgtacgtgccggagccgcagaacgactttattttttcgattttgtgtgaggagcttggttttatcggggcggcgctggtcgtggcgctgtttttgatgctgctcttgcgcggcatgtcgattgcggtgcgcgcgcgggataagttcggcgcactgctcgtcgtcgggttcgtcgtgcaggtcacgctgcaggcgattctgaacatggccgttgtgacgaacacgatcccgaacaccggcatcagcctgccgtttttctcgtcgggcggcaccagcttattgatgctgctgggggagatgggcatcgtgctgtcggtgtccaggcagacggatatggtgtag

SEQ ID NO: 226 - DNA, 1662 bp, unclassified Faecalibacterium
atggcagacgaaaaattttccaacttcctgacggatattatcgatgccgacctcgccgagggcaaggtcgatgtcgtgcatacccgtttcccgccggagccgaacggctacctgcatatcggctccgccaaggcgatcttcatcaactacacgatctccaaacactacggcggcctgttcaacctgcgctttgacgacacgaaccccgcccgcgagggtgacgagtacgtgcagagcatcctgcaggacctgaaatggctgggtgccgagccgaacggcggcattttctacggcagcgactattttgagcgctgctatgagtacgccgagcagctcatcaaggagggcaaggcctacgtggatgacctgacccgcgaggaaatgcaggagtaccgcggcaacgacgccggcaaacccagccgcccgagcccctaccgtgaccgcacgccggaggagaacctcgacctgttccgccgtatgcgcgcgggtgagtttgccgacggcgaaaaaacgctgcgcgccaagatcgacctggccagcccgaacatgaacatgcgcgacccgaccatctaccgcatcaagcatgtcgagcatcaccgccagggcgacaagtggtgcatctacccgatgtacgactttgcgcaccccattcaggacgccattgagggcatcaccttcagcctgtgcagtcttgagtttgagaaccaccgcccgctgtatgagtgggtcatcacgaacctgttcggcaaagaatttccgaagcagcgcgagtttgcccgcctgaacgtgacgaacaccgtcatgagcaagcgttacctgcgcgagctggtcgagaagaacatcgtggacggctgggacgacccccgtatgccgaccctgtccggcctgcgccgccgcggctacacgccgacgagcatcttcaagttcgttaaggacgccggcatctccaaggcggataaccttgtggatatgcgccagctggaggccgtgctgcgcgccgagctggagctgaacgcccagcgccgcgtggctgtgctggagcctgtcaagctgatcatcgacaactatcccgccgaccagtgcgagtattttgacctgcccaacaacccgaaccgcgacgccaacgacacgacgacccgcaaggtcgccttcacgaaggagctgtggatcgagaacagcgacttctttgaggtgccgccgccgaaattcaagcgcctgacgcttggcagcgaggtccgcctgatgggcgcgtatctggtgcgctgcaccggcgtggacaaggacgagaacggcagggtcgtggccatccacgccgaggccgacctcgagacccgcaacggcaaccccgccgatggccgcaaggtgcgcggcacgatccactgggtcagctgcgcccactgcctggacgccgaggtcgagctgtatgataagctgttcaccgaggccaacatgaacagcatccccgacgacgcggatttcaaggattacctgaatcccgacagtgtcaaggtgctgcagggcgcgaagctcgaggagagcctgaaggacgccaagcccggtgaccgcttccagttcgtgcgcaacgggtattttaccccggacagcaagcatgagggcgtgtacaatcgaatcgtcacgctgaaggacagctttaagctgtaa

SEQ ID NO: 227 - DNA, 948 bp, unclassified Faecalibacterium
cggctgtcaagcaatacacacaagaggaaaaagcaaatggaacagaatcataacatgctgcgcggtatctccgaaaacggcggtatcgtgttttacggtgttgactctacggaaatcgtccgcgagatggagcgcctgcacaagaccagcgccgtcaccaccgctcccctgggccgtctgctgacggcagcctcaatgatgggcattatgctcaaaagcacccaggactcggtgacgctgcagatcaagggcggcggccccgcaggccgcctgctggccgtttccgacggcaccggcaacgtcaagggctacgtcgagcaccccgttgtggaacttccgccgcgggctgacggccatctgaacgtcggcgcagccgtcggcaaggacggcacgctggacgtcatccgtgacttgggtatgcgcgagccgtacatcggccaggtgccgctgacctccggtgagatcgccgaggacatcacgacctattttgctatcagtgagcaggtgcccactgtctgcgcgctgggcgtgctcgtcgataaggacctgagcgtccgctgcgcgggcggcttcgtcgtgcagctgctgcccggcgcaaccgaggaggagatcgagcacctcgagaagaacatcaaggccatgcccagcgtgacgacaatgctcgaggagggcaagagcgtccgcgatatgctggagctggctctggccggctttgcacccgatattctcgacagctaccatgtgacctacaagtgcgactgcggccttgggcgcgttgaaaagatgatccgctcccttggcaaaaaggaggtcgagcgtatgcgcgacgaggaccccgttgccgaggtgaactgccagttctgcaacaagaattataaggtggatctgaatgaactgctcaaaaactggccttccaccgccgaaaatgtgccgagcgaaaacgcataa

SEQ ID NO: 228 - DNA, 1554 bp, unclassified Faecalibacterium
atgaaaatcacgcttgtacgttctatggcgcgcagcgcagtgtttgagctggtcaactccggctgctaccgcgccccggctccttatacagtctcattggacggcgccacagtctgtgagggcgatacgaatgtgttctcactctattcgatggaaccgggccgcagctacacgctggccgtcacccttgacggcgtgaccgatacgctggactttaccaccgcggaggagagcttcttcgtggatgcctcccgctacggcctcgtcgccgacggcgtgaccgacaacacggccaagctgcaggcggcgctgtccacctgccccgcgggcggcacggtctacgtgcccgccggcacctaccgcacccaaagcctgtttttgcagagcagcacgacgctgtatctcgaaaagggctgcacgctgctgggcggcaccaaccgcactgactaccccattctgcccggtgttctcccctgccataacgagaaggacgagcactacctcggtctgtgggagggcaacccgctggacagctttgcgggtcttatcaacgtcatcaacgccgagaacgtgacgatcaccggcgagggtatgattgacgccaacgcccagaacggcgactggtaccagaacccgaagaaaaataatattgcctggcgtccgcgccttttcttcaccagcggcgccaaaaacgtcgtgctgcacggcgttctggtctgcaacagctattcctggaccatccacccgacctactccgagaatgtggacatcctgaacatacgcatccgcaacagctccacaagccccaacaccgacggcatcgaccccgagagctgcaagaatgtcaacatcatcggcaaccatgtacacgtcggtgacgactgcatcgcgctgaaatccggtaagctgttcttaggcatgaagctgcatgtcccctgtgagaacgttatcatccgcaactgctgcctgagccgcggccatggcggccttgtcatcggcagcgagatgagcggcggcgtcaagaacgtcaccgtgacccagtgcctgatggaccatacggaccggggtctgcgtgtcaagacccgccgcgggcgcggcaagtacgccatcatcgacgggctggtattccgtgacgtcgttatggatggcgtgctggcgccgtttgtcatcaacatgttctatttctgcgaccccgatggccgcagcgactatgtgcagacccacgaggccctgcctgtcgacgagatgaccccgacactgggcacgctggagatggaaaacatcacggccaccgacgcccagtacgcaggctgctggttcagcggcctgcccgagcacccgatcgagggtgttaagatgcacaacgtaaaaatcagctttgcgccggacgctaaagccggtcaggccgccatgatgtgcggcgcgaatgcctcctgcaaggtgggcgtccatgccgagaacgtgcataaaattgagctgcacaacgttgcgatcaccggctacgagggggagcgcctgcagctgacaaacgtagatagccttgaggaggactga

SEQ ID NO: 229 - DNA, 1452 bp, unclassified Faecalibacterium
atgagcaacgaatacgattactccggtctctataacaatacatccggcagcggtcagccgaacggccagaacccgcagcccgagcagagcgcccccgcgcagaaccagcagccccaacagagcagctaccccaacgtaggctccagcggtgtcaacactgccaacacggcgcgcacagattattcttcctacaattccggcagcacgtccggccagaatccccagcaggattccaacggctacaccagcagcttcagcggcggcaatggcaataacggcggctacaacggctacagctattccagcgccccgcagcagccccccgtgccccagaagaaaaagggcagcaaggtcctgctccgcgtgctggcctgcgtcggcgtggctgcgctgggcttcggcggcggcctgggcggcgctgtggtcgccagccgtgcgggcctgacaggcaaccaggtggtcgtccagcaggtagagcgcagcacggacgccaccgccgcaggcagcaccgatggcacaagcatgagcgtgcagcagatcgcgtctgtcgtctcgcccagcgttgtcgccatcaccaccgagcagatgagcagcagccagacctggttcggcggctactacgtccagagcggtgccggttccggcgtcatcatcagccaggacggctacatcctgacctgcgcccacgtcgtcagcggcgcgaccagcgtaaaggtgcagctgaacggcagcgacgagagctacgacgccaccgtcgtcggtcaggattccacctccgacatcgcggtgctgaaaattgatgctgcgggcctgaccccggcagtcatcggcgacagtgacgccctggccgtgggcgaggtcgccgtcgccgtcggcaacccgctgggcacgctgtccaacactgtcaccgatggcatcgtcagcgcgctgaaccgtcaggtcaccgtgcaaaacaacgatatgacgctgatccagaccgatgcgtccatcagcccgggcaactccggcggcggcctgttcaatgcgaacggcgagctgatcggcattgtcaatgccaagtccagctacagtgaggccgaaggcatcggctttgcgatccccatcaacacagccatggagatcggccggcagctgatcgagaacggcagcgtggctcgtcccgcgctgggcgtcaagatcatggatgtgaccgacgcccagaccgcccaacagctgggtgtctccacaatgggcgtctacgttgtcgaagtcacaaagggcagcggtgccgacgccgccggtgtacaggcgggtgaccgcgtgctggccgtcgatgacaccgccgtcagtgattcctccgcgttgaagaattacctgaaggacaagggcatcggcgacaccgtcaacctccaggtcgagcgcgacggcaaggtgctgacgctggctgttacgcttgggtccagcgcacagtaa

SEQ ID NO: 230 - DNA, 1857 bp, unclassified Faecalibacterium
atggcgaagccattcggcggtaagcgcccgcaggacctgcggcacacgctgcgccgcttcatggactatctgggccgccacaaaatcatgctcggcgtcgtcggcctgctggcggcggtcagtgcgctggccgcgctgctgggcacctacatgatccgccccatcgtcaacggcgtgctggaaaacggcagtgccgcctatctggccggcgtcgtggcgctgaccgcgggcatctacatcgtcggcgcactgtctaccttgggctacacccagctcatggtccgtgccgcgcagaagattttgcaggacattcgccgcgacctgttcgcacatctgcagacgctgccgctgcactactttgacacgaaccgcaagggcgatctgatgagcctgttcacgaacgacgtggacacgatctcggacgcgctgaacaacagctttgcggtggtcatccagacctttattcaggtcgcaggcacgctgcttttgctgttcatcctcaactggcggctctcgctgctggtggtcgttggctatattgccatgttctggtatatcaactactcgacacagcgcagccgcgccttttatgcgcgccagcaggccagcctcggtgagctggacgcctacatggaggagatgatcgccgggcagaaggtcgtcaaggtgttcaaccaccagcaggccgacatggccgcctttgccgcccgcaatgaaaagctgcgcgaggccggcaccggcgcgcagagctacgccgccacgatgattcccgccgtcgtcagcatcggctacctgaactacgcggtcattgcggtggtcggcggcctcatggtcatgtggggctggtccgacctcggcagcctggccagctatctggtctttgtacgccagacgacgctgcccatcaaccagctgacccagcagggcaacttcctgctggcggcgctggcgggtgcggagcgtatcttcacggtcatggaggaaaagccggagatcgacgagggcacggtggagctggtcagcgtgcgggaaaacagcgacggtacgctgaccgagtgcgccgggagcacgggtcgctgggcctggtgtgaccgccgccgtcccgacgttccgctcgagccgctgcacggcgacgtgcggttccacgacgtcagctttggctacacgccggaccggatgattctgcagaacctctcgctctacgccaagccggggcaaaaaattgcctttgtcggctccacgggcgcgggcaagaccacgattaccaacctcatcaaccgcttttatgaggtgtcgggcgggtccatcacctacgacggcatggatgtgcggctcatcaagaaaaacgacctgcgccgctcgctgggcgtcgtcttgcaggacacccacctgttcaccggcacggtggcggacaacatccgcttcggcaagctggacgcgacacaggcagaaattgaaaaggcggccaaaattgcgaacgccgactccttcatccgccgcctgccgcaggggtacaacacgatggtgacgagcgacggcgcaaacctgagccagggacagcgccagctgctggccatcgcccgcgccgccgtcgccgacccgccggtgctgattctggacgaggccacgtcgagcatcgacacccgcaccgaggcgctgatccagaagggcatggacggcctgatggagggccgcacggtgtttgtcatcgcgcatcggctttccacggtgcgcaacgcggacgccatcatcgtgctggagcatggccatatcatcgagcgcggcacccacgacgagctgctggccaaaaagggcgagtattaccagctgtatcacgggatgtttgagctggcgtaa

SEQ ID NO: 231 - DNA, 564 bp, unclassified Faecalibacterium
atgaaaaaacaaagtctgaacgcactcgctgcctcctaccgcgctgacctgctctactacattgagcgtgccaagctgggcaaatgcccgccccactggcaggcctactgctttggggaaatcgctgcggccaagggcacggatgcctaccctgaggacggcgacgcactgctggacgagctgcaccggctggtggacaccgtgccccagatcacgaaccgcgaggaaagcgcggcggagatcgccgcctaccgcgggcagatgctcttttactttgaccgcgactactacacgctggccgagctggtgcgcctgcctgaccggaaaaagtacggcgcctgcgtttacattgacgccgacggcagcaggcaggaccgcccgggctatgccaatgacatagcactgcaggtggacgaatggcgcagggagaacggcatcccgtttgacaagtcgaccatcgccgccagccccagcgaggtagacggcggcgagtttgacacgatggacgaggcactgcggtacctgtacacctgcctgaatttcccggacagcgtattatgctga

SEQ ID NO: 232 - DNA, 1221 bp, unclassified Faecalibacterium
atgtccggcccgcagctttcccggcaatgccctgataaggcgaggccgcgggcgaggcatgccgcgcccctacaactcaaaagcaaaaatgtgcagcacgaaagaaccgtgctgcacatttttttaaccaaggaggcccctatgtcaaatacccccggcgcgttgatcgccatgagcggcggcgtggacagcaccgtcgccgcctacctgatgaagcaggcgggctgccgctgcatgggcgcgaccatgcgcctgtaccagaatgaggatctaggccagagcgggttccacacctgctgctcggcgaaggacgtcgaggacgccgccgaggtcgcgttccagctcgacatcccgtttgaggtcgtgaactacaccgaggaattccgcgaaaaggtcattgccaagttcatcgagacctacgaggcgggcggcacgccgaacccatgcatcgactgcaaccgcacgatgaaatttgacaaaatgctggactttgcccgggagcacggcctggactatgtggtcacaggccactacgcccgcatcgagcaggaccccgctacgggccgctggctgctgaaaaaagcactgtacaccgataaagaccagagctatgtgctctacgttctgaaccaggaccagctggcgcacacgaagttcccgctgggcggcatggacaaaccgtccatccgcaagatcgccgaggagcagggcttctgcaacgcgcgcaagcacgacagccaagacatctgctttgtgcccgacggcgactacgtcggctttatggagcgctacaccggcaaatattatccggacggcgactttttggacgtgaacggcaacgttgtgggccgccaccacggcgcggtgcgctacacctgcggccagcgcaaggggctggggctggcgttgggcgcgccggtctacgtctgcggcaaggatatggagaagaacaccgtcaccgtcggccccgagagcgagctgttcaagacgacgctgatcgccggggacttcaactggatttcggttcccgagctgaccgccccgatgcgcgtcaaggccaaggcccgctaccgccaggtcgagcagcccgcgacggcctacccgctggaaaacggccttgtgaaggtcgtttttggcgagccccagcgcgccatcacccgcggccaggccgtggtgctgtatgacggcgacgtggtcgtcggcgggggaacgatattataa

SEQ ID NO: 233 - DNA, 708 bp, unclassified Faecalibacterium
gtcatgtcaaaattattcccgcatcaccgcggccagatgtcggaggcattccgcacggtcatgttcttgtcggcgtcgggcggcctgcaggacgcctacacctacattgggcgcggcaaggtgtttgccaacgcccagaccggcaacatcgtgctgatgagccagagcctgtttgatggcgatttatcgcggtttgcccactattttatccccgttctgtcctttgcactgggtgtggccgcggcggagtgcatccgcttgcgctggcggcaggcccgccgcatccactggcgtcagctcgtcgtgctgaccgagatcgtgctgctgttcgcggtaggcttcttccctgccgcgtgggatattggcgcaaacgcgctggtctcgttttcctgcgccatgcaggtgcaggcgttccgcaaggtgcatggctacccgtttgccagtaccatgtgcatcggcaacctgcgcagcggcatggacgcgctggttgcattcggacacacccacgataaaaacgcgctgtggaagtccctgcactactttgccattatctttatctttgcgctgggtgcgggcatcggcacacagtgcgtcggcatcttcggcgagaggacgatctggctttcctgcgcgctgctgctggtgagcttgtgctttatgtttatcaaagaggatctgccggagatcgaggaggagctgaaaaaataa

SEQ ID NO: 234 - DNA, 969 bp, unclassified Faecalibacterium
atgaaaccgaatttgtacatctgccacaccgcgtatcaggtcttggtcgatctgctgcgggccgggcgctgcgccggcaagccccacacgatggtgctctccgcctccgtgcccgacaccgccgcgctggcggcacgtctggacgcgacgggcgtggtcaagactgtccttgtggacgaaacgcgctggcccgggaccgtgacggggctgtttgcccaccggcgcgcggcccgcgcctttgagaagctgtgcggctggaaattgaaccgtgcagcgtttgaaaatgtctatatccacaacgattggagtgtgctgggccgctatttgcaggatcgccgtgccgggtatattttgtgcgaggacacgttcggcagtacgctcggccctgaccagcatcttgtgaccgaccagcgcgcagcggcggattttgccgcgaagcagcgcggaaaaggctacctgtactggggcgacagcccgtggtgcgtccgcgtcgagagtgaggacgccgcacggtgtacgctgttcccggcagaccgcatggtgacggacagcaaggccaaactgttagagagcctgaccgacgacgaaaaagcaatggtgcgccgcgtatttttgacgcagcccctgcccgagaaggcagacggcgcgacgcttttgctgccccgcagctttgtggccgacgggctgatgacccaagcggagcaggacgcgatgttcaaagcggtggcggaaaaatacgccgttgggccgctctttatcaagacacacccgcgggacacgacggattacgccgccctgttccccgatgcagtcattttggagcgcacgatgcccagcgaggtgctgaacttctgcctccccttccatttcgcccgtgccgtcaccgtgcagagcttcgtcctgcgcggcttcaccgcggcggatgagaagatcctgctgacgctggaggaggcgaggaaactggtttga

SEQ ID NO: 235 - DNA, 1365 bp, unclassified Faecalibacterium
atgagctggattttgtatgtgctgctggtgctggccgtggcgggggacatcctgctggccgtggtgctggcaaaggtgatgcacaaaaacgacgaaccgcagcagaaaattgatacggcggatgactttgtccgcgcggtgacgccggttttgcagagcgagaccgacctgctggccgagcagctgcgcgccatgcagggcgagagcgcacgcacaacgacggcgacgctgcgggatttttctgccgttctggccgagaaccagcgccagaacgccgccgccagcacggcgcggctggaatccattgaccgggccggggccgcccgccagaaggccgcgaacgatgccctgctggcccagctgacgatgatggaaacgcggctgaaaaatcttgaggactccaatgcgacccggatggacagtgtgcgcggcgcgctggtgcagggtctgaacacgatccgcgccgacaacaacaaaaagctggatgagatccgcggcacagtcgaggaaaaattgcaggacacactgcagcagcgcatcaacgactcgttcaagacggtcagtgcccagcttgagcaggtctacaagggtctgggcgagatgcagaatctggccgccgacgtgggcagcttaaagcaggtgctgtccggcgtcaagacccgcggcatcctgggcgaggtgcagctcggcgcgattttggagcagatcctggcccccggccagtacgcctgcaacgttgccaccgtgcccggcagcacgaaccgcgtggagtacgccatcaagatgccggggcagaacggcacggtctggctgcccatcgacgcgaaattcccgggcgatacctacgcgcatttgcaggcggcgcaggagcgcggcgatgctgccgctgtggccgccatgcgcaaggcgctgaacaacgtcctgcgcgccgaggccagggacatccacgacaagtacattgaggtgccctacacgacgagcttcggcatcctgttcctgccgtttgaggggctgtacgccgaggtggtttccagcggtgtaacggagcttttgcagcgggattaccagatcacggtggccgggccgtccacaatggcggcgctgctcaacgccctgcagatgggcttccgcacgctggccatccagaagcgcagcggcgaggtctggacgatcttgggtgcggtcaagaccgagtttgaaaagttcggcgcgggtctgcagcagatgcagcgccatctgaaccagaccggctccgatctggaggagctgatcggcccccgcagccgcgccatcacccgcaagctcgaatccgtccagcagcttgacccggatacggccacagagctattgggcattgaggagtag

SEQ ID NO: 236 - DNA, 867 bp, unclassified Faecalibacterium
gttccacgcatggaaaaaacgcaactgcaaaactaccatgtccactacggcccggcccagggctggagccgtgttgacctgcgcgagctgtggcgctacaaggacctgatctggctctttgtcaagcgcgatttcaacgtcatgtacaagcagacggtgctgggcccggcgtggatcttaattaacccgctcatgtccacggccatgtactgcgtcatgttcggcacgattgcccagctgtccaccgacggcgtgccgcagattctgttctatctggccggcacggcgctgtggggcttcttctcgtcctgcatcaacaaggtgtcgggcacgttcacgacgaactccaacatcttcagcaaggtgtatttcccgcggctggccatgccgatttcgacggtgatctccggccttatcaactttcttgtgcagtttgcactgtttttcatcctgctgcttgtctaccttgccaaaggcgaggtcagcccgcactggggtatgctgctgctgtgcgtgccgctggtgctgcaggtcggcctgctgggccttggctgcggcatcatcgtgtccagcctgacgacccgctaccgcgatctgatggtcgttgtgaccttcggcgtccagctgtggatgtacggctcgcccgtcgtctacccgctgtcgatgatcacccaccccgtcctgcgcgccgtcatggtcatcaaccccatgaccgcaccgatggagagcttccgctatatcttcttcggcaccgggcaggtcacgggcgtcatgtgggcgtcgtcgctgatctggaccgttgcgctgctggcgctgggactgtcgcttttcagcaaggtcgaaaagaccttcgtcgatacggtgtaa

SEQ ID NO: 237 - DNA, 1755 bp, unclassified Faecalibacterium
atgtcccttgatgccgcaacgctggcgctggtcgccggtgaactgaaaaacacgctgctcgatgccaagatcgacaaaatttttgagccgacccgcgacgaggtgcttatgaccctgcgcacccgcaccgagacccaccgtctgctgctgtcggcccgcagcggctcggcccgcgtctgcctgacgaaggagagcttcgaaaacccgctcacgccgccgggcttctgtatgctgctgcgcaagcacctgaccggcgggcggctcattgagctgcgccgcgagccgggggaccgcatcgtctattttgacttccgctgcacgaacgagatgggcgacctggtcacgaatacgctggccgtcgagctgatgggccgctactccaatctggtgctcgtgcagggcgggcgcatcattgatgccctcaagcgggtggactttgacgacagcgaggtccgccagctgctgccgggtctggcctacacgctgccgcccaagcccgcgcggcctgactttttggagacgagcgccgccgccatcgtggccgctgcgtgcgagaaggatctgcccgttgcacaggcgctgggcaagacggtggcgggcgtcggccccgtcgtcgtgcgggaggccgtctgccgcgcactgggggaaacgcctgcgctggcctgcgacctgaccgccgaggagaaggctaggctggccgcggccatcgacgaattgaaggacgagcacgcccacggcggcacgcccaccgcggtgcgtctgccccagccggacggcgcaccgaagcccgtggagttcagcttctttgtgccgcagcagtacggcagcgcggcgattttgacccggtatccgtcctacagcgagatgctcgaggactactacgccacgaaggaccgcgccgagcgcctgcgccagaaaagccgtgagctgtacaaggccgtccacaatatgtatgaccgcgccgtccgcaagcaggccgcgcggaaggaggaactgagccagtccgccaaggccgacacgctgcgcctgtacggcgagcttttgcaggcgaacctctgggccatccacaagggtgaccggcaggtgaccgtgcagaactactacaccggcgaggatgtgaccatacgcttggacccgcgtctgggcggcaacgagaacgcgcagaagtatttccgcgattataaaaagaagcagaccgcccacgccatgctgcaaaagctgctggtggagggcgaggccgagatcgagtatctgcgcacggtgctgtatgaggtggagagcgcccccggtgagatggcgctgaacgagatccgcgccgagctgaaaagccagggctacttaaagtattacaagcagcgggaccgcaagcagaagcccgcggacttcctgcggtatacctcgagcgacgggtttgagatcctggtggggcgcaacaacctgcagaacgataagttgaccctgcacaccgcccgcggcaaggacctgtggttccacgtccagaaggcacccggcagccactgcgtcgttatgagccgcggagaggacatccccgacacgaccaaacaggaggccgccgagctggccgtcctgcattcgagccagaacggcggtgcaaaggtcgccgtggacaccaccgaggtcaaaaatatatggaaggccaacggggcgaaaccgggcatggtgctgtacgaggtctacacgacggtctacgtgacgccgcgtgaagggctggaggagcagctgaaaaaacggtaa

SEQ ID NO: 238 - DNA, 897 bp, unclassified Faecalibacterium
ctgcgcaaggtggcgggccggacatgtccggcccctacggacgcggcaaaaagcaaaaaaggagcagaaattatgtctacgatttatgagattccctgcgtcaagggctttatccgcatgtgcaacgatggctggctgcagggctggcacgagcgcaacggcggcaacctgacctaccgcatgaccggggaggacgtcgccgcctgccgtccctacttcgacgccgagccgcgcgagtgggtcaacatgggcgtgcaggccgataatctggccggtgagtacttcatcaccaccggctccggcaagttcttccgcaacgtcgagcctgacccgatccacagcatcggcattgtggagatcaacgacaagggcgacagctggcgcatcgtctggggtctggccgacggcgcacgcccgacgtccgagttccccagccatttcatgaaccacagcgtccgcaaggccgctaccaacggcgcgaaccgcgttatttatcactgccacgccaccaacgtcattgcgctgacctacatcctgccgctgacggaccgtgacttctcccgcgccctgtggcagagcgctaccgagtgccccgtcgttttccccgagggcgttggcgtctgcccctggatggtcccgggcggcgcggacattgccatggccactagcgagaagatgaaaacctatcaggccgctatctgggcacagcacggcctgtttgcctccggccctgactttgacatcaccttcggcctcgcccacacgattgaaaagagtgccgagatctacgtcaaggtcctgtccatgggcggcggcctgatccgccagaccatcaccgacgatgacctgcgcgccatcgcccacgacttcggtgtcaccctcaacgagaacttcctc

SEQ ID NO: 239 - DNA, 1752 bp, unclassified Faecalibacterium
atggaacaggtcaaatcattttgtcggcggtaccgtcggctgctgctggctgcggcctatctggctatttttgccgtgggcgtgctgtatctgcgcgtcacggtcaacatcccgccggagggcgacgataagctgacgctgaacctctggctgtatgacttccagcggatgccgttctggcagtatgctctgcaggacctgcaggagcggctgcggtactttacgctgcaggaggtccgttttttcccgttccattacccgaacgccgtcgacctgctgttttacaccagcctgacgcactaccggctctacatcatcgcctggaccggcgcggcggccttcgctgtcagccgcgtggcggccagactgggcagcggggatgcgctggcgctgggcggctttgcgctggcgctggccgcggcccccatctggaacgaaggcatgtacagctactacgccgtaccgcagcgggcgttgttctgggctatgacggcctggctctgcctgtttgcgtggcaggagacacggcaccgccgctgggctgtgctgggcgcggtgctgtcctttgtcgcctgcggcacctatgagatcggctatgtctttgcactgctggcgctcgtcgtctggctgccgcgccgacgcagcgtcaaaaacgccctgctggacacggctcccgcgctgggcggcatgggcgcggcgcttgtgttccacgttctgtgcgggcgcaacggcggcaccggcaacgagctttctctggatattcccgccgtgctgcgcgtcaccgtgcagcagatggccgcgtcgctccctgggctgaactcccgccttttgcaggaggacgccggggtcatcacgaacggggatcggctgtggccgctggcgctgggtgtgctggccgggctgttgatcttcttcggcgtgccgtttaaaaagctgcgcggcagaacgctgggcgcactggccgggttcggcctggccgtctgggcactgcccgccctgctgctggctttgtccgcccgctatcagcagcccgaggccattacctggcagtggggctacattcccgcggcggccagctccatcggctttacgctgctcgccgcagcgctgctggcgctgctggcgggcctgtgctgtaagctgccgaaaattctctccgtggtatcacgactggccctgacggcggcgctggcggtgggtctctgcctgaacggcggctaccttcgcggtgtcgtgcgcacccaccatgccgagaacctcgctgcctatcagttctttgtccgcacgatcgaggccggtcttgccgatgccgtacaatccgacgacctgattctctgcaacgagaacgtctgggacagcaacgcggaggccgagtccgccttcttcagccggttcaccgggcgcgccctgcacgcacaggtcctttggaccgagaaccccgccaccgacggcgacgcctacgcctaccagacctaccgcaattacggaggctacgatctggcgtggtgcggcagactgcaaagcgccgacagtgacctgatggacggggtacaggtctacgtgcagagcgcctatgtccccgacaacgctgtcatcaagtacaaggtccgtctggccgacggcaccgaggaggcccgcgccatctgcctgctggactgcacccagaccccgcgggaccggaacggcgactatctggccactgttgaggacacgtccatcgtgaacgccaagctcatgatctgggacggctga

SEQ ID NO: 240 - DNA, 957 bp, unclassified Faecalibacterium
tgtgttacaggagaatccatcatggcaaagattcaccgcagcgatgcaccgctgccgcaggccccttccgttcaggtaaaggcatcctatacagtcaccaatctgtcgaaggtttctccgcaggaacctgcggccttctacgaccaggacaacgacgaggactatcgccggcgcgagaccgcgaagtgcaaaaaaaagcgcggtaatctgctgtacaccctcgcgatgatcgttttcgccgcaatctttctcatcagcggcggcctgctggtcaagcggttcctcgatgaccgcaagaccgagagcgagtttgccgacctgcagtcgatgattgataccgcggcgaccccggcccctgcaggggagaatgtcaaccccaacggtgccaggtttgctgccctgcgcgacaagaacagcgactttatcggctggatctccatcgaaggcaccaatctggattttccggttatgtacgcgccggacaacaaggacttctatctgcgtcatgacttcaacaaagcctacagcgtctacggcgtaccgtacctggacgagcaaacgacgctcggggccaacgccgagagcgacaacctgatcatctacggccacaatatgaaaaccggcacgatcttcggctgcctgaccgagtaccgcagggccgactactatcaggagcaccccttcattgagtttgacaccgtctacggggacgccaagtatgaggtgttcggtgcgttcaccatcgatgtcgtcaacgacacctcgtttatctacaaccagtacatcgacatggacgaggacacctacaaccgctatgtggaccaggtcatctcccgcagcgacgtggacagcggcatccgccctgcctacggtgagcaactgctgaccctctctacctgcgagtattcgtccgccaacgggcgctatgtcgtcgtagcgcgtcgggtcagtgactaa

SEQ ID NO: 241 - DNA, 1038 bp, unclassified Faecalibacterium
atgggcgaaaaaatctgcatttccgacctgacgctggacgcgctgacggcctacatcgtgggactgggtcagccaaaattccgcgccaagcagatttttaaatggctgcaccagaagcttgtgacggagttctcccagatgaccgaccagcccaaggcgctgttggcccagctggaggagcagtgcacgattgcagcccccgtcatccgccgccgccagcagtccagggacggtacggtcaagtatcttttgcagctggccgacggcaactgcatcgagaccgtgctcatgcgctacaaatacggcaatactgtctgtgtgtccacccaggttggttgcgcgatgggctgccggttctgcgcctccacccaggcgggccgtgtgcgcgacctgacggcaggggagatcgcggcggaaatttacaccgcacagaaggacaccggcgagcgcgtctcccacattgttttgatgggcatcggtgagccgctgcacaattttaataatgtgatggactttctggagatcatttcctgcccggagggcgtcaacatcggtatgcgcaacatcagcctgtcgacctgcggccttgtgcccaagatcgacgagctggcgaagcgccatctgcagctgacactgtctgtctcgctccatgcgccggacaataagacccgttccggcatgatgccggtcaacgatgcgttcccgctggagcagctgatcccggcctgccgccgctaccagaaggagacgggccgccgcatcagctttgagtattcgatggtgcgcggtgtcaatgacagcagtgagatggcgcagaagctcgccaacctcatcaagggcatgggcgcgcacgtcaacctgattcccatcaaccccgtggacggcagcccctattctgccaccgacgatgccaatgtgcaccgcttccagaaggagctggaggcactgggcgtcaacgccacggtgcgccgccgtctgggtaccgacatcagcgccgcctgcggccagctgcgccgcgaggacgcgcagggaaaatga

SEQ ID NO: 242 - DNA, 1752 bp, unclassified Faecalibacterium
atgcaagatctgcgcaaaatcttccgttatgcccgcccgtaccggcgcgatctgttcgcggcggtggggctgatctttattgaatgtatctttgaaatggtcatccccgtcctgatgtccaccctcgtggatgacggcgtgcccgcccataatatggccgtcatcttccggcagggcgggctgatgattttgtgcgcggtgctcgcgctcatcacggggctgctgtatgcgcggtacgcggcgcggttcgcaaacgggttcgcggcagagctgcgcatggcggagtatgccgccgtgcagaaattcgatttcgccaacctcgaccgcttctccgatgcgtccctcgtcacccgcatgaccaccgacgtcacggtcatgctcaacgccgtcaacgccggtctgcgtccgctggtgcgcagcccggtcatgctctgcatggggctggcgatggcctgcgtgctcagcccgcggctgacgattgtattcctcgtcacaacgccgatcctggccgccgtcctcgcctggatcgtcacaaaggtcggtccgctctatggccgccagcagagcgccgtggatcacctgaatgcccgcatccaagagtccctgaccgccatccgcgccatcaaggcgttcgtccgcggcgactacgagaacgcccagttcgacaccgtcaacacggaattgagcgatgcttcgacggaaaccttccgctatgccgtcctcaacctgcctgcgttccagaccgtcatgtatacggccatcgtctgcatcctttggttcggcggcaattatatcctcgtcggcacgatgtccgtcggccagctgacggcgtttttgagctatgttttgcaggtgctcaactcggtcatgatgttctccggcgtctttctgcagatgtcccgttcgctggccagcgcccgccgcatccgtgaggtcttgaccgagacgcccgaccttgcgaatgccgccgcgccggtggacaccatccccgacggccaaatcgactttgaccacgtcagcttcaaatacaacgccaaagcggagaaaaatgccctctccgacatcacgctccacattccggcaggtgcgacggtgggcatcatcggcggcacgggcgcggccaaaacgacgctcgtccagctcattccgcgcctgtacgacgccaccgagggcacggtccgggtcggcgggcgcgacgtccgcggctacgacgtgaacgccctgcgggacgccgtcggcatcgtgctgcaaaagaacctgctgttctccggcacgatccgcgacaacctgaaatggggcgatcccgacgcgacggacgacgacctctgggccgcctgccgcgccgcccgtgcggacgaatttttgtcccggatgcccgacggccttgacaccgacctgggccagggcgggtgcaacgtctcgggcgggcagaagcagcgcctctgcatcgcgcggacgctgctcaagcacccgaaggtgctgatttttgacgactccaccagcgccgtggacacggcgacggagtcgggcatccgccatgcgctggccggactgggcagcgtgaccaagctcatcattgcccagcgcatcacgtcggtgcagagcgccgacctcatcgtcattctggacgacgggcggctgcatgccgtgggcacgcatgacgagctgctggcaaaagatacgatctatcaggaaatttaccattcccagatgaaagggggcgacgcagatggcgaagccattcggcggtaa

SEQ ID NO: 243 - DNA, 1026 bp, unclassified Faecalibacterium
atgcagttttttgacggtctgccccaaggccccttcgcttgcgaggaggcctttttattttcttctacctttccactcttgacaaatccggcgttctgtcttatgattgatgaaaacgtaacacgacttttacaaaattgcaaatatagcaataagaggtacaagatggatacagaacgctggcagatcttattaaaggcaattgaccgcggcagcctgcgtgcggcggcggaggagatggggtttacggtctccggcatcagccgcagcgtggcaacgctggaaaaggagctgggctttgcgctgctgcaccgcgccaaaagcggcgtgcagcccaccgcggaatgccgccagctgctgccgtcggtgcgtgagctgctgtttgcgcaggagcggctggaacagaccgcagccaaggtgcgcggcgcagactgcggcaccattgtcatcggtacggcgtataactgctactatgagtgggtcacccggatgatggcggcgttccgcacacggcaccccggcgtggtcatcaagatcgtcaacggcaccagcagcgagctggccgagatgctgctggatcaccgcacggatttctgcctcatcagccaccgtgactcgctgccggtctggctgcccatccgccaggacgagctgatggtcctgctgcccaaaaaccacccgctggcggaccgtgagtccttcccggtggaaagcctgaagaccgagccgttcatcgacagctacccgggcatggagaccgacatcaccctgatttttgacaagctgaaggcccgccccgacgcgcgctattccacgatggacatcacggcgacctatgccatggtgtcggctggcttgggcatcagcgttaacaacgccatcaaccaccaggacggctatcccggcgtcgtggagcgcccgatgaatccccaccagatgatggagatcggtctcgcctgcggcgagaacctcgcccccgccgcccaggcgttcctggatttcgtgaaggagcggctgccggaataa

SEQ ID NO: 244 - DNA, 1215 bp, unclassified Faecalibacterium
atgaagcatgtaaaacacggcaaaaagctgatttcgcttctgctgagcgcggctgtcgccatgagcatgacgctttccaccgtcatgacgccgctggccgcctcctccagcgtcagcgacctgcgccagaagctgcaggaactgcagactgagcaggaaaaggtcaaccagcagctcaaggacgcgcagagcaataaggccgacgctgaggctctcaaaacgcagcttgagcagcagaaggcactgattttgagccagatcagcaacctgtccgagcagatcggttctttggatgaggaaatcgtcaacaagcaggacgagattgaccggaagcagcaggaggtcgaccagaagcaggccgaatacgaccagcgctgggcggactttaaagaccgtatgcgtgcgatgcagcgtctgaatgacggcggctccatcgcactgttgtccagtgccaccaacctgtaccagctgctgacctttgccaccacattggatcagatcgttaataaggacgaggacacctgccaacagcttgaaaatgagcacgccgagctggagcagcagcgcgccgagctggagcaggccaaggcggacctggaggccacgcaggccgatctggagacccaaaagaccgcgctggacggcaagacgaatgagcttgcccagaatatctcccagaccgacgccaacatttccgcagcggatgccgagatcgaggccaacaaggcggccctgatcgaagccaacaaggccgtggataaggccgctgccgagctggacgccgcgctgaacgccgccaaccaggcttacggcaatgcgtctatccagtgctcgctggactttggccgcccgctggccacctataagtacgtctcctgctacttcggcggcaacggccaccgcggcaccgattacgccgcaccgggcggcaccgaaatctacgccgtctccggcggtgtcgtcaccgctgcggcctaccactggagctggggctactacgtgcaggtctaccacggcaaggatgacaacggcaatacttattcgacgctgtacgcccacatgaacagcgcacccgttgtcagcgtggggcagactgtggaaaagggcaaggtccttggttatgtcggctccaccggcaactccacaggcaaccatctgcacctggaaatgaaggtcaacaacgtcctggtcaatgtcatgaactacctctcataa

SEQ ID NO: 245 - DNA, 2298 bp, unclassified Faecalibacterium
atgactccgcgtgaagcgttaaaacgatatttcggctacgactccttccgccccgggcaggaagagatcgtcagcgcccttctggccggacgggacgcgctggccatcatgcccaccggcgcgggcaagtcgctctgctatcaggtccctgccctgctgctgccggggctgacgctcgtcatctcgccgctgatctcgctgatgcaggaccaggtcaaggggctgaacgcagcgggcatccatgcggcgtttatcaactcgtcgctgaccgagacacagattgcccgcgcgctggacctggctgccgagggcagctacaagcttgtctacgtcgcgcccgaacgcctggaaagcccggtgttccgcagcttttccgcgggggcagacatctcgatggtcacggtggatgaggcgcactgcatcagccagtggggacaggatttccgtccgagctacttaaagatcctcgacttcatcgacagtctgccccgccgccccatcgtgtcggcgttcacggccacggccacgcgggaggtcaaggacgacattgtctgcacgctgcggctccacgacccgaaggtgcttgtgaccggctttgaccggcccaacctctactttcaggtcgagcgcacccgccgcaaggacgattttgtcatccaatatctacgcgaccaccccggcgaaagcggcatcatctactgcgccacccgcaagaatgtggacaaactgcaggagcttttgaccgaatacggctttgcggccacaaagtaccacgcgggcctgtccgccgaagcacgccgcaaaaatcagaatgacttcatctacgacaccgcgccggtcattgtggcgacgaacgcctttggcatgggcattgacaagtccaacgtgcggttcgtgctgcactacaacatgccccagagcatggagaattattaccaggaggcgggccgtgccgggcgtgacgggctgccgtcgcagtgcgtgctgcttttttcggcgcaggacgtcatcatcaacaaattcctgctggacaaaaaggattttgccgagatggacgacgaggaggccgaccttttgcgccagcgcgacctgcagcgcttgcagacgatggagcgctactgccggacgacggagtgcctgcgcaactacattctggcctatttcggcgagcatcccaccgcgccgtgcggcaactgcggcagctgcaacaacgattttgacgaggtcgatatgaccgacgccgccaagtggatgatcaactgcgtggccgagctgcgcgggcggtacggcaaagcgattttgttcggcactttacaaggcgcgaaccgtgcgcgtctgcgggagctgggagccgagcgcttcaagagctacggccggatgaaggacaccccgcgcgagacgctggaacgcctgctggcacagctgctggaggatggatatttggtgcagagcgacgaccagtacgccgtgctgcacatcggggatattgccccgctgaaggccggcgggcaggtgctggtcaagctgccgccgcagcgtgagccggagcaggcccgtgcaccgaagccgaagcgccgcagcccgatggacgcgctgacgagcgccggtctggagctgttcaaccagctgcgccagctgcggttcgacaccgcccagcgcgaggggttgccgccctacgtcgtgttcggtgacaagtcgctggtggatatgtgcctgcgcgcgccgcgccgcacggaggatatgctgggcatctacggcatgggtgagcgcaagtatgaaaagtacggtgccgcgttctttgcggtcattgacgcctaccgcgccaaccaccccgacgccgttttgagcctggacccgcccgcaccggagccggaaaagccgctgccgtccgagaagaagaaaaagccgacgaaggccgagcgccccgcgttttacctgacggcggaggatgcgcgcagcttcaactatcaggacagctataccggcgcggagctgaaggccgcgctgatcgaggccgccggtgacccggatgtgaaggcaccgaccatcaaggagatcgacgagtggctgctggcgcagcggctcatcggcatggagcgtctgccgacgaagggcttttactacgtaccgacccctgccggtgtggacgccggtctgcgcagcgaggacaaggtcagcgcccgcggcacgccgtattcagtgctgctgtttacgccggaggcgcagcggatggtggtggagcactttgtaaaaccagaggcttccccctcgggggaagctgtcaccgaaggtgactga

SEQ ID NO: 246 - DNA, 1407 bp, unclassified Faecalibacterium
atgaaacgactggtcatctactttcactatgacccggcaggctgcatcgatacggcctgccgcattgccgtacaggctgtgcagaaatacggcagggtcgtattcgtcaccaacggtacacttgccccggcggaccgcgtctgggtgcgccagtccggtgcgggccgcatcgaacgggaaaacgtcggtttcgacgtcggcgcatacagggaggctctgctgactctgggccgggagaagctggccgagtatgaggaaatcgtcctgatgaactacacgctggccgggccggtctgctcactggcggcgatgttcaccgcgatggacgcccgcccggagttggacttctgggggctgacccgccactacgccatgcagagccgccgctttggcggcgcagtgcccgagcatctgcaatcccattttattgcggtgcgcccgcggctgttcaacagtgacgatttctggagctactggcagaaaatggcactgccgaccagctacgagcagtctatcatccgccacgaaacgcggttcacgccgtattttgccgccagaggctatgcctgggatacctacgtgcagacggacgacctgaaaccggtttttgtaaaccccattatggcctgcccgcgggagctgctggcaaaccgcggctgcccgtttttcaaacggcgcagcctgttcacgccctatgcggatgaactgcgccgcacggacggcctcgccgcgcgggagctctgcgactatgtgacggcctatacggattttccgctggagctgctgctggtctcgctgttaaaaacacagccgctttcagcccttgcccaaaacctgcactggtgctatcctgtcggcgcaccgacaggggaaacgcccgacctgaacgagctgggcctgcggctgcttcattacgaacagcccgccgcggaccccgtgaccgactggtataaccggcaggcagccgccaacgcggacacactgctggcagaagctgctgctttgtttgaaaaaaatccgatgcttggcgtgttaagcccttctctgccgctgtggcagggctgcaccgccgcccgccgcgccgcctggatgcgggagaaggacgcactggcacaggaggtatccgtgcccgtcggcagtgacccgccgcccgcgcccaactgcggctgggtgcttgtgcgggagtctgccttcccggacggcatcccagcctgcacaagccagcgtgacgcctggaagctggccctgaccgcccagaaaaacggtgcctatgccgccgcctttgagccgctgaccgggtctgcggcgcgggcggatattttaaatgagtatgagaccgccgccgctcagcctgccgctgtagccaagcagctggggcggctcgtcaagcacagactgcaaaagtaa

SEQ ID NO: 247 - DNA, 1425 bp, unclassified Faecalibacterium
accatgttagtcgaaaccaaagcccgcgttggcgtgttcgccattgcgctgggcgcttacctgccgcagttccccacgctggtccccgagtttgagggccagtacgccgccttcaaaaagacgctgcccgacaccgtcgatgtcatcgacggcggcatcgtcaccaccaaggagcagtccatggccgcgggcgataagttccgcgccgccgacgttgaccttgtcattctgcagctgctgacctacgctacctcttacaatatgctgcccgccgtgcgcgacctcgacgtgcccgtcgtcctcgtcaacgtgcagaagaagaaggcccccgactacgccaacaccgacacccccacctggctgggcgagctgtacgcctgcggcgctgtcggcgagatggtcgctgatctggagcgcgccggcaagcgccacgccgtcatcaccggcgttgtcgagggcggtgaccccgccgtgcaggccgaaatcaacgactggtgcagggccgcgcaggtgcgccgccgcttccgtgatacgaaccttgcgcagatcggccgcccgtaccccggcatgatggatctgtacatcgatgagacgaacctgtacaaccgcatgtggctctacaccaagcagtttgactgggagaagatgtgggccatcgccgacaacatcaccgacgaggatgccatccgcgccaaggcgcaggacattctggacaccttcgatattgagggcggcggcacggtggagaaggtctgggatatggcccgctacgttgtcgcatttgagcagtgggtcagggacgagaagatcgccttcgtcgccagccactacgacggctttgccaagggcgtggccggtaagctggactcgatgctgatccctgcgttctcgatgctcatcaagcagggcacggcctgcgccgtcgagggcgacatcaaggtcgcgatggccatgtccatcctcaagaccattgcgggctgcggccagctgagcgagatgtactccatcgacttcaatgaggacatctgcatcatcggccactccggctccggcgacgccgacatctccacggccagaaagccgaccatgaagatcgtgcccgttttccacggcaagaccggcggcggctacctgacccagttctacccgccggtgggcgatgtgacctatctggccatcacgcaggacaaggacggccacttcaagtttgttgtggccgagggcgtcaacgagcccggcccgatcttcaccttcggtgacacgaacatgcgcacccgcttcagctgcggtgcccgcgagttcgtcaaccgctggagcgaggccggccccacccaccacatggccgccgccaccggccaccacatcgacacgattttgaaggttgccgagatcttcaatgtgccggtggatgtgatcacgcgctga

SEQ ID NO: 248 - DNA, 1338 bp, unclassified Faecalibacterium
atgaacgaacgcgagcgcctgagcagccgcttgggctttatcatgctgtcggcggggtgcgccatcggctgcggcaacgtctggaaattcccctggatgtgcggccagaacggcggcggcagctttatgctgctctacatcctctgcctgctggtgctgggcctgcccgtcatggtcatggagtttgccgtgggccgcgccgcccaggccagccccgttaccatgtaccagcgcctggaaaagcccggccataagtggggtgtattcggcgtcgtcagtctcatcggcaacattgccatcatggcgttctacacggtggtcacgggctggatcttgtactattttgtcaagttcctgaccgggcagaacgcggatttcggctttgcgcagatgatcgccgaccccgggctgaacgtgacctatctgcttgtggtccttatagcggcgtttgtgctgctgagctttaatttgcagggagggctggagcgcgtgaccaaatacatgatgagcgcgctgctggtgctgatgctggtgctggccgtgcacagcctgacgtttgccggtgcggcggaggggctgcggttctaccttgtgccggatttctcggccattgacggcggggtcatcgtggcggccatgaaccaggcgtttttctcgctgtccgtcggcatgggcggcatggcgatcttcggcagctacatcggcaaggatcacgcgctcatgggcgagtcgctgcgggtcatttttctcgacacgttcgtggccgtgctggcgggcatcgtcatcttcccggcgtgcttcacctacgggctggaggtcacggcaggtcccagtctgctgtttgacacgatggcgggggtgttcggcaatatggccgggggccgctggtggggcgcgctgttcttcctgttcatggtgtttgcggcgctgtccaccgtgctgggcgtctgcgagaatatccttgccatggtgcgtgagctgaccgggtggagccgcccgaagggctgcgtggtctgcggcgttggcatctttctgctggcgctgacgacggcgctgggctacagcgtgctgcacttccagccgtttgcgccgggcagcgcgtggctggacttctgggacttcatcgtcagcaacaatgtgctgccgctggggtcgctggtgctggcgctgttctgctgcaaccgctttggctggggctgggacaattttgtggccgaagccaacaccggcaggggcctgaaggtccgcccctggatgaagccgatttttaagtattttgtgccgggtgcgattttgtttatttatatttacggcatggttacgtttcactggcggtaa

SEQ ID NO: 249 - DNA, 1803 bp, unclassified Faecalibacterium
atgcccgaaattctaaaagaacgcagtaaactggacccgcaatttcagtgggacctgaccccgatgttcgagagcgacgccgcgtgggagaccgcgctggacagcctcgacgcagacattgaaagcctggcagccttcgccggtaagctgaccgatgccgtcacgattggcgcatacctcgacgcttccaccgaggtgggccgcaaggtcgagcgcctctactgctacgcctcccagcgccatgacgaggacacccgcgacggcaaggcccagagcatgtacgcccgcatcggcagcaagtacgtcaagatggctgccgcgctgtcctttgcccagccggagatcctgtccctgcctgaggagacgctgaccgccatcgtcaacgatcccgccgtcgcggactacaaattcaacctagaggatctgctgcgcggcaagccccacaccctgaccaaggccgaggaaaagctgctggccagcttcggcgaggtcatgtctgcgccgtccgagatctaccacaatctggaggacgccgacctgctgtttgatgccgtcaaggacggcagcggcgagaccgtcgaggtcaccggctccaactttgtgccgctggagatgagcacggaccgcaccctgcgagagaacgccttccacagctactacaagagctaccgtgagcacatcaacaccttcgccgcgtcctacgccggtgccatcaaggctgccaccgccgaggccgccgcccgcaattacccgtcctcccgcgcgatggccatggcgggggagaatgtgcccgccgaggtctacgacaacctcgtcgccacggtccgcaagcatattcccgccatgcaccgctatgtccgcctgcgcaaaaagatgctgggcgttgacgcgctgcacttctatgacgtctacgctccgctggtcggcgatctgaaaaaatcctacagctacgagaccgcacaggagatggtcctgaaggccgttgcgcccttgggcgaggactaccaggcaaccgtccgcaaggcctatgccgagcgctggatcgacgtttaccccaaccgcggcaagcgcggcggcgcgtactccggcggctgctatgactccaaaccctatatcctgctgaatttcagcggcacgctggacagtgtctcgacgctggcacatgagatgggccacacgatccacagctggcgctcccgccagcatcagccgccgcagtacgcggactacacgctgtttgtcgccgaggtcgcgtccaccgtcaacgagaatctgctcatcgagcagctgcttgccaacgagaacgatccccagacccgcctctatctgctgaaccagtatctggaaaacttcaagggcacagtctaccgccagacgatgtttgccgagttcgagcgcgaggcccacgccatggtcgagcgcggcgaagccctgaacgccgccgccctgaacgccctgtacaagcgccttgtcaccgactatttcggcaacgatatggtcatcgacgacgagatccagtatgagtgggcgcgcatcccgcacttctaccgcccgttctacgtttacaagtatgccaccggctactccaccgctgtcgccctgtccgagggcatcctgaaagagggcgagcccgccgtcaagcgctacaaggagttcctctccatgggcggcagtgcttacccgctggacgagctgcgccacgccggtgttgacctggccaccccggcccccgtggacgccgccctcgagaagttcgagcacatcctcgacgatgccgaggccacgctggcaaagctgcagtaa

SEQ ID NO: 250 - DNA, 1113 bp, unclassified Faecalibacterium
atgaaacgaaccatcctgcaaaaaacggcagccaccgcactgtttatgctgctcacggcggcactgctggcggctgcggattttctgctggtggatgatgtacactcctactcccgcgtcatgctgcaggagctgtatgccgacgccggaaacatagatacgctgtttttgggctcgtcccactgctatcgcagcgttgaccccgcgcaggtggacgcggcgctggacacccacagcttcaacgccgggtcgtcccagcaactgccggacggctcctattatatgctgaaagaagctgctgcgcagaacccgctgaaaacggtctatctcgaaatgttctacaccggctacaatgagagcgcgtccgccaacatcccgctggcctgctatctgctggccgaccacatggactggcgctcacccaaccgatacgcctacctgtcggagatgggcggtctggcggcctatgccgacctgctgctgcccgcgcgccatggcattgcgtcgccgtcctcgatgcccgccctctggaaggccaagctgactgacggctacacgccggacagctacggctatgtgacctacccggacagcggtgaggcgtaccggggccgcggctttgtctataccaccggcatcctgcaggacggctttgccacgctgctgaacgtagatgccgacacgccgctgtcggattttggctgggaatacctcaacaaaatcaccgatttctgcgcggaaaacggcatccggcttgtgctgttcacggccccgctgcccagcggctacctgtacaacaccgaaaactatcagtcctacgtcgatgcgctgcggaacttctgcgctgcgcatgacgggctggaatactgggatttctcgctgtacaagctgcaaagcgagatcaatctgaagatcgaggacttctccgacgcgcaccacctgaacggcgcgggggcggaaaagttcaccgctattctctgcaagacgatccaacgccgtgcggcgggggagaacgttgacgatcttttctatcagacggtggaggaaaagctgaccctcaccccggacgactccgtcctgatggcctattatgcaaagctgcaagacgaataa

SEQ ID NO: 251 - DNA, 552 bp, Firmicutes bacterium CAG:176
atgcccggtttcaaacaggagcggcctgtccgcccggaaaggacagctatggaacaggaatatttcatgcagcaggccctcgctctggcacaggaggccgctgtccacggcgaggtgccggtgggctgcgtcatcgtccgcaatggcgagatcgtgggccgcggccgcaaccagcgggaggaaaagcaggccgccgtctctcacgcggagatggaggccatcgcccaggccaatgcggcgctgggcagttggcggctggacgagtgcgacctgtatgtgacgctggagccctgccccatgtgcgctggggccattcttaacgcccgcatccggcgggtgtactacggcgcccgggatgaggtgatgggcgcctgcggcggcgtgctgaatttgtttatggagggctttccccgtccgccacagctggtgggcaatgtgtgcggcgacgaatgccgcgacgttttgcagacctttttccgggaagttcgggagaaaaacgccgagaatacgaatcgttcggcagacattgttgaagatttcacagaattttaa

SEQ ID NO: 252 - DNA, 864 bp, Firmicutes bacterium CAG:176
atgtggatcgcgaaggattggaaggattatgagctgctggactgcggtggcggcgaaaagctggagcgctgggaccggcaggtattggtgcgccccgatccccaggcgatctgggagacggacaagaccacgcggctgtggcgcggcgcaacaggacgctattcccggtcttctaccggcggcggtcattgggataaaggcaagctgccggaaagctggcaggtgcattacaaagacctgacatttcaggtgaagcccatgaacttcaagcatacgggattgttcccggagcaggcggtaaattgggatttcgccatggacaagatacggcatgccggaaggcctatccgggtgctgaacctgtttgcctacaccggtggggccacggtggcctgtgcgaaggccggggcttctgtgtgccatgtggacgcggccaagggtatggtggcctggggtaaggagaacgcccgtctatccggcctgggcgaggcgcccatccgctggatcgtggacgactgcgccaagttcgtggagcgtgagatacgccggggcaagacctatgacgccattatcatggatccgccctcctacgggcgcgggcccggcggcgaggtgtggaagctggaggacaatctgtatccctttgcggagctgtgcagccgggtgctgtcggacaagccgctgttcgtggtattgaacagctataccacggggttggcgccgtcggtgttggggtacatattgcagctgctggtagggcggaaattcggcggcacggtcacatgggacgagctgggcctgccctgcacggacagcggcatggcgctgccctgcggcgccacgggaagatggttttccgagtaa

SEQ ID NO: 253 - DNA, 711 bp, Firmicutes bacterium CAG:176
atggtgttgctgcttcgcaaacgacatctgctgacagttgtggccgcggcagcgttgtgcggtgcactgctgctgaccgcgcgtcccggggcggcggccgttttgggcagcgcttcgccacagcgggcggtcatcttggatgccggccacggcggcgcggacggcggggcggtgtcggacagcggcgtggccgaaagcggcctgaatttggccattaccctgcgcctggcggatgtgctgaccttctgcggctatgaagtgctgctgacccggacaggggaggcagccctatgtgacgatcctgccgctacgctgcggcagcagaaggtatccgacacgaaaaagcgtgtggagatcatcaacagatgcgctgacgctcggctcatcagtatccaccagaacagcctgccgggtcatcccggtgtcagcggtgcgcaggtcttccataacggacaggacggtgcagaagcgctggcgctgtgcattcagaacgatctgaatatggctgttaatacccgggaaaaagcagcaaagcgtatcgacgacagcatttacatcatgaagcatgcggactgccccgccgtgctggtggaatgcggatttctgtcaaacccggaggagacggtgctgcttcagcagccagactatcaactgcacatggccgctgccatcgcagcgggtttttgccaatactgtacaaatgagggatga

SEQ ID NO: 254 - DNA, 969 bp, Firmicutes bacterium CAG:176
atgcacatcggaaacgtagagatcaactcccagctgtatctggcgcctatggccggcgtcaccgacatggccttccgccagatatgccgcgagctgggcgccggtatgagctgcacggaactggtcagcgccaaggctctgtgctatcaggacaagaaaagccggggccttttgaagctggcccccaacgaaaagcccgccgctgcccaaatcttcggcagcgatatcccctgcatggctgaagccgccgtcatcgccgccgagatatccggcgcagatattatcgacatcaacatgggctgcccggtgggcaaggtagtggccaacggcgacggctctgccctgatgaaggatccggagaaggctgcccgactggccgaggcggtggtcaaggccagccccgtacccgtgacggtgaaaatgcgccggggctgggacaagggcaacatcaacgcggtggagctggcgaaaatgctggagcaggcaggcgtcagtgccattgccgtccacggccgcacccgcacccaaatgtacagcggtcaggctgactggaccactatccgccaggtgaaggaagcggtatccgtgccggtcatcgctaacggcgacatcttttcggcagaggacgccgtccgcattttacagttcaccggtgcggacatggccatgatcggccggggctgtttcggcaacccgtggctgtttcagcaggcccaggcagcgctggagggccgtcccattcctcccctgccgccactggcggagcgctgggacaccgccgtgcgccagatcgaactggctgtggaggacaagggcgagcacatcgccctgttggaggcccgcaagcagctgtgctggtatctcaagggcgtgagccacgccaactactacaaagaacagatcgtccgcctgaccacactggaggagctgtaccgggtggcggcgggtgtcaggagggatctgcgatga

SEQ ID NO: 255 - DNA, 609 bp, Firmicutes bacterium CAG:176
atgggtgcgaaaaatacgacgcgggaggcgcgggatatggaattgcagtggtttgacatccgggagttgacggaggacgcggcccagaccgtgataggcatgatggatgagacgcggcggcggcgtgtggccgacatcgccggtgaggacgaccggaagcgcaccatcgccggagagctgctggcgcggcggatgcttgcgcagacgatgggctgcgcggagaaggacgtaccgcttcagtgggacgagctgggcaagcccagcgtggaaaaggatggcgtgtatgtgtccgtgagccactccggcccgtgggcggtatgcgtaacggcggacgtgccggtaggcgtggacgtggaggtggtacgctcggcccaggagaagttcatgcgccgggtatgcagcgagcaggagatggcgtacatacggtccggggacgacggcgactgccagcggttctgggagatatggacggccaaggaggcgctgttcaagctgacgggcaagggtccgctgctggcgctgagccgcttcagcctgccggcaggcgtaacgctggactatacggcacaaaagggctgcgccctcaccatcgcggcgcagattttgtga

SEQ ID NO: 256 - DNA, 846 bp, Firmicutes bacterium CAG:176
atggtccagctgccccaggaaaacagcatatttgcccgcaccgtgcgccgcgccgccggggaggaccgtctcagccacgcggtcatcctgacgggccggggtgacctgaccgccgctgcccggtttctcgccgccgcccacgtctgcgaggaggcggacaggccctgcctgcgctgccgccactgccgcaaggtactggagggcatccacccggacgtgatccccgtgctggatacagagcacaaggagctgacggtggaggcagtccgcgccctgcgtaaggatgtgtacatccgccccaacgaggcccggcgcaaggtatacgtcatctctgactgccgccagctgaaccagcgggatcaggatgtcctgctgaaggtggtggaggagggaccgccctatgccgctttcatcttctgcgccgacgctcccgccgccctgctggagaccgtccgttcccgctgtgctctgctgaaatacgacggggaagacgcgcccctcagcgacggtaccgcggagctgtgccgtgcgtttgcctccgggcgtctgctgccggtgaccacggcgctgctctcccgcgagcagtccctgaagcgcgagacgctgcaggcccagctggaggagctgtggcgcgccgcggccgaagccctgctggtgcagcagggcaaggcgcggccagatccctcctgtgcggaggcagcccttctgctggcggacaggctgacggcgcggcagctgctgggactgtgcgcggccagtcagcgctttgccgaacaatgtgaccaaaatgcgggcgtgggccagatattgggcgccctcgccgtgaaatgggaggaacttttatga

SEQ ID NO: 257 - DNA, 525 bp, Firmicutes bacterium CAG:176
tcgtggggtgagcacatgaagtggacagcaaaaaacatcgccctctgcgccgtgctggcagcgctggcgctggggctcagtaccctggaggggctgttccccatctccctgctggtgcccctgcccggcgtgaagctgggccttgccaacatcgtcacggtgttcgccctgtatcagttgggtgccggcgcggcgctggccattctgctgacccgctgtctgctgggcggactgtttgccggaaacctgtcggccatgctgttctccgtgctgggcggactgaccgccatgctggtgatgatattcctgcggcgtctgccgaagctcagcgtctacggcgtgtccatcggcggcgcggcagcgcacaacatcggccagatggccgcggcggtcatcacccttggcagcaccatggtcctgggctatctgcccttcctgctggccgtgtcccttttcaccggtgcgctgaccggcttcatcactgcgcttctgctgcgtgccacgcggcatatccgatttcactga

SEQ ID NO: 258 - DNA, 351 bp, Firmicutes bacterium CAG:176
aaggcccgggacggtgcgtttgatctggacggcatatggcagaaaacggacggggaggtgatccgcgaactgagcagtctgaagggtgttggcatctggacagcggagatgatcctgctgttctgtatgcagcggcccgatgtgtttagttacgacgatctggctattcagcgcggactgcggatgctctatcaccaccgcagcattgaccgtaagcggtttgagatataccgccgtcggtttagcccgtatggcagcgtggcgagcctgtatctgtgggcagtggccggcggagcgattccggagctgaaagatcataatccgaaaaagagtgtggagggaaagagatga

SEQ ID NO: 259 - DNA, 729 bp, Firmicutes bacterium CAG:176
atgaatatgtttttgaccctggcttacctattcttcattggctccaccctgggatgggtggctgagctgctgtaccgccggtttctctccggcgcaaacccggagcgcaagtggatcaatcccggcttctgcgtgggtccctatgtgcccctgtacggttcgggcctctgtattctttatctgttggcctccatcggtgaaaaaaacggtgtggatacggtgggggagaagctgctgctctttgcgggcatggccctgagcatgacggctatcgaatatatcgccggtatcgtcagcctgaagttcatgcacatccgcctttgggattacagcaagcagtggggcaatatccagggtctgatctgcccgggcttttccgtcctttgggcggcggtcagcgccgtgtactacttctgcgtccatccttatatcctggacgcgctggattggctgtcccgcaacctggccttctcatttgtcatcggctttttctttggcgtgtttaccatcgatctggtctattccgccaagctggtgtcccgcatccgcaagttcgccgacgagcatgacgtggtcatcaaggtggagaacctgaaagcccacatccgccagcgtcaggaggagcgccgcgagaagtacagcttcctctttgcctaccgctcccgcagcgagctgctggagcatctgcgcgaggcgcaggagacttgggaggaaagacgccgcaagtga

SEQ ID NO: 260 - DNA, 363 bp, Firmicutes bacterium CAG:176
agccgcccccgtttatccaataaaaaggagtgtatcgctatgatgaagaacctcaatgtggccaccgtgctgaccctgcgggatcaggtggcctatcagccggggcaggtggtcagcaagacgctggcccagaacgacgccgtcagtgtgacgctgtttgccttcgacaaggacgaggagatcagcgcccacgagtccggcggcgacgcgctggtgacgtgcctggacggcgtgggccgcgtgaccgtggacggcgtaccccatgtgctgcacaccggcgagtccatcctcatgccggcgcggcatccgcacgcggtgtatggacaggagcaattcaaaatgttgctggtggtcgtattctga

SEQ ID NO: 261 - DNA, 501 bp, Firmicutes bacterium CAG:176
atgtctctttctcctttatgtaaattttttgtcgacgtgagggggtgggcggggatgcggcaacatccccgccccacttatggaaaagcacgcggccaatggccgcctcagcttgacaaaggggactcgtctgcacagtttcacggtcagatggaaagcgcacggcgcctcagcttgacagtcgagttttccgcaccgcttcgctgcatacggcagcgctacagcctgacaaggagagtatttttcatgcagggcatgaaaaacaggacagagtgcactctgtcccgcgaaaatgaaacgctgcccggcgcaaagccggacagcgaacgcaatagatacgacccctgcaccacggaaagacgccgccgcccccgccgcccgcccaaaagggccggccgcgaaaaaggcggcgcaaaaaacaccgacctcccgttcaggaggtcagcgtggtacatctacatggtggtacaagattcccgcacacggagagcgcgcccgctg

SEQ ID NO: 262 - DNA, 684 bp, Firmicutes bacterium CAG:176
atggcacggtatgcgccggacccggcgcagcgggtgacggtgtttctgggcgaggccgggtgcggcaaatctgagctggcggtgcagtgggcgctgacggcggcggagcgtggacgggatgtgcatttcttcgatctggaccagacaaagccactgctgcggtcaagggacgcggcggcccttttggagggcgcgggggtgacggtgcacttcgagcagcagtgtgccgatgcgcccacgcaggtgggcggactggtgccgctgctgctggacaagagcaagagcgtcattctggacgtgggcggcaacgatacgggtgcgcggctcatcggcggatacgcacacctgctgaagagtgcggatgcatggttcgtggtaaacccgtaccggccctggtcggggacggtggcgcacatcgacgggaccctgagcgccgtgctgaaggcggcgcggctgggcctgccgcgttttttgctgaaccccacgctgggcatcggcaccacggcggaggaattcttagtgggtgtggagcaggggctccggctgctgacgccctatgtaaaggtggaggcggcggcggtgtcggagacgctgctgccggaggtcgagggccggacggagctgccgctgctgcccctcacaccgcgaatgaccgtcccggagacgggacttgatgaaggataa

SEQ ID NO: 263 - DNA, 360 bp, Firmicutes bacterium CAG:176
atgcttccacttgcgttttctccagctttcgggtatactatagatataaagacaaaggaggactctcccatgagcgaggaattcggccccaacttcatcaccctgaccgacgaggacggcaacgacattgaactggaatacgtggacgcgctggaagtggacggccagacctacatggcgttcttccccgtggtggaggatgatgccgacgaggaagccgccgaggagtacggcctggtgatcctgaagtccgttatggaaaacggcgaggagctgctgagcaccctggacagcgacgaggagctggataaagtctacgacctgttcatggagcagatattggccgacgaggacgagtga

SEQ ID NO: 264 - DNA, 873 bp, Firmicutes bacterium CAG:176
atgagtggtaacaaaaaattcccccgcacccacaccggccggctggccgccgatatggtgctgcggtactatacccacgacgtagcccgggacagcgcggcgctgacgtattatctgctgttcgccatcttccccctgctgatcttcatcagcaccctgctgggtctgctggagctggacgtagcgtatatcacctccgtactggagccgctgctgccggcagatgtggtggatgtggtgcgctcatatctggagtacgtctccgccaaccagagccgtcagctgctgtggttcagtctcatcttctccatctggttccccatgcgggcctccgggtgcctgatgcactcgctccgcaaggcctttggccgcagcgcgccggagagcttgtggcgcagccagctgcggatcctgctgttcaccgtatggctgatcgtcgttatcgccgtgacgctggtgctggtggtggtgggacggtccgtgctggagtttgtcggacggttcatcaccatcaccgactcgttcatcaccgcgtggagttccctgcgcttcgtgctgctggcggtggtcatggctatcacgctggtgatcctgtatatgctctcccagggccagcgccggccgctgcgggaggtactgcccggcgtgggcggttcactggcggcgtggatggtgctgagcatggcgttttcgtactacgtagagcacctgggccgctactcggtgctgtacggctccatcgccacggtgatcgtggtgctgctgtggctgtatatgtcgggacagatactgatactgggcgcggagtttgccgccgccctgctggaaaagaggcagaccgccgccccctcgggcggagaggaggacgcatga

SEQ ID NO: 265 - DNA, 1062 bp, Firmicutes bacterium CAG:176
atggaatttttcaaaaaacgcggcgtggcactggtggtgctgatgctggccattgccggcgcggtgttcatcggccagagccgcaaggacggctttatcgccaagaagcccacggagctgctggacgtgcagtaccaggactggatctgtgacgaggccggtctgctgaacggacagacggagcagctgatccgggactacaacgacagctggaacagcaagtattacgccattacggcggtggccagcatcgaccatctgaccggctgggacgcggaggattacgccgccaacctgggcgagaagtgggggctgggacgcaacgacatgatactgctgctggtgaaggacggcgactggcaggtctactgcggcgacaatgtgggctacaccatgaccgacacccagcaaaatcagctgcggcaggccattgaaaccacctattacagcggcgacttcgacagtgccgtgacagccttcttccggcaggcggacgtgttctacgcccaggcgaagctggacggcggcgacagcaatgacagcggctggtacgccccggcggcaccggcggccagcagcggcggcacgtccatcggcagcgtggtggtgctgatcatcggtatcttcttggtgtggatggtgctggatgctatgcggtacagccgctatcgccggcggtatatcgtgggcgcgccggtgaatgtggtacgcccggtgtactaccccattttctggggcagacggtacgcgccgccccggcctcccagagcaccccggcccccacgtccgccccacggcggaggaccgcgaccgccctacagcggtggtccccggcctcccatgggcggcggtccgagacccggcgcaccgcgaccgccccggcccaatagccggcccggcggcggtccgagacccagtgcgccccggcccagccggcccagtcgtcccagcggcggcagcgggttcagcggtggcggcttcggcggcagttcccgcggcggaggaagctcccgaggcggcggctttggcggcggcggtttcggcggcggcaagcgtcggtaa

SEQ ID NO: 266 - DNA, 1032 bp, Firmicutes bacterium CAG:176
atgaccgacatcaaatccatgaccgagcgtcagctggctgacttttttaagaatatgggacagccggctttccgtgccaagcaggtattcacctggctgcaccgtggcgtgcgctcctttgacgagatgaccgacttgtccaagcctctgcgtgcccagctggccgagacgtgcttcatcacagcgccgaccgtggcccggaagcagacctcaaagctggacgggaccgttaaatatttgtgggagctggccgacggcaactgcatcgagacagtcctcatgcagtaccaccacggcaacaccgtgtgtatctcctctcaggtgggctgccgcatgggctgcgccttctgcgccagcaccatcgccggcaagatccgggacctgcggccctctgagctgctggaccaggtgctgtttacccagctggacagcggcctgcctgtctccaacatcgtgctcatgggtatcggcgagccgctggacaacatggacaatgtgctgcgctttctggagctggtcaacagcccccacgggatgaacatcggtatgcggcatatcagcctgtccacctgcggcgtagtgccggggatcgacgcgctggcggatcggcagcttcaattaacgctgtctgtctcccttcacgcgccggacagcgagacccgcagccgcattatgccggtgaaccgggcgtatgatgtagagacgctgtttgccgcctgccacagatacttccaaaagaccgggcggcgcatcagctttgagtatgccatgatcgacggcgtcaacgaccacgattggcaggcggagctgatcgcgaaaaagctgaagggtatgccgggccacgtgaacctgatacccctgaacgacgtggtggagagcccgtataagcccagcagacgcatcggcgctttccagcaaaagctggagagtttgggcgttaccgctacggtccgcagaagcctgggcggcgatatcgacgcctcctgcggccagctgcggcggaaggaaatgcaggaacgcggccaactgtga

SEQ ID NO: 267 - DNA, 834 bp, Firmicutes bacterium CAG:176
atgacctatctgaaagcgatcctgttgggactggtgcagggcatagcggaattcctgcccatctccagctccggccatctggccattgcccgcaatctgctgaatatggagggagcggggagcattccggagttcttcgacgtgctgctccacctgggcacgctcattgctgtgttcgccgcctattggagcgacatccgtgacatggtggtggagttcttccggggcatcggcgacctggcgcaccgcagcacccccacaccggtgccgcccgcccgccggctcatcctgctgatcatcgtcggtacgctgccgctgtttgcggtgctgcccatccgcaagacagtgcagggcctgggcgacaatatgtatttcgtgggcgcggcgctgatcttcaccggctttctgctgttcctgtgcgaccgggtgcgccggggccgcaagaccgagcgcagcgccacctggctggacgctctgctggtgggtgtggggcaggcggtggccacgctgcccggcgtctcccgttccggcatgaccatcaccgccgggtgcttcgtgggctatgagcgtcgcttcgccgtgcgcttttccttcctgctgagcatccccgccgtgctgggcgccaacatcctgtccatcaaggacgcggtgcaggccggcatcgtcggcgcggaggtgcccatgtacctggtaggcgtggccgtggccgccgtgacgggttatctgtgcatccggcttcttaagtatatcgcggacaagggccgtttcggtgccttcgcctactactgctgggcggcgggcgtgctgacccttgttctgcagggcatcaagtga

SEQ ID NO: 268 - DNA, 570 bp, Firmicutes bacterium CAG:176
tgggcggcgatcgggagcgcatccggacgctgtctgcccaccacgcttttgatatgctgcggcgttatcttaccaatctaccgacagaaggagaataaaaccatggcaaagaacagctacaaggccaacgtgaaccagtacgccaaccaggaggaggccatccgcaaggccaagggcaaccccaataagaatatccattccaagaagaagaacagcaactacggcgggtacaccaccggcgcgtacatggcccagaaggtggccgagaaggtgaaccagcaggagaaggtgaagctgcccacctggctgaatgtgacgctgatcgcggagtttgccgtggtgctggtgatcctgatcctgcgcctgacagccttcaaggacagcgcggtaatgacccacctgtcctccctgacgctgggcatcacctgcggcacgctgttctatatccgcaagtacaagcacacgaagaaaaccagcgccatgtacagcatcatcaccattctgctggtggtcatgtgcctgctgtacaccaccttcggcattctgggactgctgggctttttgggctga

SEQ ID NO: 269 - DNA, 447 bp, Firmicutes bacterium CAG:176
caaagggacggttttatgaacttcttgcaacgtattggcaacgcgctgtcgcgcttcatgtatgggcgcaacggtgtggaccggctgacgctgaccatggtctggacggctctggtactggatatcatcaacatttttctgcgggagaaggtgccgctggcatacagcatcatcggcaccgtggccgggatcatcaccctgctggcactgttccggatgttttcccgcaatctggagaagcgccgggcggagaacgcgaagttcatggagaaggtctggtggcccatcagccgacgtatgaccgggaaaaggcagcagcggatggataaagagcactgctactttacctgcccgggctgcggcgcggtgtgccgggtgccaaaagggaaagggcgcatcgtcatcacctgcccccgctgcggcaatgagatacacggaaaatcataa

SEQ ID NO: 270 - DNA, 624 bp, Firmicutes bacterium CAG:176
atgagcagaatcattaccatcagccgtgagttcggttccggcggccgtgagctgggcaagcgtctggccaaggccctgggcattccgtgctacgaccatgagatcatcgagatgattgccaaggaaaacggcttcaacgaggactatgtggccaacgtgggcgaaaagagcatcgaagccgcctatccgctgaccatcgggcaccgctttggtatgcagcccttccagatcatggagcagcccatccgcgtggcagtggcccagcgccagatcatcgagaacttcgccaagcaaggcgactgcgtcatcgtgggccgggccgccgatgttatcctcaaggactacgacccgctgaacatctttgtctatgcggataaggactccaagatcgagcgctgccagcgccgtgccccgcagggtgagcatctgacgccccgggagatcgagtcccatatgaagcagatcgaccgcaaccgtgcccagcaccaccagatgtacagcgacagcaagtggggcgacaagggctcctacgacctgtgcatcaacaccaccaagcgctttgtcaaggatatcgttccgtccatcgccaagttctgcgaggactggttcaattcccacggttaa

SEQ ID NO: 271 - DNA, 336 bp, Firmicutes bacterium CAG:176
atggataagggggatgtgagccgcacattgtgcggcttggggttgttgccgagcagcgtctgctatttttatatggcagaggcgcctcggctgtcgctgcgggagccggacaggcttctgctggtcacaaagcatgtgtatccggacgtggcgcgctgctttgacacaaactggaagtgcgtggagcgcggcctgcgccgcgccgcaaacgttgcctggaacacggcgccggagaagctgtcagagctcgcacatcgacacttgacggagaagccttctgtttcagagctgttgtctctgttgacgatctaccttcgcgcggaagaggagaactga

SEQ ID NO: 272 - DNA, 603 bp, Firmicutes bacterium CAG:176
gtgagaaataagttttacgcggcggcgtggcgggtgctgcgcccgctggtgctgttttttctgccggtggacctgcggggaacggagcatctggagggcggagaaccggtgctgctgtgtgccaaccactccagcgcctgggaccccatcctattcgtgctgtccatgccccagcggttcaacgtgcggatcatggctaagaagcagttgttctccatccccatcgtgggtggattcctgcgggcgatcggtgtgtttccggtggatcggggcaacagtgacattggggcggtgaagaccgccatacagagcctgcgggacgggtggaacctgttcctgtttccggagggaacacgggtgaagacaccgggacaggcggatgtcaagtccggcgcgggcatgatggctatccgtgccggcgtgaagctggcgccggtatatatcggcacgaagaagcgcatattccgcaagacgcccatcataatcggcgagcccttcgagccggagtacaccggccgcaagggtacggcggaggaatatactgccaacgcccatgaggtcatgcggcaggcctatgccctgggagggatcgaatgcaggtga

SEQ ID NO: 273 - DNA, 981 bp, Firmicutes bacterium CAG:176
atgcgcttgtttttttttgccatccgtggtatgatggtagctatgaaaaatcaaggaggaaagactatgcacgcagcgctggtcatcatggcggcggggatcggttcccgctacggcggcagcaagcagaccgacggcgtggggccccacggagagatactgatggagtacggtgtgtacgacgcggtgcgggcgggctttgacaaggtcgtgttcatcatcaagccggatatgcgggagctgatggagcgcctgtgcggcaatatggcgtcccggctgcacacggcggacgggcggcccgtggaggtccgttacgcctatcaggacgacacgacactgccggcgtggtatacaaagccggcggggcggacaaagcccttcggcacggcccacgcggtgctgtgtacccgcgatatcgtacacgagcccttctgcgtcatcaacgccgacgatttctacggcgcggacgcttaccgcaccatatatgcggagctgcagcgtctgccggagacgggcgcggccaccatggtgggctatctgctgaagaacaccgtcactgcccacggcaccgtgtcccggggtgtgtgccatgtgaaggacgggtatctcagcgacatccgcgagacgctgaagatcgccctgctgcaggacggcgtcatccgggacgaggataccggagcggtgctggacggcgacacggtggtgtccatgaacttctggggctttgccccctccgtcttcgacgcgttggagacgtatttccacgacttcctccgcagcgaggcggggcagtcggtgaaggccgagtgcctgctgcccaccatggtgggcgacctgctggcggcgggagagctgcgtgtcagcgtgctgaagtcggcggaccgctggttcggcatgacgtatcatgaggaccgcgcccgggtggcgcaggcgctcagcaaactgcacgagacgggggcataccccgaggaattgaggtaa

SEQ ID NO: 274 - DNA, 513 bp, Firmicutes bacterium CAG:176
gcgagccgctgtgaacggctccactaccgacaaaaggaggaaattctcttgtatacagagaaaacggcggcagcgcgggcggaaacacagcccgcctgcggcgaaggtaccggccagcttccggcctgcggtgcgctggctttcccctatgtggccatgcagggtacagaccccgtgcgctacgacgaccaggaggccctgcggcagggcacactctttcccggccttgatcttcccttccacaaggagctgcggtcccgctttccacaggtagacggtcccctgctggagctgatggcgctggattttgctatcgatgagctgggtctttacctgaccacacacgcagatgaccagcaggctttggagctgtactggtcatacatccggctgggccaggaggggcgtaaacgctatcaggaaaagtgcggaccgttgatgcagacggatatcacgccgggcagctaccaatggctgaacgacccgtggccgtgggaaggaaaggggaactga

SEQ ID NO: 275 - DNA, 519 bp, Firmicutes bacterium CAG:176
aagactatgatttccggcatcgtctacacatccaattccggctacacggcgcagtacgcccgcctgctgggtgccgcgctggatctgcctgtgaccgacgccaagtggggcgccgatccccatccgggcagggcggtcatttacctgggctggctcatggccggcaaggtccagggatatgcgaaagcggccaaagaatttgatatccgcgccgtctgcgccgtgggcatgggtcccgccagtcaggccggagccgagaaggtccgggccaagatgggcattccggcggaggtgccggtattcaccctgcagggcggcttcgatatcaacaagctgcacggaccctataagtggatcatgcagctgaagtgcaaagagatccgcaaaacgctggcggggaaggccagtctcagccccgcccagcagctgacctacgacatggcgaccaagggtgccagcgccgtcagcgcggagaacctgacaccgatcatcgactggtataaaacgaaggagggctga

SEQ ID NO: 276 - DNA, 834 bp, Firmicutes bacterium CAG:176
atgaccaacaaaaagctctatcttatcggcgaccccgtggatcatagcctttcgccgctgctccacggcgccatgatcgcccagaccggcgtacactacacctatgaagtccgccgcgttcagccccgcgatctggccgacttcgtggccgaggccaaggccggcggctgtgccgggttcaacgtcaccatgccccacaaggaggctatcctgcccctgctggacgagctgagccccgcggcagccgcctgcggcgcggtgaacaccgtctgcatcaaaaacggccgtgccatcggctataacactgacggccggggatttgtggacagcctgcgcgcccgcggcctggagccggagggcaagaccgtgctgctgctgggtaccggcggcgccggagacgccatctgtgatgcgctggtcggcgccggtgtgaaaaagattttcgtcaccaaccgcagcgtctatccggcccaggatctggccgcgcgttatccggataaggcgcagttcatctacttcggcattttccccgtccgccatgccatggccgagagcgacctgttcatcaacgccacctctctgggcatggccggcatgaaggagttttccgacctgggcttcctgcgtgacgccccggcaggcgtcaccgtctacgatctggtctataacccccggcagaccatgctgctgcgcgaggccgaaaagcgcggcctgcccaccgtgtccggcatcgacctgctgctctaccaggcggcccgtgccttcaagatgttcaccggcaaggacgtggatatgcccgccctgatctcggcgctggagggcaaactggactga

SEQ ID NO: 277 - DNA, 336 bp, Firmicutes bacterium CAG:176
gagggttttggcatggcgaaccgggtaacgatgtctatctgcggcacggagtatatcctcgtagcggaggaggatgccgcctacatggagaagatcggcagcatggtggatgcggagatgcagaagctgatggacagcgcccacatgagccgtgacgcggcggcggtgctggcggcggtcaatctggcggaccagctcaccaaggcgcaggagggcgcggaaaatctgcgccggcagttgaagacatatctggacgaggccagccgcgctaagaacgaggcggcggagctgcgccggaagctgcagaacgcccagaaccagaataaccgccggtga

SEQ ID NO: 278 - DNA, 792 bp, Firmicutes bacterium CAG:176
atgataaattttacaaggaaaccacgctatggctacgaagatctgctggagatcatccggctgctccgttcgccggagggctgtccctgggaccgggtgcagacccaccagtccatccgccgaggtatgctggaggaggcctacgaggccgccgaggccatcgatacggacaacgccgcactgctgaaggaagagctgggcgacgtgctcatgcaggtggtgttccacgccggcatcgaagccgacgccgggcgctttgacatggatgacgtttgcgacggcgtggtgaaaaagctgctgtaccgccacccccacgtgttcggcgatggtcaggcagaaacggcagacactgtgcccgccagctgggagcagctgaagcggcaggagaagggccagaaaaccactgccgatgcgctggatgccgtggcccgcagtctgccaggtctgtggcgggcggagaagatacagaagaaggctgcggaggcgggcttcgactggcgcgacatctccggcgcgctggacaagctggacgaggagactgccgagctgcggcaggcggtgcgcgacggcgccaatgtcgaggaggagctgggcgacgtactgttcgccgccgtaaaggtgggtcgcttctgcggcgtggacccggaaacagctgtcaacggcacctgtgaaaaattcattcgccgcttccgcgcgatggaggaggccgcggccgcagagggccgcagtctgtccgacatgatgctggaggagatgaccgccctgtggaacggggccaaagaatgttcttaa

SEQ ID NO: 279 - DNA, 855 bp, Firmicutes bacterium CAG:176
atggcaactttcaccaaccaggcaacgctgacctataacggccagaccaccacctccaacgtgacggtgggtgagctgacggagacgctgaccgccgccaagaccgccgtggtgcccacctacggcaccgacggccgcgtgacgtatatcctctctctggtcaacagcggcaccgcaccgctgacggggctgaccattaccgacgatctgggcggctacaccttcaacgccgggacggtgtatcccctgtcctacaccgccgggtctgtgcggtactatcagaacggcgttctgcaggcggcacccgccgtcaccgccgggccgccgctgacgttcaccggcatcaccgtgccggcgggcggcaatgccgttatcgcctatgaggccgtgcccacggccttcgcgccgccgacggcggagggcaccgtcaccaacagcgcgtccgtcaccggcgcggggctgacaaaccccgttaccgccacggagacggtggcaccggaggcggcgccggcactgaccatcaacaagtccctctcccccaccacggtgacggagaacagccgcctgacgtacaccttcaccatccagaacaccggcaacacggcggcggacgccgcggcggccatcgttatcaccgacaccttcgacccgcggctgacggacctgacggtgacgctgaacggcacggcgctgaccgcccccacccagtacacctatgacgcggctaccggcgtattcgccacggcggccggcgtggtcacggtgcccgcggccaccttcacgcaggacgccgccaccggcgcgtacagcaccacccccggcacggcggtgctgaccgtcaccggcacggtgtaa

SEQ ID NO: 280 - DNA, 261 bp, Firmicutes bacterium CAG:176
gcttcttgggctgataggtacggaacattgcatgacacctccatttttaagattatccggcgggacaacaaggccccgcgcttactcgacagcggtgagatattcaccgccgcagtaaacatttccacgcctgttgcacatctgcgtgcaaccacgcggagtatattatacagatacaggggggcactgtcaacaaaaatttacccacaagcgcccgtttttgcgggaaaaacagggaaaaagccggcagtttatatttag

SEQ ID NO: 281 - DNA, 858 bp, Firmicutes bacterium CAG:176
atgcactgcactgccgccgcggcggcaggaaaaaggagggcgcatatggatcagcggcctatcggggtgttcgactccggctccggcggattgaccgccgtgcgggagatacgtagcatcctcccctctgagaacattatatacttcggcgacacgtcccgtgtgccctacggcgggcgctcggcggaaatattgctgcgctacgcccggcaggatgtacatttcctgcggagctttgatgtgaaagcgctgctggtggcctgcggcaccgtatctaccaacgctctgccggtgctggcggccgagaacgatatccccgttctcggtgtggtgaaaccctcctgcgcggcggccgctgcggcgacccgaaataagcgagtgggcctgatcgccacggcggcatccgtgcgctccggggcctatgagcgctgtctggcggcgctggacggcgccattcaggtgtatgtcaaggcctgccctctgtttgtgccgctggtggagaacgggcgtttccgccccggtgatccggtcatcgagacggtggcccgggagtatctggagccgctgcgtgccacggggatcgacaccctcatcctgggctgcacccactatccgctgctgacggagatcatcgcggacatcatgagccctggtgtgacgctcatcgactccggcgctgcggcggcgcgggtcctgcggcagacgttgtcagaccggggtgcgctggcccaacgtgaccacggcacactgacactgtatgccagcgaccggccggaggacttcggtgcgctggcagggcagtttctgcggcgaccgctggagagcgcggtacagcacgtggacatcgagaggtactga

SEQ ID NO: 282 - DNA, 606 bp, Firmicutes bacterium CAG:176
ttccctatgaatatcgtttgtttggacatggagggcgtcctcgtccccgagatctggatcgcctttgccgaggaaagcggcattcccgagctgcgccgcaccactcgcgatgagccggattatgacaaactcatgcgctggcgcatcgatctgctgcggcagcgcggcctgaagctcagcgccattcaggagaccatctcccgcatcgaccccctgcccggcgccaaggacttcctggacgcgctgcgcaaggatacccaggtggtcatcctcagcgacaccttcgaccagttcgccatgcccctcatggccaagctgggctatcccaccctgctgtgcaacaccctcgaggtggacggcgagggctacatcacccgccacctcatgcgctgtgaacactccaagctcaccaccgtcaaggcccttcagtctatcggctacgacaccatcgccagcggcgacagctataacgatttggagatgatcctccacagcaaggccggctttctcttccggggtcccgacaagatcaagcaggactaccccgacctgcccgccttcgaggactacgacgacctgctggccgccatccgcgccgccctgtaa

SEQ ID NO: 283 - DNA, 786 bp, Firmicutes bacterium CAG:176
cccttgtctttccgcactgctgtggtatactggaaaccgtcatttttacagaaagagggacctcccgtgcaaaagctctcccacaacgaccacatcgacctgtaccgccacctggccttctgcaccgttggcggcttcttcggctgctacgctgttcttatccacagcggcgtcatgggcaacgcccagacggtgaacctgatcgagctgctgctggacgccctgcgcggcgatctgcacgccgtgctcctgcacctgggcgcgctggtgctgtacgtgctgggcaccatgctgacggtgctgctgccccactggtggggctgggatatgcactatgtatcgcctgttatcaccgccgcagccgccgtgaccgtagccttcctgccggaaacgctgaacgttgtagtagcactgtatcccatcttctttgccatgagcatccagtggagcagcttcggcggcgcccgcggcttttacagctccaccatcttctccaccaacaacaccaagcagacttctctggccctggccaactacctgtgtgaccatgaccgcgcccacctgcgaaagctgaaggtctttgccctcaccctgctgtgcttccacatcggcgcggcagcggcttacttcgccgtgacgtggtggtatatccgcggcgcgctggccgtgctgccccttatcgcctgggccttcttcctgtccgtatgcgaacgcaggcatgaagccctggccgaggaaccggagaccatccccgacagcagcgcccaccccaccagcaacgcataa

SEQ ID NO: 284 - DNA, 534 bp, Firmicutes bacterium CAG:176
atgcattacggagaattgaagaaatgtgatattgccaacggtatcggcgtgcgggtgacgctgttcgtatccggctgcaccaaccactgcccggactgctttcagccccagacgtgggattttgactacggaaaggaattcacggaggacaccaaggcggagatattctcggagctggacaagccctttgtaaacggactgacggtgctgggcggcgagccctttgagccccggaaccagcgggagctgctgccgctgctgcgggaggtcaaggcgaagtatcccggcaagaccatatggtgctttaccgggttccggctggacgatgagctgctggcagacggcagctatccccggtgcgaggcaacggatgagatgctcgcgtgcatcgacgtgctggtggacggacggtttatgaaggaactgaaggatatctcgctgcagttccggggcagccggaaccagcgggtcatcgatatgaaccgaacaagagagacgggaacgatctgcatttgggacaagctgagacgataa

SEQ ID NO: 285 - DNA, 930 bp, Firmicutes bacterium CAG:176
atgatcaccgatatcgacgccgctttgctggaaaagatcgccgatctgaccggcaagcccgtgggcgccttcaatatccgcaaggactccggctgcgaggcccgtcagtccaccgagcacattgctatcgatccccgcagcgacggaaagtccggcattgacatccgcatcaagcccggcaccaagggtgagaaatgctacatccccgtcatcatcagccacagcggcctcagcgagctggtctataacgacttctacgtgggcgacgactgcgacgtggacattatcgccggctgcggcatccacaactccggctgtgacgaaagccgccacgacggcatccacaccttccacatcggcaaaaattccaaggtccgctatgtggaaaagcacttcggcgagaaggaccccggccagaccggcggcaacatcatgaaccccaagaccgtggtctacctgggcgagaacgccaccatgcagatggagacgatccagatccgcggcatcgactccaccaagcgcgagacggacttcttctgcgaagccggcagcgaggtggtggtcaccgagcgcctgctgacccatggcgctcaggaggccgagagcgatatgcgtatcgagctcaacggccacgacgcccgcggccgcgtcatctcccgcagcgtggcccaggaccgttcccaccagatcttccacccggtgatggtgggcaacgcccagtgcttcggccacgttcagtgcgacagcatcatcatgggtgacgcccgcatcgagtccgtcccggccatcaccgccaactgtcccgacgcccaactgatccacgaggccgccatcggcaagatcgccggcgaccagctgctgaagctggagaccctcggcctgacccccgaacaggcggaggagacgatcctcaagggctttctggcataa

SEQ ID NO: 286 - DNA, 657 bp, Firmicutes bacterium CAG:176
atgcaggcgatcaagcaattcttcaaaacccatccccacgcctggtggggcgcatatctgccggtctatctggcgatgttttttaccatcgagcactttattaccgataactactgggccacacagacggtgctggacacctatatccccttctgcgagtggttcatcttcccctatgtgtcctggagcccgctgctggtggtgctgggcatctatctgatcctgaaggacgccgagggcttccgccggtatatgtggttcatcatggtgacgttcacaacggcggtggtgttctgcattctggtgcccaacgggcaggatctgcgtccggcggtgatggcgcaccacaatgccgccacctggctggtggagtacacctattccatcgacaccaacaccaacgtcttccccagcatgcatattctgggctgcatggcggctgtggcggcggtgtggcacacgccgggactgcggaagcccggctggcgctggggcgtaacgctgtacgctatcctcatcatggcggccaccgtgttcgtcaagcagcacgcggccatcgatgtgctggccggactgctgaccggcgccatcgcctatgtgttcgtgtatgtcatcgttggccggcgccgcgacaggcggctgggccgggattgctga

SEQ ID NO: 287 - DNA, 852 bp, Firmicutes bacterium CAG:176
gtgaagggagtgaaggccatgttctatatcgggtgtcatctgtccgcctcagacggctttttggccatgggcaggacggccctgtccatcggggccaacacgtttcaatttttcacccgcaatccccggggcagcaaggccaaggccatcgatccggcggatgtggcggcgtttctggcgctggcggcggaaaacgaattcggcacgctggtggcccacgcgccgtataccatcaatccctgctccaaggatgagcacacccgggagtttgcccgcatgacgcttgcggacgacctgaagcggatggagcacctgccggggaacgtgtacaacttccatcccggcagccacaccgggcagggtatggagacgggtattgcccagatcgcggagacgctgaacgccatccttacgccgggcctccgcaccaccgtcctgctggagactatgtccggcaagggcagtgaggtgggcagccggttcgaggagctgcgggagatcatcgaccgggtggcactgtcggataagctgggggtgtgtctggacacctgccatgtgtccgacgcggggtacgacatcgcggacgacttggacggggtgctgacggagtttgaccggatcatcggtctggggcggctgaaggcggtacacatcaacgacagcctgaacccgcggggcgctcacaaggaccgccatgcccgcatcggcgagggctgcctgggcgcggaggcgctggggcgcgtggtgcgccatcccgcattgcaggggctgccctttgtgctggagacgcccaacgagctgccgggctacgcccgggagatcgccctgctgaaggcgctgcgggagggatga

SEQ ID NO: 288 - DNA, 615 bp, Firmicutes bacterium CAG:176
gctatggaatatgacaaggaattgatcgcccacaagctgcagcggtgggacaagttcatcacggattatcatctgccggactgggagacgataccggatttcggcctgtatatggaccaggtcatcgtactgctggagcagtatctcagcttcattcccgcgccggtgggcggcaaggagcgctttgtcacgtcctccaccatcaacaactacgttcggctgaagatcatgcccgcgccagagaagcggaaataccaccgcatccacattgcgtacctcatcatgatcctgaccatgaagcagagcctgagcatcagcgatgtgcagaagatcctgcccgctgacagcaacgagacggacgtccgcgcggtgtatgaggattactcgctgaaattccgccgggtggggctgtttttcaaccagcaggtgcagtccgggtcggagggcatccgcagcgccaacgaacagaacggcaataacgccgtggagctgctggtcatcgaaagtgcgctgatcgccgggttctccaagatattggcagagaagctgatacgcctgtgcggcgcagatgccgaggatgtgctggccgcggagcagacaccgccccagccgtga

SEQ ID NO: 289 - DNA, 2112 bp, Firmicutes bacterium CAG:176
atgggcaataagttttccaacaaatatatctgggtgctcatgctggtgctgggcgtctttgtgatggcggtcacggctctcatcggcggcaacagcagcatccgcaacgcccagcagaccgcccagcggacgctgcaatatctgcaaaaccagtgcatcagctaccgcgacatcgtcgccgccgaccggctaaagagcctcgtgcggctgacggagcaggcgcaggaggtggcggagcgcgagggtatggtggggcagaaccgctccaacgaggagctggcgcggtacgcccagcgtcagcgcgtaacctgcgtgctggtgctggacaaggatctggagatcgagttcagctccggtgcggacatggactggagcgattactacaccaatgaggcgatccgctccatcatggactacccggaaaagatcttcgcccgccgcctgacccgtgacggcgcggtatacgacatagcagccgtggcgcgcgtcgaaaatcccggcgtcgtcttctgcgtccgcctccagtcgaacacgatcatcgcctcctaccgtgcgtccatcgagagcctgctggcgggctacgagacgctgctcaatgacaaggtctacacctacatcaccgacggcgagcgcgtggtgggcagcagcgcggcggagcagtgggacctaccggtggacagcgtgccgctgatcacggcgctggagcaggcggacagcggcagccgtttggcgaagttagactgtggcggtacgtttttcggtatgcgtgggatgtaccagaagtacagcctgtatgtgttcctgccggcagactttgtgttcgcgcagacaaaaaatatgctgatctccgccttcggcgtgtacgcgatggcggcggtggtggcggcactgctgttggtcaggctcggccaggaccgcaaacggcgggagctggcgtaccagaagcagttggaaaaggaagtagagcgtgccacagcggcggaccaggccaagacgcacttccttcgcagcatgagccacgacatacgcacacccatcaacatcatcatgggtatgctggagatcatcgggcggaacccggaggatgtgacgctggtgcagtcctgccgggagaaggcgcagaccgcggcgcggtatctgctggcattggtaaacgacgtgctgacgctgaatcgcccgaagcaggaggcgctgggaaagacaccctattgtttgacaagcgagctgcacgagatgctggatatttcgcgcgcccaggcggagagcgcaggcgttgcgctgacggtgatggacctgacgctggagcatgaacgattcacaggcgacccgctgtatatgcggcagatctgccagaacatcattggcaacgccatcaaatacaatcaccccggcggatgggtgcgctgcagcttccgcgagtcccattatgcggacggcgtgtgccggctggaatttatatgcgaggacaacggcgcaggcatgagcgagacgttccagcgccatatgttcgaggcgtttgcccaggaaaacagcgataggggcagcctttccggcggcgtgggcctgggtttggccgtggtgaaaaagctggtggacgaaagaggcggtaccattcaggtggacagtgcacgcggacagggaacgcgcttccgcgtggtgctgcccatgatgcccagtgaggccgaaccggaagccgcgcttcccgacgcggcggcctccatcgccggacggcgcttgctggtggcggaggacaacgaactgaaccgggagatcgcggtctacctgctgcaggaggccggcgccatggtggatcaggccgccgacggcaaggaggcggtggagatgtttgccgcgtcggcgcccggtacctacgacgcggtgctgatggacgtgatgatgccggagctggacggcctttccgccacccgcgccatccgcgggatggacaggccggacgcccgcctgccgatcatcgccatgaccgccaacctgtttgacgaggacgtagcggcctgcctggcagcgggcatggacgcgcatatccccaagccgttggaggctgggcagatgataagaacgatcgccgagtggctggagaggaagaaacaatga

SEQ ID NO: 290 - DNA, 861 bp, Firmicutes bacterium CAG:176
atggcagtgatgatagagacaaggaacctgacctatacgtaccctgcaccggagggggagacaaatcctccggccctgcgggatgtatcggtacagatcgaaaagggcagctttacggtggtgctgggccacaacggctccggcaagtccacctttgccaagcacctgaacgcggtgctgctgccgtgcggcggtgccgtgtatgtggaggggatggacacccgggacgagaagctgctgctggagatacggcggcggacggggatggtgttccagaacccggacaaccagatcgtggccaacgtggtggaggaggatgtagccttcggcccggagaacctgggtgtgcctacggcggagatacgccggcgggtggacgacgcgctggaggcggtgggcatggagcaattcgccagccacgcaccgcacctgctctccggcgggcagaaacagcgcatcgccattgcgggtattctggccatggagccggagtgcatcgtgctggacgaggccacggctatgctggacccggcaggacggcgtgaggtcatcgacaccgtgctgcggctgaaccgggagcagggtattaccgtggtgcttatcacccatcacatggtcgaggcggagcgtgcagaccgagtgatcgtgatgaacgacggcgaggtagcgatggacggtatgccgcggcaggtgttctcacaggtggagcgcctgcatgagctgggcctggcggcgccggatacggtggaattgctgtatcggctgcggcgggacggagtagatgtgccgctggaaaacctgacggtagacgagtgcgccgataccatttgccgcgctttcggcgaggcggaagggaagtaa

SEQ ID NO: 291 - DNA, 1710 bp, Firmicutes bacterium CAG:176
atgatgacacccaaggagaactttctggagctgctgaagcccaatggccagccggatcgccagctgtgccagtacgaggcgctgcacatgtgcctgaacgatcccatcaacacctatctgcggggcaaccggaagcgggggaccgtcagcaaagaccgctggggcaccaccatcagctttcctgccgacgcgccggggcctatgcccgtcaccacggacggcctggcggtgtgcccggacatcacccgttggcgggagacagtgcacgcgccggacatcgccgcctgcacggagggctgggagacgtgccgcgccacggcacgggcggcctgcggggaggagaagctgctggcgggctttatgggtaccggtatcttcgagcagtgccacttcctgatgggctttgaggacacgctgacgaacctttatgagcgcccacaggagatgcacgcgctcattgactgcatcaccacgtaccggctgctgtacgtgaagctgctcatcgacaatctgcagccggatgtgatcttctctcacgacgactggggcaccaaggatgcgctgttcatgaagccggagatgtggcgggaattcttcaaggagccgtaccggcggttttacggctatatccggtcccggggcgtgatcgccatacatcacgcggactcctatctggccccgatcgtggaggacatggcggagatcggcattcaggtgtggcagggcgtactgccggagaacgatataccggccctccagcagaagctgcacgggcggctggtgctgatgggcggtatgggcgccgccatcgaccggacggatgccgcgccggaggagatctacggctatgccatggatacgctgcggcggtgctgcccgggtgggcactatatcccctccatcacctatggcctgccgggggcggtgtatccccatgtggacgagtacatcgaccgggccatagcggactacaaccgggcgctgcacgtgccgcggttcgatctgccgccggtgccacgccgggtgcgggctgtcgctgtgcggcaggagacggcggacgccgctgtcgagaacggcgacgtactggcccgcctggccgcagcgctggaaaagggacagcagaaaaaggtgctggcgctgtgccgggaggcgctggaccagggtcggacgccgcaggagatcctgtccggcgggctgatccgcggcatgaacgatctgggtgaggcattctccgccaatcgggccttcgtgccggagatgctgatggccgcccggtgcatgacggcggcgctgggggagctgaagccgctgatgaccggcggaaatgccaagacggtgggccgggcgtgtatcggcaccgtccggggagatatgcacgacatcggcaagaacctggtgaagatcatgctggagggcagcggtgtggaggtcatcgacctgggcgtggacgtgacgccggagcagttcgtggagacggcgaagcggcagcgctgcggcgtgatcgcctgctcatccctgctgaccaccaccatgggcgagatgcgccgggtggtgacgctggcccgggaggcaggtatccgagatcaggtgaagatatttgtgggcggcgcgcctatcagccagagcttctgcgatgagatcggtgcggacgtatacaccgaggatgcggcggcagccgcacgggcggcggtatcggcgctgaagggataa

SEQ ID NO: 292 - DNA, 534 bp, Firmicutes bacterium CAG:176
tgttgggaggtgggcgcagctatgcggatactgggcattgaccccggcatcgccattgtgggcttcgggctgatcgaatcgaaccggggcagtgtgcgaatgctgcaatacggcgctgtgactaccgaggcgggactgccgctggcgacacgtctggtgcagatcgaaaacgacatgaccgcgctgatcgcccagctgaagcctgatgagatcgccgttgaggagctgtttttcagcaaaaacatcaccacaggtatcgccgtggcccacgggcggggtgtgatcctgtgtacggcggagcgactgggcgtacccatattcgaatatacccccatgcaggtgaagcaggcggtggccggctacggcctggcggacaagaagcaggtgatggacatgacaaagcggcttttgaagctgaaggcagtgccgaagccggacgacgcggcagacgcgctggccatcgccatatgccatgcccgcagcgctaccagcctgctgcggcgtaaggaccccgacgtgaaggagactgtctga

SEQ ID NO: 293 - DNA, 648 bp, Firmicutes bacterium CAG:176
gcgctatggaataattctgcaacaattggcgaaaaaatcggaacgtgtgacgcgcgttttctgcgggatagcggaggaattgaaatgaaactgacacttttgcggcacggggagaccgagggcagccagaaaaatctgtattatggcgcggcggatatcccggcgctgccgaaatcgctggaggccttgcagcagaaagctttgaccggcgtatatcccacggcggagcactactacgtcagcggaatgacgcggacgatacagacgctgcgggccatatacggcgacgtggcatacacggtgctgccggggctgcgggagatggatttcggcgatttcgagatgcgggcctacgccggtgatctggagcacgatccacaatttattgtgtggtgtgaggactcagagcacaatatgtgccccaacggagagagtgctccgcaggtgctggcacgaaatctggccgcgatacagcccgttatcgacgcgggggaggacgcggtgtgcgtgatccacggcggggtgacgtcgggactgatgatgcactggttcggcggaacgcggtacgactatctgctggcacccggcgagggatatcaggttagttttaacgagaaaaaacctgtaagctattcgaaaataatgtaa

SEQ ID NO: 294 - DNA, 642 bp, Firmicutes bacterium CAG:176
gtgcgtgccattgagaagcagaacagaggacggctctcgccgtcctctgcttttttcgcggggtttcgctttacaagcgggaaaaaattgcgtataataccaaaaaaggaggtgggcgatgtgggtatcgcgtttattcaggacaagctggagatcaagttcctgatcctgtacattgtgtcgcggctgacggagccggtggacggagccgacttgcaggacatgaccatgtgcgacgagggcatcgactactttgattatgcggagtgtctgggtgacctggtgaagacagagcatctgcgtgtcacggaagacgggcagtatgttatcacggaaaagggacggagaaacagcggtatctgcgagagcagcctgccatattccgtaaggcagctgtcggacaggcatattgcagcttggaacaaggcggcggtgcggcggcagcaggtgcagggacgggtgacgccgcgtgaaaacgggacgttcaccgtggagctgcggctgcgggacgatgtggatagcctgatgacgttggatctgatggtggccgataaggccgacgccgaggcgttggcggaacggttccggagggagccggagaaggtatacacgcagatcgttgcggcgcttcgcggaaaataa

SEQ ID NO: 295 - DNA, 879 bp, Firmicutes bacterium CAG:176
atggcagatcgtatcgtaagagctatttccaccgatggcatggtgcaggcggcggccatttgcagccgcgacctgacagagcgcgcccggcagatacacaagacgctgcctgtggccacggcggccttgggccggacgctggcagcagcgtccatgatgggcaacgccctgaaaagcgatggcgccagcctgacgctgcaattcaagggcggcggtccgctgggcacggtgctggccgtcagcgacaacgagggcaacgtgcgggggtatgtgacgaacccccatgtggacctgcctctgcggccggacggcaagctggacgtgggcacggccgtgggtcatgagggcacattgacggtcatcaaggacctgcacatgaaggagccctacgtgggcaccatcgacctgctgggcggcgagatcgccgaggacgtggcgggctatttcgtggagtcggagcagatccccaccgcttgtgccttgggcgtattggtggaccgggaccagagcgtcaaggccgccggcggatatcttatccagctgatgcccggcgcgggggaggacgtcatcaccaaggtggagggcggcatcatggccgcagggccggtttcggcgctgctggacaaaaacgacgacccggagcagctgctgcgggacgtgatgagcgactttgacctgaagatactggagacgtgcccggtatcctacaagtgctattgcagccgggaacgggtggaacgggcgctgatctccctgggccggaacgagctggagcagatgctggcggaacagggcggctgccagctgacgtgccagttctgtgacgcggtgtacgacttctcggcggaggacctgaagggcctgctgaaaaatatgtaa

SEQ ID NO: 296 - DNA, 612 bp, Firmicutes bacterium CAG:176
atgtattattatgtgaacggcaccgtggcggagatcgatgcggggctggcggtcatcgactgcagcggcgtgggctacgcctgtgccacgacgaactatacgctctcccagctgaaaaagggcgcaccggccaagctgtacacctatctgaatgtacgcgaggacgccatggagctgttcggcttcgccgatcagagtgagctgcggagcttcaagctgctgatcggtgtatccggcgtaggccccagggcggcgttgtctatcctgtccgccgtaacaccgcagcaactggcgctggcggtggtgacagaggatgaaaaagcactgactgctgccaacggcatcggcaaaaagatcgctcagcgggtgatactggaactgaaggacaagctggcacgggaggaagcgctgggcggcacatccgttaagggcggcgcgcccgcgatggctgcggtgccccacagcaagaaaagtgaggcgcaggcggcattggcggtgctgggctacggcagcgcggagatcgccgcggcgctgaaggatatcgacatggaagcgctgacgctggaggacatcatccggcaggcgctgaagcgcatgatgaagatgaagtag

SEQ ID NO: 297 - DNA, 597 bp, Firmicutes bacterium CAG:176
cggctccacaggcaggtgacgtatatggcaaagatcgtgctggcctccgggtccccccggcggcaggagcttttgcgtcggatgggcatcaccgactttaccgtccgagtgccggaggtggaggaatacttccccgccgggctgacgccggaggagacggtgtgctacatctcccgggagaaatcccaggcggtggcgtccgacgcggacgagatcgtcatcacggcggatacgatggtgtttctggacgacaagaagctgggcaagcccgccgacgaggcggaggccctgcaaatgctgacggccctgcagggtcggcgccacaccgtctgtaccggtgtgacggtgcggcagagggagaaagccctgacccgcgcccagcacacggacgtgtatttccgtccggccacacagcgggagctgaaggcctacatcgccgggggcgagcccatggacaaggccggggcctacggcgtacagggacagggcgcgctgctggtggagcgcatcgacggtgactttttcaacgtgatggggctgccggtggtgctgctggcggagatgctgggcgaattcgggatacagctgctgggataa

SEQ ID NO: 298 - DNA, 1314 bp, Firmicutes bacterium CAG:176
atggaacaaacagtcgtcacacaaccgaagcgcttgcagccgaaaaagccgcggcgccgcatcacgccggccacggtgtgccaggcaatccacgatgtgccctacatcgtggcccgggccctgatccgcgccgtgcgcgcagtgggccactgctttgcctggacctgggacgccatcgcttccgacgtcagggccaactggcgcgccttctgctgcggacggctggtgaccggctgccgtgacgccctgcgttccccggccctgcgggaggtgcaccacatcatgcgcgatcatccctctatccgcgccatcaccatgatcgccgtcacggcggtgatcttcgccgccgccgttatggcggagccggtacgcaccatggacgccatctgcatcgtggtggacggcgacggtccccacgtactggacgagcgcagtgaggagcgcacctatgacgatctgctgctgcgccgcagcctgggcgacaagtccatgcagctgctgctggagccgggccgcaccgtcaccatcacccacggcgacgacacacacaccctcaccaccgaggccgagcgcctgtcctccctgctgcggcgcagcggcatccgtctgggtgaggacgagatggtggagctgaatgtcgccggcgaggaccccgccatccgcatcagcgatacgctgacctaccagcactatgtcactgtggagacggactacaagatccttcgctcaccggatcccctgatggacaagggcactgaggagatcatccgcaagggtatccccggccagatcgtggagacgtatgaggacactgtggtcagcggcgaggtagtatctaccaagtatatcggtgccagccacgacacctcacacgcggagctggtgcgctacggcacccgcgtctacgaggtggaggagggcgacaccatcgaaaaagacttccccaacgaggtgggcgagggcggctacctgctgtttgcctccggcgacaccatgacctataacaaggtgatgctctgctcctccaccgcctactacagcggcggcgacggcggcgcggcctggaccacggcggtgggtgccgcggtgggcgtgggcaccgtggccgtagaccccaaggtgatcccctactacaccaaaatgttcatccagaccaccaacggccgccgtgtctacggcatgggcaccgccctggactgcggcggcgccatcaagggcaacatcgtggacctgtggttccccaccaaggcggactgctactcctggggccgccgaaacgtcaccgtgtatattctggataaaaaggcaagctaa

SEQ ID NO: 299 - DNA, 669 bp, Firmicutes bacterium CAG:176
atggatacctataagatcatcgaagtaaaagagagcgtgtttgccgacaacgaccgggaggcggcacgggtacgggaggcgctgaagcaaaagggaacgttcctgctgaacctgatgtcctcccccggcagcggcaagaccaccacactgctgcggaccatcgaggcgctgaaggacgagctgcggatgggcgtgatggaggcggacatcgactcggacgtggatgccgccgctattgccggcgccggggtacggtctatccagctgcacaccggcgggatgtgccatctggacgcgggtatgacggaacagggcctgcgggagatcggcacggacgatctggacctggtggtgctggaaaatgtggggaacctggtgtgtccggcggagtttgacaccggcgcggtgaagaacgccatgatcctctccgtaccggagggccacgacaagcccctgaaatacccgctcattttcaccgtctgtgatgtgctgctcattaacaagaccgacgtgctgccctatttcgacttcgacatggacaaggtgatcgaatacgcccaccggcgcaatccgaagctggaggtcttcccggtatcggccaagaccggcgagggtatggacgcctggtgcgactggctgcgtaagcaggtgaaggactggcaagcatga

SEQ ID NO: 300 - DNA, 1350 bp, Firmicutes bacterium CAG:176
gtgcgcggcgtgtcttttggtgagcaaatgcggcggcggcgggaggagctggggcggacccgccaacagctggcggacaggctgggggtgtccgtatccgccgtgggcaactacgagacgggcatcagcgcccccaaggaggaggtgctcctgcggctgtttgacgcgctggaggccgagcccaactatctgtaccggggcagctaccgcgccgccgccggcggccacagcgacgaggagcgccgtctgctggccaaataccgggatctgcccctgtccgggcgccagaccatccacacactggtggacgcgctgaccgaaatgactgacgacctgcgcaccgccgcacccgccgccgagaggcggggcattccgctgtacacatcacccgccgctgcgggctttgccgcgccggtgttcggcgaggactacgagctgataccggtcaccggcgacgtaccgcccggcgcggagctggccgtgcgcatccagggcgactccatggcgccggtcatcgccgacggcgccgtggtctatgtgaaccacgacccggtgcaaagcggcgacgtgggcatcttctgcgtggacggcgatatgctgtgcaagcagtactaccgggacccgctgggtatggtatacctgttctccctgaaccggaagcgcgcggatatggacgtgatatttcatcggggcagcggccgcagcctgacctgcttcggccgggtgatgctccacgcccagcccctcccggagggacatataaaacgaagcagcccgcctctttcgaggcgggctgcgttttcgcggtcacaatataaatcctccgtcgcaggtgagcacctgcccggtgatgaacgacgccttttcgtccgccaggaagctgacggcggcggcgatgtcctccggcgtacccaggcggcccagcggcgtctcctgcgccagctgggggagtacctccggcggcagcgcgtccagcatatcggtcttaatgacacccggcgcaacgcagttgacccggatgcccgtgggcgccagctccgacgccagggaacgggtcagcgcgatcagtgcgcccttggtggcggagtacgtcacctcgcagctggcaccacgcaggccccagatggacgacacgttgacgatgcacccggcgtgctcgtggagcatatggggcagcaccgcctgtatggtgtggaacgccccgtccacgttcacggcgaaataccggcgccacagggcgtcggtgatgtcctggaacagcgcctgtcccgccacgcccgcattgttcaccagcagcgacacggggccgagctcgccctccacccgccgcaccatctcgttcacctgtac

SEQ ID NO: 301 - DNA, 1626 bp, Clostridium sp. CAG:62
atggctaaggaaattaaatttggcgtagaagcaagatctgcattggaagcaggtgtaaataaactggcagataccgttcgtgtaacacttggaccaaaaggaagaaatgttgttttggataaatcttttggtgctccgttgattaccaatgacggtgtaacaatcgcaaaagaagttgaattagaggatgcctttgaaaacatgggtgcccagttagtaaaagaagtagcaacaaaaacaaatgatgttgccggtgatggtacaacaacagctaccgttttggcgcaggctatgattaatgaaggaatgaagaacttagcagccggagcaaatccgattattctccgcaagggaatgaaaaaggcaacagagacagccgttgattccattcgcagcatgagttctaaactttccggtaaagagcagattgcaaaagttgcagcaatttccgccggtgatgagcaggttggtgaaatggttgccgatgcaatggaaaaagtaaccggtgacggtgttattacaattgaagaatccaagacaatgaagacagaactggatatggtagaaggtatgcagtttgaccgtggttatttgtctgcttacatggctacaaacatggataagatggaagcagaactggataatccgtatatcttgattactgataaaaagatttctaatattcaggaaatccttccactgcttgagcaggttgttcaggcaagtgcaagacttttgattattgccgaggatgtagagggagaagctctcagcacattggtaatcaataaacttcgcggaacctttaatgtagttgctgtaaaagctcctggttatggtgacagaagaaaagaaatgctcaaagatattgcaatccttaccggcggtcaggtaatttccgaggaacttggtttggatttgaaagaaacaacgatggatcagcttggtcgtgcaaaatctgtaaaagttcagaaagaaaatactatcattgttgatggtgaaggtgataaagcagaaatcgaggcaagaattgcacagattaagaatcagattgaagagacaacatctgactttgaccgtgaaaaacttcaggaaagacttgctaaattagcaggcggtgttgccgttgtacgtgttggtgcagcaactgagacagaaatgcaggaagcaaaacttcgtatggaagatgctttggcagcaacaagagcagcagtagaagaaggaattatcgcaggtggcggttctgcttacattcatgccagcaaagaagttgctaaaatggctgcttctcttgagggagacgaaaagaccggtgccaacattattttgaaagcgctggaagcaccacttcgccgtatcgcagaaaatgcaggtctggaaggttctgttatcattgataaagttcgttctgaggagcctggatttggatttaacgcattgacagaagaatatgtaaatatggtagacaatggtattcttgacccggctaaggtgacaagaagtgcattgcagaatgcaacaagtgtagcgtctaccttgttgacaaccgagtctgttgttgctaatattaaagaagatgcaccggcaatgccagcaggcggtgccggcggcatgggcatgatgtaa

SEQ ID NO: 302 - DNA, 1359 bp, Clostridium sp. CAG:62
atgaaaggaaatcgttcgatgcaggatatgacagagggaagaccaatttcactgatactgaaatttttctttcctcttttatttggaatgttattccagcaattttataacctagtggacactgccattgtcggaaagtttttaggtccggatgatttggcggcagttggtgctacgggttccgtgaactttttaattctcggattctgtatgggtgtctgcaatggcttttccatccctgttgcccagaaatttggtgcaaaggatgagagcggtcttcgacgctttgtggcaaacagcgtttggctttctgtcattttcgcagccgtcatgaccgttgttgtctgtattttgtgccgccaaattttaatttggatggacaccccggcaaatattttagaaggttcctaccgctatatctttgtgatatttttaggaatccctgtcacctacttatataacctcctttcaggcattatgagagcacttggcgacagcaaaaccccactcattttcctcattctgtcctcggtcttaaatattctttttgaccttggtgcaattttgattttacacatgggtgttgcaggagctgcatgggctaccgttacggctcaaggaatttccggcgttttgtgtttgatttacatgaaaaagaaatatacgattttgaaaatttcaaaggatgaatggaaattaaacggaagctgtattgccagactctgtggcatgggaattcctatgggacttcagtattcgattacagcaatcggcagtgtcgttttacagactgccgtaaaccgtcttggttccaccgcagttgcagctgttgcctccggcggaaaacttgccatgttcttctgctgtccgtttgatgcaatgggttccacaatgtccacatatgccggacagaacttaggagcccagaaacttgaccgtgtagacaagggaatttttgcatgcagtggattagctcttgtttattctgtgattgcctgtgctgcccttttgtttaccggacaatatttagcacttttgtttgtcgacggcacagaaacccggttaattgaaatgattgctgcattccttcgctggaactgcattttctatttcccattagcacttgtaaacattgtccgctttacgattcagggcttgggattcggaaaattggctattttagccggcgtgtgtgaaatggctgccagaagtattgtcggattctattttgttccggtatttggcttcaccgccgcctgcctggcaagcccaatcgcctggatattggcagatgtgtttttgattccggcgtattttcttgtggtgaggcatttaaagagggaactttgtatgagttag

SEQ ID NO: 303 - DNA, 1824 bp, Clostridium sp. CAG:62
ttgaatattttatcactggaacatttgacacattcatatacggaaagaaaactttttgatgacgccgatttttatcttcatgaaggggataaggtaggtgtaatcggaatcaatggaaccggcaagtcgactttgctgaaaattatggcagggctggagactccggatgaaggacaggttatacaggcatcgaatctgatgattcattatctgcctcagaatccggaattttcggaagaggacacggttttacagagtgttcagaacatggtgcatcaccatgccaatgaaaatgaattgatagcggctaaggcaatgcttacaaggcttggtattacagactttgaacagaagacaagagagctttccggtggacagagaaagcgtcttgcacttgtttccgtgttgattactccatgtgatgtgctcatattggatgagccgacaaaccatttggacagtgagatggcggattggctggaaaataagctgcaagcgttccgtggggccttggttatggtgacgcatgacaggtattttctggattccgtgacaaataaaatcatagagcttgacaaagggaaaatatacagttacgacgaaaaatattcggggtttctgcagcgaaaggcagagcgggaagaaagtgtgcgtgccagtgagagaaaacgtcagagtattttgcgcaaggagattgagtggatttcgcgtggtgccagagctcgttcgacgaaacagaaggcacacatccagcgatacgaagcactgaaaaatcaaaaggcaccggaagttgatgaaaaactccagttaagcagcatttcatcccgtatgggaaaaacgacaatcgaaattgaaaatgtatcaaaagcttatggtgagaatacactcatacgtgatttttcttatatatttctcaaacatgaccggattggttttgttgggaaaaacggctgcggtaagacgacattaatgaaaatgattgccggccggattgagccggataccggcagtattaaagttggacagacgattcggattggttattatacacaggaaatcgaaaaggaagaatccgcgggaattgcttatatggatgcggatgaaaaggtgattgattatattaaaaacacggcagaatttgtgcgcaccagtgatgggctggtctcggcatctgccatgctagagcgctttttgtttccgccttcgcaacagtatagtgccattggtaaattatccggtggtgaaaaacgaaggttaaatcttctccgcgtgctgatggaggcgccaaacgtacttattcttgacgagccgacaaatgatttggatatcgaaacgatgacaattttagaggattatttggatgactttgacggaattgttatcacagtttcacatgaccggtattttttggaccgtattgtaacccgcatttttgcttttgaagagaatggtgcaattcgccagtacgaaggcggttacacagattatgtgaaaaagcgtccggcgagtacggaaaattctttcgacggaaaaactaagagccataccggtaacaaagaggcacggatggcatataaaaaccgtgaaaagaaacttaaattttcttatcaggaacagcgtgaatatgaaacaatcgaaggggatatttctgcattagagacgaccattgaaacacttgatcaagaaatggcggagaatgggacagactatgtcaaacttcgtgagttatctgagaaaaaagatgaagcagaggagcagttgatggagaaaatggaacgctgggagtatttggaggaactggcggaaaagatagcaaatcagtag

SEQ ID NO: 304 - DNA, 1083 bp, Clostridium sp. CAG:62
atgatattaaagtccattgaaatgagtaattttcgtaattatgaaagagaagaatttcattttcatgagggaacgaatgtgttatacggtgataatgcacagggaaaaacgaatgtgctggaagccatttaccttgggggcacgacaaagtcgcacaagggaagcaaagattcggacatgattatgaaaggaaaagacgaagctcatattcgatattatgtagaaaagaagcagtgtacttataaaatcgaaattcacatgcgtcggggaaagacaaagggaattgcgattgacgggctgccgattggaagcagtaaagagttgatgggattatcccacattatcttcttttcgccggaagatttaggaattattaaggatggaccggagcagagacgaagatttatggatatggaattgtgtcagttagataaggcatatctttattatctgacacagtataaaaaaatattaaaacagagaaatgcgttgcttaagcagattcagaaaaacagtgaattaaaagatacgctggaaatctgggataaacaactggtagaaaatgggatccggattatacaaatcagggaacaatttgtagaagaagtagcagccattatgaaacaaaaacatttcaacctgacaggtggtctggaagaaatggaagtaatttataagccaaactgcaaggcagatgattttgccacacgcttatttatagagagtgaaagagatattttacttggtactactaccgtgggacctcatcgtgatgacatgcagttttatattaacggacaggaagtaaaggtttatggttcgcagggacaaaaaagaacttcggctttgtcgctgaagatggcggaaatcgaaattgtagaaaaaacaatcggagaaaagccaattcttttattggatgatgttttgtctgaactggaccgaaatcgtcaaaactatttattggaaaatataaaaggaattcagacgattattacttgtaccggattagaagagtttgtaaaaaatggaataaacattaatcagacatttgaaattgttcaaggaaaaattaatggcaattga

SEQ ID NO: 305 - DNA, 1368 bp, Clostridium sp. CAG:62
ttcacaaagaaaagaggaataaacatggcttggtatgacgaatcagtattttatcatatttaccctttgggattaacgggcgcaccggcgcagaatgattatggcgaggttgtccacaggcttcctaagctgctcccatggattgaccatataaaagaaatcggatgcaatgcaatttacatcggaccgctttttgaatccgtaggacatggctatgaaacaacggattaccgaacactcgacagacgtctcggcgacaatgacgatttaaaagaatttgtccgtacatgtcacgaaaaaggagtgcggattatctttgacggtgttttcaatcacacaggaagagatttttttgctttcaaagacctgcagaaaaaccgtgagaattcacaatacaaagactggtactgcaatgtgaattttggtggaaataatgaatacaacgatggattttcctatgataactggggcggttataatctgttagtaaaactgaaccagtggaatccacaggtaaaagattatatttacgatgtaatccgcttctgggtttctgaatttgacattgatggcatccggcttgacgcagcagatgttcttgattttgattttatgaagggaatgcgtcaggttgccaatgaagtaaaaccggatttctggctgatgggcgaagtcattcatggcgaatatacacgctgggttaattcggaaactttgcattctgtaaccaattataacctgaataaagctctttggtccggctgcaacgagcataacttttttgaaattgcacacacagtaaagcgtctttatgacatgggtggatgccattaccggaacttggaattgtacagtttcgccgacaaccatgatgttgagcgaattgcaagtaagataataaacaaagaccatctcggcgtaatctacactttgatgtacacacttccggggattccgtctatttactacggctccgaattcggtatcgaaggaaaaaaagaacaaggttccgatgcttcactccgaccacacttagaacttagtgactatgccgatgcaatgactgacaatccgctgactgcgctgattgccaaactcggttctatccatcaagcgcaaaaagcattgtgttatggtgaatacaaagaacttcttcttacgaaccgccaatatgcttttgcacgctgttatgaaaatgaagacgtgattacagccgtcaataacgatgagcagtcgacaactctccatattccgtatcagggaccaaaaacacagtttaaaggtgcactatccggcaaagattatatggtgcagaatggttcaattgaaattacactggatgcatgtggcggcgatattcttatttag

SEQ ID NO: 306 - DNA, 1149 bp, Clostridium sp. CAG:62
atgaaagactttttgaaaaataaacagaaatggattgtaggcctggtgattttggggctgatgtttgttgccggcggctttggtgtggcctcttatttatatggaaatcgatgttaccgtggctatgaagtgaaaaacaaagtaaaccgcagcgacagtaacaatgtgaattaccgatatcataatggaaatattttaaaatacagccgcagtggtattagtgagattaataacgaagggaaaagtttgtggaatggcggttatgaaatgaagcagccacaggtggacgtgtgtggcgattatgtgtcggttgctgatgtgagcgggaaacagtgttatatttataatggaaaagatgaaggcgttaccgttgagacaagccttccgattgtgcgcgcaaaagtggcaagacagggcgttgttgcgattcttctgcaggataaggattccaatgttttaaacatttataatccgtacagcaatgcagagagtttattggtggaaattccaaccaatgtttcggaggaaggatatccgcttgattttgatatttcaccggatgggaaaagtgttgtcacttcttatatgatagcaggcagcagtgattttgaaacgaaagtcagcttttacaattttacggaagttggacaggacaaaaatacattggtaggcggaaagtcattcggaaacaagatgattgccgatgttgaattcgtgtcggatgatgaagtgctggttgcccacgaaaaggggtattctatttttggacagatgaaacagccggaagttgttacggaaaaaacattttcagattcaattaaaagccttgctgtgggagatgatgcgttagcttttgtcctgcaaaaagagggaaatgcaaaaaaacaaacattaaatttgtataatttgtccggcagggaaaaaatgcagcaggacatttcttatgaatatgcagatatggaaatgtacggagatgaaattatttttacgggaaaccgttcctgcaatattttgagaaccaatggacatgacaaatttgattatcattttgagcaggagattgatgcggtgtatccgacatcagacggacaggtttatacactgattgattcatcgacgatacagaaaatacgattgcagacgaaatga

SEQ ID NO: 307 - DNA, 1473 bp, Clostridium sp. CAG:62
atgattttgtgtcaaaaagaaagggggagaaggatattgaagaaagtattatttgttgcttctgaatgtgttccttttataaaaaccggtggattggcagacgttgtcggttcacttccaaagtattttgataagagtaaatatgatgtacgggttatgattccaaaatacactgcgataccggaagagtataaaaaccagatgcattatatcacgcatttttatctggaacttgcatggcgcaagcagtatgtcggtgtgtttgaaatggaattaaacggtgttaaattctattttcttgataatgaattttattttagcggcagcaagccttatggagaaatttatcaggatattgaaaaatttgccttttttgataaagcggcgttatcaacgctgccagtgattgatttccgcccggatattattcactgccacgactggcagacggggctgattccggtatatctgcatgatgcatttcagcagggcgaattttaccgtggaattcagtcaattatgacgatacataacttgaaatttcagggggtctgggataaaaagacagttatggatacggcagggctggatgcatactattttacacctgataaattggaagcctttggggatgccaattatctaaagggcggtcttgtttacgcagatcagattacgaccgtaagtgatacctatgcagaagagattaagacgccgttttacggagaaaaattagacggtctgattaatgcgaagtcagggtgtttgaccggaattgtgaatggccttgactacgatgagtataatccggcaaaggatccgcttatttatgcaaattatgatgcaagaacatttcgcaaagaaaaaattaaaaataagcgcggccttcagaaagaacttggtctttctcaggatgataagaagttcatgattggtattgtgtcgagactgaccgatcaaaaggggtttgatttgattgactatgtgattgaggaaatctgtgcagaagatacgcagcttgtggtacttggtaccggagaagaaaagtacgaaaatctgttccgtcattttgcatggaaatatccggaccgcgtatccgcgaatatttattattccaatgagcgttcgcacaaaatttatgcggcatgtgatgcctttttgatgccatcgctctttgagccgtgtggattaagccagctgatgagtcttcgatatggtacggttccgattgtaagggagaccggcggactcaaagataccgtagagccttataatgaatatgagagcaaaggaaccggtttttcattcagcaattacaatgcgcatgagatgctcaataccattcgctatgcaaaagatgtctattataatagaaagagagagtggaataagattatcgaccgcggcatggcaatggatttttcatggaagaattcagcgaaaaaatatgagcagttgtatgacagaatgtaa

SEQ ID NO: 308 - DNA, 1620 bp, Clostridium sp. CAG:62
atggagattaaaatggctgtaaagtacgtttttgtaactggcggtgttgtttccggtttaggaaaaggaattactgccgcttctttaggtcgattgttgaaaatgcgtggctacaaagtaaccatgcagaaatttgacccgtatatcaatattgacccgggtacgatgaatccaattcagcatggtgaagtattcgtcaccgatgacggtgcggaaaccgatttggacttgggacattatgagcgtttcattgacgaaagtctcaccaaacagagtaatgtcacaaccggtaaagtttactggtcggttctttccaaagagcgccgtggtgattacggtggtggaaccgtacaggtaatccctcatattacaaatgaattgaaaagccgtttttaccgcaacgatggtgtaaaagaaacgcagattgccatcattgaagtcggaggtacggttggtgatattgagagccagccatttttagaggcaattcgtcagttccagttagacgtcggacatgaaaatgcgattttgattcacgttacattagttccttatttgaaggcatcacaggaattgaaatccaaaccaacacaggcaagtgtaaaagaacttcaaggtatgggaatccagccggatatcgttgtatgccgtactgagattcctctcgataaagcaatccgcgacaaaatttctttgttctgtaatgtaccaaacagtcaggttatccagaacttagatgtggaaacactttatgaagtacctcttgccatggagaaggaaaaccttgcacagactgtctgcaaatgtcttcacttggattgtccggaaccggatatcaagggctgggaagatatggtaaattctattaagaacttaaacaaagaagtaaccgttgccctcgtcggcaaatatactgctttgcatgatgcttatatcagtgttgttgaatccttaaagcacggtggtttcgcccacaatgcacaggtcaacatcaaatgggtaaattcagaagatgtaactcctgaaaatgtcgctgattttttaggcgatgtaagcggtgttttagtaccgggtggttttggtgaccgcggtattgatggtaaaatttatgctatccagtatgcacgcgaaaataacattccattccttggcctctgcctcggtatgcagttatccatcgtagaatttgcacgtaatgttgtcggctggaatgacgctcacagtgcagaattagacccatctacaacgcatccggtaatccacctgatgccagaccagaatggtgttgaggatatcggcggtaccttacgtcttggttcctacccttgtgtactcgccaaagacagtaaagcgtatgcgctgtacggcgaagaaacaattcatgaaagacaccgtcaccgctatgaggtaaataactactatcgtgatgacttagagaaaaacggcatgaaactttccggactttcaccggatggacgaatcgttgaaatgttagagattccggaacatccttggttcgttgccacacaggctcatccggagtttaaatcccgtccaaaccatccacatccgttatttaaaggatttgttggtgcagcaattgaatatcaggataagtaa

SEQ ID NO: 309 - DNA, 1908 bp, Clostridium sp. CAG:62
atgagaaggagagattcgatgaaccggaaagtcttttacaccattttgggaatgacaattttatgtggactggttttttttcgcagcggtaattcactggcggcaaaccagacgggaattgtgacggcatcgtcattgaatgtacgcacgggggcaggtacttcctatgatattttacagtataacaatgccaatgttttgttggcgaaagaagataaagtgactattttggagaaattgtcaggctggtatcaggttagttttgtaaaggataacacgactttgacaggctttgtcagttccaattatattgcgattgaacaggcgtcgactgcggtacctgcaccgacagtaacaccggcatctacatcagaaccaacgattacctatcgctatgagacatcctaccagccggtttcagtgggtgcaaaggtgctgaaaaaatccaagctttacaaagcaaatggaaagagtgtttataaggttggcaggaaaaaaatgtcgcttgcaaagggaaagaaaataaaagtaattggtgaaaagacgctgaaagggaaaaaatggttccatgtttcttttacatataaaaagaaaaaaagaaaggcatatctgcagaataaatatgtgaaactgacggcgggaaaaggtatatatgcacagattttcaatgtgaaaaaggcggcgaatatccgtaaaaagaaaggaaccggttcagcatataaaaaggtaggcgggaaaaaagtatccattgccaagaaagcggcagttacgattgtaagtgatgtggcagtaaagagtaccagatggtataaactgcgttttaactacaagggaaagacctataccggatattccaatgcgaaatatgtaaaacttgcaaagaaaccggtgacgaaaaaagttgcggtagttgccatgagcgatgcgcagtttgagcaggcaatgaaaaacgaaggatttccggaatcgtataaacagagtttacgtgcacttcattcggcatatccgtattggcagtttaaagcctataaaaccggtcttgactggaatacggctgtaacggaggaatcgaaaacgggtgtgaacctgatttccaatgagagagcaaaggcatggaagtcaaccgaaaaagatgcatacgatgcatctaccggcaagtggaaggtatttgacggaagcacatgggttgctgcatcgaaagctgcggtggcatattttatggatcccagaaactatttaaatgatcgaagtatttacatgtttgagttactggaatatcagtcgcagtaccagacaaaatccggtgtcaatacaattttgtccaacacaccattttacaacaagaagttttcctatacggatgtcaacaccggtgcggcgaaaacgatgtattatgtgactgcattcatggaggcagcgaagattagcaaggcaagtccttatcatctggctagccgtgtcaaacaggaagtcgtgacaagtgcgacaacaacgagtacggcagttaccggtacggtatcttcctatccgggaatttataatttttataatattggtgcgactagcagcagtacaccggtgttaaacggactgaagtgggcgagtaataaaaaggcgggtacctatttaagaccttggaccgacccataccgttcgattgtcggcggcgcgcagtacataagttccggctatattgccaaggggcaaaatacgtgttatcttgaaaaatttaacgtgacaagttataaacgctattcccatcagtacatgacaaatgtggaagcggcgtatgaagaatcgattaagacgaaaaaggcatatgccggtatgatggacaaatctccattggtattttcaattccggtttatgaaaatatgccggcggcaaacagcccaatgcccaaataa

SEQ ID NO: 310 - DNA, 1362 bp, Clostridium sp. CAG:62
atgatggaactgggagaaaagttaaatggcaaatttgaaaatctggtgaattactgtatggtgtccggtgccattaaccaggatttgtataacgaatatgatgtgaagaggggacttcgcgattcgaatggtaaaggagtacttaccggattgacagagatttcagatgtctgtggataccgcttgaaaaacggcaaaaagattccttgcgacggagaactttattatcagggatataatgtaatggaccttgtaaaaagttttgaaaaccgccgattcgctttcgaggagacaacctatttgctgatgtttggcgaactgccgacacatactcagttaaaggattttgaagaggtattaaccagtcttcaggagctttccggtcagtttgtccgtgatgtgattatgaaagcaccaagtgcaaacattatgaatgcactgcagaaaagtgtgctgacactgtattcgtatgatgagaatccggacgacatttccgtggcaaatgtactgcgccagtctttgcagttaatcggcaaaattccgttgattgcggtgtatgcgtatttgtcataccgtcattttggatttgatgataatttatacatccgtacgccggataaggatttgtcaattgcagaaaatattttgcagatggtaagacaggacggtaaatttacggagttagaggcgaaagttttagatattgcacttgtcattcatgcagagcatggcggcggtaataactcgacgtttaccaatcatgtggtaacgtcctccggcacagacacatattctgcgatttcagcatccattgcttcgctgaagggaccgcgtcatggtggcgccaacttaaaagtgttgcagatgtttgatgatattaaagaacactgcaaggactggaataatgaagagcagattaaagaatatttgaataaaattctgaatcgcgaggcctttgatgaatccggtctgatttatggaatgggacatgcggtttatacattgtctgaccctcgtgccgtgattttgaaacgctatgcaaaaaaactggcggaggcaaaaggtaaaatggatgaatttcatctgtatgaaacagtggaagaagtgtccaaagatttgattatgaaagcacatttgcgtaataaaccggtttgtgcaaatgttgatttttacagtggttttgtatatactatgcttggtattccgagagaattatttactccgatttttgcgattgcccgtatttccggatggagtgcacatcgtctggaagagctggtaaacaagggtaaaattattcgaccggcgtacaaatacgtaggaagtcatgtggatttccgtgaaatagacgagagagaataa

SEQ ID NO: 311 - DNA, 2223 bp, Clostridium sp. CAG:62
atgcttaacaaccgaaaaaaaacgataggtgtatttgtttgcaagcttccagaatatttccagcgcaccctgtgtggtgcgctggctgatgaagcggtggcaaatggatacaatttggttgttttttcgacttttggtgaatacgataacaatcatgattatgtggaaggagaaagcaattgtctttatattccaaattatgacgaattggatgggattattttatgccttgatgtgtttgatattcctagcatggtaggaaaattaattgagcaggtaaaggaaaaggcgcattgccctgtgattagcattcgacaaaaaagagatgagtttattagtgtgctcagcgatgataaaaaggctattatggctatggttgatcatttggtagatgaacataacgcaaagcggatttattacttgtctggtccctcttacatgcatgatatacgtatgagggaggacggatttcgcgaaagaatgaaaagcagaggtgttgcctttcgtgaggaatacatctttaagggaaatttgtggtataacatcggtaaagaagcagttgattattttttttcactggatgatgaaagacctgatgcaattctatgtgccaatgattatatggcaatttctgtatgtgaggaactgtgcgatcgaggattccgtgtaccggaggatattattgtgacgggatttgatgatgttgaggaggctagagatacatatccaatgttgacaacagttgaagcttgcccagaaaattttgcgagatgtgctatggaaattattaaaaaggcggaacgaggtgaaaaactagaaaagcaatattatatttcaacgcaaaatcagtatcgaaattcctgtggatgtaaagaagcggaagaagcgaaacaaattttttgtaaacaatttgaaaaaaatcagcgtatggttcacttgtataagcagaatatgtttatggtttttcggatggaaggaatacgagattatcagggcattccggatttagttggaaagtttgtagaaggaaacacgggtgtttcagacttttatatatgcctaaatccggatgagaaatatgaattggatgattctagaaaaagtccatatgaggatgagatggaaatgttattacatgcctattatggaaagaaaatgtcaattgaagtgccgatgccacaaaaactttttaaaagaaaaaatcttttgcctgccgacgaagtgacggacaggccttgtgttttttatatcaacccgcttcattatcaaaagcattgttttggttatgcaatcatttcgttttttaataatcgattttatgcggcagaagatttttatcaatcttttgtgataaacatttgcaccgtgttagaaaatatttatatacaaaatcaaattgaacagttaagcaacgataaaatacgtcttattcgacgagattcggttacacatatgtataatccgtatgggtttcatgaaatggctacacaaatgctacatgatgcgacagtagcaggagttaattgtgtctttttctatgtaagattagacaatttacaggaaataacagaaatatatggaaaaaaagaatcaaatgaaatccttctgtgtatgaagtctgtttttaaaaattttgagcaggaaaaacatgtgttaggacgattgggaggaagtgatttttgcctattactagaggataaaatgcaggaagaaatagaagttcttgcacaaaattttgttaatgaagtaaatgaagtgaatatttcatggaataaagaatttttcatagaagtacgctatggatggtttgttaaggaagtgggaactatttctagtacagacgagtgcattcgcagtgcgaaaatgaaaatgaaagttggtgcacaaatgcagacgagtgctgcaaaatatgcttttgaggtaatgaacgaaatcagacagaattatcaaaaagaaatttctgttacatacatggcaaaacgaattggtgtatcgcgtacgcacttgtcccattgctttaaattaatatatcagaagtcaatacaagattatattacttcttatcgaatggaaaaggcgcaggaacttctgattcatactcagaaaaagattaaagagattgcttttttggttggctataaagatgagttgtacttttcgaaagtgtttgcccgtctgtatggtatgtctcccagtaaatatcgtaaaacaatgttgacatga

SEQ ID NO: 312 - DNA, 1764 bp, Clostridium sp. CAG:62
atgattgtcgtgcaaaaggggacttttgcatttgaaaatgatttgagaaaaaggagttgtaagaacatgagaggacctgcagcaccgaaggatccggttgaaaaaagaccatgtttatatgttgttttagataagacgatttccggttcgaaagacccggagggcgtaattcgtgattatgtgtacttagagggaagattaaaagatcaggtaaaatttacatcaggagatattgatgaagaattgctggatatgctcccaaggatggagacattccgcaaactggttcacagtgttggtgtcagcatcaaggcggaagacccggcagataaagaaaagaaagtcgagtttcagttccagtgttatggaaaaactgataaatacacgacaggaactgtgatggaagcgacaattccatgtacgggagaagaaatggttcttccggtagaggcctacccggtaaatgaggatgatgactgctttggctcctttaattttattttcccggaagagaataaaaatatggatttgacagtcaaattttatgtaaatgatggctatgaagtgccggaaattcaagttgatccgccggttaattttgattcgccggagtatcaggatatgattgaaaactcgcttgtgtcgacaggaaacaattatcgtttgaaaaatgtgattgaaaaatgtaaacgtggcgaggatgtgacgattgcttatattggaggttcgattacacagggagccggcggaaagccaatcaacacgatgtgttatgcttaccgttcttatgacgcattttgcaagctgttttcaccttgcgatggaaaaaatgtgcactatgtaaaggccggtgtcggtggaactccatccgaacttggtatggtgcgttatgatttggatgttacaaaaaatggagagattacgccggatttggtagtggttgaatttgcggtaaatgacgagggtgatgagacacagggtgtcagttttgagagtcttgtgatgaaaattcttcaggctgaaaatgcaccggcagtgttattgaattttgcagtatttatgaatgactggaatctgcaaaagcgattgcagccaatcggtgagcgctatgaactgccgatggttagtgtaaaagatgctgttgttccgcagtttgaaaaaagtcatgtaattacgaagagacagttcttctatgatatttatcatccaacgaatgacggacaccgtattatggcagactgcattgcaaatttgtttgaaaaggtagacaaagaggagatggcagagcaggatatttctcttgacaaagagccggtttatggcgcacaatttaaggatttgattcgctttgaccgcgcaaatgcagaagattttgcagtgattgaacagaatgggtatgatgcaaaagatacagatatccagtatgtagagcgtgatatggatttgaatggttcaccggagtttgctgacaactggatgaatgacggttctgtaacaggggcagaatttaggatgacgattacttgtaaaaatttagtggcggttatcaaagattccggttcgtccgaatttggtacggctgatattttagttgatggcaatgtggtaaaacagattaacccactcgataatggatgggcacactgcaatccgcagattttaattgatgaaaaagaaagcaaaaaacacgaagttgtattccgcatgaaggaaggcgacgaggcgaagaaatttacaatacttggttttggagtgacacggtaa

SEQ ID NO: 313 - DNA, 1098 bp, Clostridium sp. CAG:62
atgaacgcatatctgatactggaagacggaactgtgtttaccggaaaaagcataggcagtaaaaaagaagtcattagcgaaattgtttttaatacgtcaatgacaggatatcttgaagtgctcacggacccaagttatgccggacaggcagtagtaatgacctatccgttaattggtaattatggtatttgtaatcaagacaaagaggcgaaaaagtcaaataccgatgcttttattgtaagagaactggcaagacttggaagcaacttcagaaaagaagaaagtattcagcagtttcttgtagagcaggacattccgggaattgaaggaattgatacaagagccctcaccaaacgactcagagaaaaaggaacaatgaatggcatgattaccacagaaaaacctgaggatttatctgccgttcttgaaaaaattaaaaaatattccgttcgcggtgtagttgacaaagtaactacaaaggaaattgtttcctataaaccgggcgatttagataccgatagcaacatttctattacaaagaaggttgctattcttgacgttggaacgaaatttaacattgccagatgtttgttgaaacgtggctgtgaagttacaatttacccggcaaaaacgaaagcagaaacgattcttgcttcccatccggacggcattatgctgacgaatggaccgggggatccgaaagaatgcacagaagtcattgaagagttgaaaaaactgtatgcatcggatattccgatttttgcaatttgcttgggacaccagttaatggcacttgcctgtggctgtgacacggagaaaatgaagtatggccaccgcggagcaaatcatccggtcaaggacttaaaaaccggacgtgtatacatttcttcccagaaccatggctacatggtaaaggaatcttcggtgccaaaagagattgccgaggttgcctttgtaaatgtcaacgatggcacagttgaaggacttcgttatttacagaaaaatatcttcacggttcagtttcatccggaagcttgtgccggaccgaaggattcggaagttttgtttgatgaatttatcaagatgatggaagagtaa

SEQ ID NO: 314 - DNA, 1161 bp, Clostridium sp. CAG:62
atacaaaatgttttcagaaagaaggaaatgaaaatgaaacagtttaatcgtacttatgcagaggttaatttagatgccatccggcataatatcgatgaggtacataaaaatataaaagaaggaacaaaggtaatggcaattgtgaaggcaaatgcttatgggcatggtgccgtacaggttgcgaaggcattatatgatcaggtagatgcttacggagttgccatgatagaggaagccatagaacttcgaaaagcaggaattgataaactgattttgattttaggatataccggagaagaatcctatgaggatttggtgcaatatcagatttcccagactgtgtatacgtgggaaatggcagagcagttaagtgagacagcattaaaacttggaaaaaaagcaaagattcatataaaagttgataccggaatgagccggattggttttatcccttgtgaagaatctttggatacggtagaaaaaatttcgaaactgccgggactggaagttgaaggaatctttacgcattttgccagagctgacgagaaaaccattgagccggcgagagaaccttttagaaaatatatagcttttgtcgaagaattagagaaacgcggtgttaagattccaattcaccatgtgtcaaatagtgcttcaattattggattttcggaagctaaccttgatatggtgcgttccggtattacgacttacggactgtatccgtctgatgaagtggcaaaggatgttcttatattggaacctgccatgcagtggaaatcgattatttcttatataaaaaccgtagagccgggaacgagtatcagttacggtggtacatttacggcgaaggaaaaaatgacggtcgctacgattccggttggttatgccgatggcatgaaacgtgatttgtcaggcaaaggacgtgttttgattcatggacagtatgcaccgattttaggaagaatctgtatggaccagtttatggtggatgtgtctcatatcaaagaagctgcaatcggggatacggtaacaatttttggaaaagatggagaaaaaaatatccccgttgaggagattgcagaaaaatcacattcatttaattatgagtttgtatgcagtattacaaaccgtgtgcctagaaaatatttaggagaataa

SEQ ID NO: 315 - DNA, 2193 bp, Clostridium sp. CAG:62
atgtcgttaggttttaacccaagtaaaaaggattatattaggagcagagaaatgaatattgcaaaacaaatagcagaagaactgaaaattaaagtatggcaggttgaagcagtgatggaattgattgacgaaggctgtacaattccgtttattgcccgataccggaaagaaaaacatggttcgttaaatgatgagcagctgcgtaatctggatgagagattaacgtacttgcgtaatttggaagaaagaaaagagaccgtacttgccagcattgaggagcaggggaaattaaccgaagaactcaagcagcagattctggcggcacagacccaggtgcttttggaagatttgtaccgtccgtatcgtccgaaacgacgcacacgtgctacgattgcaaaagaaaaagggttggaaggactggcaaatcagattcttttgcagctgttaggccattccgtggaagaagaagcaaaacagtatctggatgaggaaaaagaagttacgacagtggagcaggcaatttccggagcgctggatattttggcggaggcaattgcggacgaagccgattacagaactgcaattcgtaagacaacaatgcagaaaggctcattggtttctacggcaaaaaatgcagaagagaaaacggtttacgaaaattattatgacttttctacggtgctttccaaggtgtccggatatcagaccctcgcaattaaccgcggtgagaaagaaaaaattctgaccgtaaaaattgaggcgcctgaggatgatattctgcggtatttgcgaaaaaaagttattgtgaaggaaaatgaatatacaacaccgtatctggaagagatgattgcggacagttataagcgtttgattgcgccggcaatcgaaagagaaatccggaatgagttaacggagacggcagaagatggggcaattcgcgtgtttggtaaaaacttggagcagcttttgatgcagccgccaattgccggcaaagtggtacttggctgggatccggcatttcgtaccggctgtaagttggcggtcgtggatgagacgggaaaggtgcttgataccatagtggtatttccaacggagccgcagaataaagtggcagagaccaaacgtattgtaaaggccatgattgaaaagtataacatcagcctgatttcggttggaaatggaacggcgtccagagaatctgaacttgttattgtagatatgttaaaggaattgaatcgtccggttcaatacattattaccaatgaggcaggagcatcggtttattcagcgagcaagctggcaacagaggaatttccgaattttgacgtggggcagagaagtgctgtttcgattgcaagacgactgcaggacccgctggcagaacttgtaaaaattgacccgaagagtatcggagtggggcagtatcagcacgatatgaaccagaaaaaactgagtgaggcactgggaaatgttgtagaagactgcgtaaataatgttggtgttgatttgaatacggcatcggcgtcattgcttgaatatgtatccggtgtatccaaagcaattgctaaaaacattgtaaattaccgtgaggaaaatggccggtttaagagtcgtagagaacttttaaaagtggctaaattaggaccgaaagcttatgaacagtgtgctggatttttgcgcattaccggtggcaaaaatccgctggatgcaacgagtgtgcacccggaatcttatgaggcagcaacaaagttactggaaatgcttggataccagttagaggatatagccggggggcttaccggtttgtcattgatggcaaaagatacaaaaaaactggcagagcaggttggcattggcgagattacgttgaaagatattattcgcgaattggagaagcccggacgcgacccgcgtgatgagatgccaaaaccgattttgcgcagtgacgtattagaaatgaaagatttaaaagagggcatgattttgaaaggaaccgtgcgtaatgttatcgactttggagcctttgtagacattggtgtgcatcaggacggacttgttcacatttctaaactgacggataaaaaatttgttaaacatccgctggatgttgtttctgttggagatgtagtagatgttaaagtattacaggtggatatgcagaagaagcggattcagctgtcaatgatattgtaa

SEQ ID NO: 316 - DNA, 1158 bp, Clostridium sp. CAG:62
atgagaaacccattgtctaaaatggtagcggagatggaaccatctggaatccgccggttttttgatgtggcaagcacgatggataatgtcatatcgcttggcgtaggagagccggattttgatacaccgtggcacattcgcgaggagggtatttactcgctagaaaaggggcgcacgttttatacatccaatgcagggcttttgcctctgcgcaaagaagtatgcacttatttgaaacgccgttttgcactttcatatgattcggatgaggtgattattacggtcggcggcagtgaggcaattgatattgctttccgcacgatgcttgatccgggggacgaggttatcgttccggagccttgttttgtgtcttatgtgccatgtattacaatggcaggaggcgtgccggtaagacttgcattagaagaaaaggatgaatttaaactgacaaaagaaaaattgttgtcagcgataacggataaaacaaagatggttgttctgccatttccaaacaacccgaccggtgcgattatgacgcacgaggaattacagattgttgcggatgtaattaaggaacacgatttatttgttctgtccgatgaaatttattcggaattaagctatcagggcgaccatgtgtcgattgcggcaattcctgggatgaaggaaagaagtgttgtaattaacggattttcgaaatcctatgcgatgaccgggtggcgtcttggctatgcggtcggaccaaaagaaattataaaacagatgataaaggtacatcaatatcttattatgagtgcaccgacaacgagtcagtatgcagcgattgaagcattgcgaaatggcgatgaagatgtggcgaaaatgcgtgagagttacgatgaaagacgccgctttttagtgaaagagctgcgtgaaatgggcatgccgtgttttgaaccgatgggggcattttatgtattcccaaacatcagccgttttggcatgacgagcgaggagtttgctaaaacacttctcgaaaaagaacatgttgcggtagtgccagggtctgcgtttggcacatgcggggaaggttttttacgaatttcctatgcatattccattgaagacttaaagaaggcactggttaaaattcagaattttatagacactatttcgtaa

SEQ ID NO: 317 - DNA, 1557 bp, Clostridium sp. CAG:62
gtgattatcttgaagcgttccatgaaaacaagactggtagcgatttttgtcgttaccattgtcattattatcggtgttatcagtcttgcaaacgttgtgcttttgccatatttttatcagtccaataaggtaagccagatgcagggcgtttattcgcgtgttatcaatatttgtgaaaatgtggattggaataagatggacagcgagcaaaaagatacaatttatgataagttagaccagctttcgagcaataccaacatgagcatttatcttgtgcagattcgggtttaccaagggtctggtgatatcgcggaattagcgtatgtatatccgagtgacagtgagcgtttgcaacaggtaacaaaaaaccaacttgataagtacgtaaaatcaatttattttgggcaaaagctagacgataactgtaaaatgattacacagacagcaaattattcgatgtataatgtgtatgatacgagagtagattctaattttttggaactcacaggaaagatgcccgataattactggatttatctgcgcagtaattatcagagtatacaggaaagtgccagtgtatcgaatcagtttatgctgtatgtcggaatgattgtgatgattgccggcgtgtttattatgtattttgtcagcaatcaatatacgaagccgattctgcgcctggcaactcatgcaaaaaacatgcagaaacttgacttttcaactcgttataaagataaccgtgatgatgaaatcggagtgcttggcaacagtatgaatgctttgtcagaccgcttggagaaaaccatttccgaattaaagacagcgaataatgaattgcagctggatttacagaggcgttcggagcaggagcagatgcggcaggaatttttggcgaatgtttcgcatgaactgaagacgccgattgctttgattcagggatatgcagaaggattgcaggaaaatattaatgatgatgcagaaagccgtgaattttactgtgaagtcattgtggacgaggctgacaagatgaacaagatggtaaaaaaactactgagtttaaatcagttagagtttggaaatgaccaggttcattttgaacattttgacttgcgaagtgtaattcagtcgatagtaaattcctctgatattttgttccgtcagaaagaagttacgttgtcataccatccggatgaggaaccaattatggtctgggcagatgagtatatgattgaggaggttgtcagcaattatgtgagcaatgcacttaatcatgtgaaatacgagaataaaattgaaattaagacgattcggaaaggtgaccgtgtatgcaccagcgtattcaataccggagatccgattccggaggaagatatggataaaatctggtcgaaattttacaaagtggacaaggcaaggacaagagaatatggtggcaatggaattggtttatctatcgtaaaagccgttatggatgcccataatcagaagtttggtgtgaaaaattatgacaatggtgtcgaattttggtttgaacttgacgtgaaaagtgttgattga

SEQ ID NO: 318 - DNA, 894 bp, Clostridium sp. CAG:62
atggaggtaattacgatgcaattaacagaacaggaaaccaacgtaatcaaagatttacagacacaggagaaagcatgtgttgacaaataccgcttttatgagcagtctgcccatgacgaagaactaaaaaacttatttcaccgcattggtgatgaggagcaggaacattttgactccttaggcatggtgctcaagggtgatgtaccaaatgtaagtgccgcccgcagcggtatggagggatacacgccttccgaaagttacgcagcaggtaacaactccgaagagaaaaaacatgaccaatttttatgtaccgattgtattgcaacagaaaaactcgtttcatccacctataatgatgatgttttccgtttttctgccagcaatatccgaagactcttaaatcacatccagacagaagaacaaaatcacgcagagatgatttataaatacaaaacggcaaacaatatggcatatcctgtcatagtttcccctcgctgcgcatacaatgatacaagggtaccaaagtccaaactcgttcatgcttgcatgataagaggttggaccttggtacccgccaaacatgagaaagtagcgatttatgcaataaatccgcggatttcgaatgtttgcaggattgtgaaagttgtgaaacaacggagcaatccgtatcattgtttgcaattcagcaaggaggaatattatgatacaaattttcaaaagaaacaagaaaatcacaaaactatttttgttactgttttttttatgctgcactgcttttcttcttattttttacatagaatcggacaagcccataacaaagaaaaagcaaacggcatcaaaaacaactgcggacaaaccaacatccatttcttattgtgtgacttctcttcctga

SEQ ID NO: 319 - DNA, 1326 bp, Clostridium sp. CAG:62
actcaccggcgagaaattaaagtaattcccactacatcatttggaggaattttcaccatggaaaagaaaacaattttaactttggatcaggttaaggaaattgaaaaaacttatccgactccatttcatatttatgacgaaaaaggaatccgcgaaaatgcccgtgctttgaaaaaggcattttcatggaacaagggttatcgcgaatatttcgcagtaaaagcaacaccaaacccatttatccttaaaattttacaggaagaaggctgcggagttgactgctcttctctgaccgaattaatgctttcagaatcccttggatttcatgataatgacatcatgttttcctcaaatgtgacaccacttgctgagtatgaaaaagcaagtaaactcggtgcttacatcaatctagacgattttacccacattgactttttagcagaaaatgttgggattccggaaaccatctgctgtcgttataatccgggtggcgtatttgaactcggtacagacatcatggacaaccccggagatgccaaatacggcttcaccaaagagcagataattgagggctacaaaaaattaatgaaactgggtgctaaaaactttggtattcatgctttcattgccagtaacaccgtaagcaacgaatactatccgacacttgccggcatcctgtttgaactcgcagtagaattgaaagagaaaacaggtgccaatattacatttatcaacttgagcggtggtattggtattccatatacaccggacaaagaaccaaacgacattgcggtaatcggtgaaggtgtccgcaaacagtttgagaaaattctggtaccggcaggacttggtgatgtatctatctttactgaacttggccgcttcatgcttggaccttatggcaatctcgtaacaaaatgcattcatcagaaacatatttacaaagaatatgttggtttgaacacttgtgcctgtgatttgatgcgtccggctatgtacggtgcttatcatcatatcaccgtcctcggcaaagaaaatgcaccatgtgaccacaaatacgatgtcaccggttctctttgcgagaacaatgataaatttgccgtagaccgtatgcttccaaagattgacatcggagattatctggttatccacgataccggtgctcatggatatgctatgggttataactacaacggtaaactgaaatcgccggagcttcttctcaaagaagatggcagcgtgcagatgattcgccgcggagaaactccacaggattattttgcaacctttgacttctgtgatattttaaaagatatgaaatactaa

SEQ ID NO: 320 - DNA, 1065 bp, Clostridium sp. CAG:62
atgaaacgaattattttgacgggcggcggcaccgccggacatgtaacgccgaatatcgcgttgattccggagcttaaaaaaagaggatttgagattcattacattggttccaaaacaggaattgaaaaagaattgattggaaactttgatattccgtactatggaatttcttccggtaaactgcgccgctattttgacgtaaaaaactttacggacccattccgtattttgaagggatattcagaggcaaagaaactgattaagaaaatcaaaccggatgttatcttttcaaagggcggttttgtaacggtgccggttgtaaaagcagcgagcagacaaaaagttccatgtgtgctgcatgaatccgatatttcaccgggacttgccaatcgtctctgtattccgtccgctacggcaatttgtgcaaactttccggaaacgattgccaatctgccggaggataaagcatatctgacaggaacgccaatccgaagcgagctgttttccggaaaccgtctcaaaggactggatttttgtggatttacggcaaacaaaccggttattcttgtaattggcggaagtcttggctccgttcgtgtgaatgaggcagtccgggagattttgccaaagttattagaaaaatatcaggtcattcatctgtgtggaaaagacaaagtggacgaatcactgaaacagacagaaggctatgtgcagtttgagtatattcagaaagaattgtgcgatttgctggatgcagcagatttggtgatttcgcgtgccggcgcaaatgcaatttgtgaattgctggcccttcataaaccgaacattctgattccgctgtcgttggaagcaagccgcggtgaccagattttgaatgcggcttcttttgaaaaacagggctttagctatgtgattaaagaagaagaattaacgagcgaaaaattgttggcagccattacatcggttgatgagaataaggaaacttataaacaggcaatgagtcaaagcaatcagcaggatgctgttgtgaaagttgcagatattattgaaaaagcttgtaaataa

SEQ ID NO: 321 - DNA, 1686 bp, Clostridium sp. CAG:62
atgcgatatgatatagatagtttttgtattttgaaatggaggataaagggaatgccaattacagagttattggaggcaaatgccaaaaaatatccgaacgaagtgagtcttgtagagattaatccggatattcaggagaaaagaagagtaacatggagggattatgaattaatcgagtcaagtccgatgtgtcattaccgcagggaaattacatggcatgtatttgacgaaaaagccaatcgatttgcacagcttttaatcagcagagggattggaaaaggggacaaagtggcgattttattgatgaactgcttggaatggcttccgatttattttggtatattaaagaccggagcactggcggtgccgcttaatttccgctatgcaccggatgaaattgaatattgtttgaatctggcggaggtagatgttttagtgtttggtccggaatttatcggccgtgtggaagaaattgccgataaaatcagtcagaaccgtcttttgttttatgtgggaggcgactgcccgtcctttgcggaagattatgataaactgacggcaaactgtgcaagtttagcaccgggaatcccaatttctgacgaagatgatgcggcaatttatttttcttccggaacaaccggatttccgaaagcaattttacataatcatgaaagtttgatgcatgcctgtaaagtcgagcagaagcatcacggacagacacatgacgatgtgttcttatgtattcctccgctgtatcataccggagcgaagatgcactggtttggcagtcttttgacaggaagcaaggcagtgcttttgaagggggtaagcccgaaaacaattttggagacggtctccaatgagaaatgtacaattgtctggcttttggttccttgggcacaggatattctcgtggaacttgacagtggaagattaaaacccgatgattatgaattatcccagtggcgtctgatgcatattggtgcacagccggttccacagagcttaatccgccgctggaaagagtattttccaaatcatcagtatgatacgaactatggtttaagtgagtcgattggaccgggctgcgttcatcttggcgtggaaaatatccataaagtcggcgctatcggtattcccggatatggctgggaggcaaaaattattgacaccgacggaaatgaagtaaaacagggcgaagtcggcgagctggcggttaaaggtcccggcgtgatgaaatgttattataacgatgaagaggcaacaaaagaagttcttcatggtgactggctttacaccggtgacatggcggagatggatgaagatggttttatctatctggttgaccgcaaaaaagatgttatcatcagtggtggtgaaaacttgtatccggttcagattgaaaactatctgagcaaacatgaggcagtaaaggatgtggctgttatcggactaaaagatgaccgtttgggagagattgcagcagcgattatcgaactggttccgggggctgtctgcacggaagatgagatgaatgagttctgcaaaggacttccacgttataagagacctcgtaagattttctttgcagatgtaccgagaaacccaaccggtaaaattgagaaaccaaaactgcgcaagatgtatcagagtgaaaacttggtagatgcacagaaccgaggttag

SEQ ID NO: 322 - DNA, 885 bp, Clostridium sp. CAG:62
atgaaaacggaggaatttattatgttagtttcagcagaggaaatgttaaccaaagcaaaagcaggaaaatatgcggttggccagtttaatatcaacaaccttgagtggacgaaggcaatccttcttacagctcaggaattaaattcaccggttattcttggtgtgtccgaaggtgccggaaagtacatgtgcggttataaaactgttgttggtatggtaaatggaatgcttgaggaattgaacatcacagttccggttgctcttcaccttgaccacggcagttatgaaggcgcaaaagcttgtatcgaggcaggattttcatccatcatgttcgatggttctcattatccgattgaggaaaacgttgagaaaacaaaagaactggtaggaatctgcaaagaaaaaggattgtctattgaagcagaagttggttcaatcggcggtgaagaagatggtgtcattggtgccggcgagtgtgcagatccgaacgaatgtaagatggttgctgaccttggtgttaccatgttagcagcaggaattggtaatatccatggtaaatatccgaaaaactgggcaggactcagctttgagacgttggctgctgttcaggagaaaacaggaacgatgccgcttgtacttcatggtggtaccggaattccggaagatatgattaagaaagcaatctctcttggtgtatctaagattaacgtaaacacagagtgccagcttgcgttccaggaagcaacacgtgcttacattgaagcaggcaaagatttggaaggtaaaggttttgacccacgtaaactgcttgctccgggtacagaagcaatcaaagcaacagtaaaagaaaaaatggaattatttggttcggttggaaaagcctga

SEQ ID NO: 323 - DNA, 1596 bp, Clostridium sp. CAG:62
atggagaatgatatggaggcacagagagaaaaacgtccattaaaacatcttcagggattaaaaggacgagttcaaaacagtttgagcggctttttgagagcttgcattgttgcggctttggttatgtttcagtttgcaattctgattgtactgccgtttttactgcgccagtatgcttcattattttatttggtaatggagttgtttggtgtgttcaccattctggcacttacgaatgacagccgcagcatgtcctataaatatggatggttgtgcattacaattttacttccggtatccggaaatattatgtttgctctttggggaaaagtaggcaaaaaaaacaaattaaaccgtcggataaaatcgacgattcaaagtgtggacagacacttagaatggcatcccgaagtgtccgatgaatttcggaaaaaacatccggtttcatcccgtatgtcgcgttatatggaagctaatggtgcaccgatttcaaaaaataatgaggcaagatactatgatatgggagaaaatgcgtttgaagatttgtttgctgatttggagcgggcaaaaaaatatgttttcattgaattttttattgtggctgaaggcgcaatttgggataagatgcatgatattttaaagcgtaaaattgaagaaggagttgaagttaaattcctgtatgacgattttggagcgctgcttcgtaccagcacggattttgcacagaaactgcgggcagaaggttttgaagtagaagtgtttaatccgattcataaatataccagtaagttatttatgaacttccgtgaccaccagaaaattcttgtcattgatggtgaggtggcatatacgggcggttttaatattgcggatgaatatgccaatttagtagagcgttttggcatatggaaagatgaaggagtacggttaaaaggtgatgttgtctggagtatggtagttactttcctcgaactgtgggcagtctgctctaaaaatgaggagattgattatgagcggtaccgggcagaaaaaacatcgattcagtcggatatgtactgccatgtactgcgtgacggtccggcgttagatacccgctcttttgttggcagcatgtataaacagatgatacattatgccggtgaaaaaatgtatgtaatgacaccgtatctgattttagaagaagcgatgattgagacacttttggaagccgtgcgccgtggtgtggatgtgcggattatcacgcctcatattccggataaaaaacatattaaatacatgacagaatataactatgggatccttttgaaaaatggaattcgtatttacgaatatgagccgggattcattcattccaaagtagttatgaatgagcattgtgcgattgtcggaaccatcaatatggattaccggagcttttacttacattatgagaatggtgtctggatttatgatgaagaattcaggcaggcggtggaagccgattttataaatacatttgcgcaaagtattgagattacctatgaggactggaaaaacagaccgttaaagatgaaaattattcagccgattttacatgtgtttgacgcacttgtgtaa

SEQ ID NO: 324 - DNA, 2463 bp, Clostridium sp. CAG:62
atggtatttgtaacggaaaaggaaaagaaaaaggaattgaagaataacatttcgaactatatgaaattgttgttccgccgttcggttgaagaggcaactccacagcagttgtttcaggcagtttcttatgcagtcaaagatatcgtagttgatgactggatggcaacgcacaaagcctatgagaaaaaggatgtgaagacagtttactatttgtccatggagtttttgatgggtcgtgcacttggtaacatgattatcaacctcaaagaggacaaagttgtacgcgaggtacttgacgagatgggtgtaaacttagacttgcttgaggatgaagagccggatgcagctcttggtaatggtggtcttggacgtctggcagcctgctttttggattccttatctacacttggttatccggcttatggctgtggtatccgctacaaatatggtatgttcaagcagaaaatcgaaaatggtttccagattgaagcaccggatgactggttaaaagatggtaatccatttgagatgaagcgtccggaatatgccgttgaagtacgttttggcggttatgtaacggtaaggaaagacgaaaagaccggaagggatcgttttgtacaggaaaattatcagtccgtaatggcagtgccttatgatttgccggttgtcggttacggaaaccacattgtaaacacacttcgtatctgggatgctgaggcaattgatactttcaatctggattcttttgataaaggtgattatcagaaggcagttgagcagcagaaccttgcccgtactatttgtgaagtactgtatccaaatgacaaccatatggcaggaaaagaacttcgcttgaaacagcagtatttctttgtatcggcaagcgtgcagcgtgcgattatgaagtatatggaaaaccacaatgacattcatggtcttccggaaaaagtatgtttccagttaaatgatacccatccaacggtagcagtacctgaattgatgcgtattttgttagatgaatatggtcttgattgggatgatgcatgggatatcacaacccgtacctgtgcttatacaaaccatacaattatggcggaagcattggagaaatggccgcttgagttattctcccgtctgcttcctagaatttatcagattaccgaggaaattaaccgtcgtttccagaatgagattcaggcaaagtatccggataatcaggataaagtaaaaagtatggcaattatttatgatggtcaggtcaagatggcacatcttgctatcgctgccggattttcggtaaatggtgtggcaaggcttcatacggaaattttgaaacatcaggaattaaaagatttctatgaaatgatgccggagaaatttaataacaagacaaatggtattacacagcgtcgtttcctgcttcatggaaatccgaaacttgctgcatgggtaacagacaaaatcggtgatgagtggattacagacttgtctaaaattgataaactttctgtttttgtggatgataaaaaagcacagcaggaatttatgaatatcaaattccagaataaagttcgtcttgcgaagtatattaaggagcacaatggtgttgaagtagaccctcattcgatattcgatgtacaggtaaaacgtctgcatgagtacaaacgccagctgcttaacattttgcatgttatgtatttgtataatcagttgaagaaaaatccgggtatggatatgtatcctcgtactttcatttttggtgcgaaagcttctgccggataccgccgagcaaaggcaattatcaaactgattaacagtgttgctgacgtagtaaacaatgacgcttcgattgaaggaaaaatcaaagttgtatttattgaaaactaccgtgtgtccaatgcagaaattatttttgccgctgccgatgtatcagagcagatttcaactgcaagtaaagaggcatccggtaccggtaatatgaaatttatgttaaatggtgcactgacccttggaacaatggatggtgccaatgttgaaatcgtagaagaagtgggcgaggaaaatgctttcatcttcggtctttcctcacaggaagtaattgatttcgagcataataaccagtatgatccgaaagaaatttacaacatggattcggatatccgtgccgtgcttacccagttgatcgatggaacatattcccctgaaaatcttgaattgttccgcgagatttacaattctctgcttgagacaaacggctatgagcgtgcggaccagtactttattttgaaagacttccgttcttatgaggcggcacaaaagaaagtagaagaagcataccgcgatgaggagcgatgggcgaagatggcaatgctccagactgctaaatgcggtaaattctcttccgaccgcaccatcgaagaatatgcgaaagagatttggcatttggagaaagttactttgtaa

SEQ ID NO: 325 - DNA, 3267 bp, Clostridium sp. CAG:62
atggatagagaacaaaaaaaactatatataaaggagacaactatgcctaaaagagaagacattaacaaagtattaatcatcggttccggtccgattatcatcggacaagcctgcgagtttgactactccggaacacaggcctgcaaggcgctcagaaaacttggttacgaaatcgttttggtcaattccaacccggcaaccattatgacagacccggaaattgcagacgtaacttacatcgagccactgaacgtaaaccgtttagagcaaatcattgccaaagagcgtccggatgccgttttaccaaacctcggcggtcagtccggcttaaacctttgtgccgaattggcaagtgagggaattcttgacaaatacggtgtacaggtaatcggtgtccaggtcgatgccattgaacgtggagaagaccgtatcgaattcaagaaatccatggatgccattggcgttgaaatggcaagaagccaggtatcttacagcgtagatgaagcattagccattgcggatgaattaggatatccggttgttttacgccctgcctacacaatgggtggcgccggtggcggtcttgtctataataaagaagaattaaaaactgtttgtgcccgtggacttcaggcaagtttagttggacaggttcttgtcgaggaatccatccttggctgggaagaattagagcttgaaattgtacgtgacgccgatggcaatatgattaccgtctgcttcattgaaaacattgacccaatgggaacacataccggtgattctttctgttccgcaccgatgcttaccatttccgaagaagtgcagaaacgtcttcaggaacaggcataccgcattgtcgattccgtcaaagtaatcggcggcactaatgtacagtttgctcatgatccggtttccgatcgaatcgttgttatcgaaatcaacccaagaacttcccgttcttctgcactggcatccaaagctaccggttttccaatcgctttagtttccgctatgcttgctgccggtcttactttgaaagacatcgaatgtggaaaatacggaaccttagataaatacaaaccggacggtgactatattgtaattaaatttgcgcgctgggcttttgaaaaattcaaaggtgtagaagataaattaggaactcagatgcgtgccgtcggcgaagtaatgagcattggaaaaacttataaagaggctttccagaaagcaatccgaagcttagagaccggccgctatggtttaggttttgccaaagattataatgaaaaatcaaaagaagaactacttcgtatgttagctactccttcgagtgaccgccatttcattatgtatgaagcacttagaaagggcgctaccgtagacgaaatctttgatattacaaaagtaaaacactactttgttgaacagatgaaagaacttgttgaggaagaggaagccatcgcaaaatccaaaggttctcttccatccgatgagcagcttatttccgctaagaaaaatggcttctcggataaatacttaagtcagattcttgcgattccggaagatgacatccgcaataagagaatcgaacttggcattgaggaggcctgggaaggtattcacgtaagcggaaccaaagacagtgcttattattattcaacttacaacgccaaagacaaaaatccggtcagcgaagaaaagaataaaatcatgattctcggtggtggtccaaaccgaatcggtcagggtatcgaatttgactactgctgtgttcacgcagcacttgctttgaaaaaactcggctttgagacgattatcgtaaactgtaatccggagacggtttccaccgactacgatacatccgacaagttgtactttgagcctttaacattggaagatgttttaagcatttacaaaaaagaaaaaccactcggtgtaattgctcagtttggtggacagacaccgcttaatttggcagccgaactagagaaaaacggagtcaaaattctcggtacttctccatccgttatcgacttggcggaagaccgcgatttgttccgtgccatgatggacaaattaggaattccaatgccggaagcaggcatggcaacaaccgttgatgaagcgctggaaattgcaaaaaaaatcggttatccggttatggttcgtccttcttatgtacttggcggacgcggcatggaagtcgtatatgatgacgaaagccttaccgactacatgaaagcagccgtaggcgttacaccggaccgtccgattttgattgaccgtttcttaaatcacgcattggaatgtgaagcagatgccatcagcgatggaacacacgctttcgttcctgctgttatggagcatatcgagcttgccggtgtacactccggagactctgcctgcattattccttcggttcatatttccgaggaaaatgtcgcaacaatcaaagaatatacgaaaaagattgcggaagagatgcatgttaaaggtctcatgaatatgcagtatgccattgaaaatggaacggtttatgttctggaagcaaatccaagagcttcccgtacggtaccgcttgtttccaaagtatgcaacatccgcatggtgcctttagctaccgatattattacttcggaacttacaggccgcccatcaccggtatcctctttgaaggaacagaatattccatatttcggtgtcaaagaagccgtattcccattcaacatgttcccagaggttgaccctctgctcggaccggaaatgcgctctaccggcgaggtacttggtctttccacctattatggcgaagcattttacaaagcacaggaagcaacacagacaaaacttcctttgaagggaaccgtattaatttccgtaaaccgcaaagacaaaccggaagtagttgaagttgctaaattatttgctgaggcaggctttaagattctggcaaccggtaagacacacgaaatcattaccgatgccggcattgaggcagagaaagtattgaaattgtatgaaggtcgtccaaatgtactggatttgattacaaacggcgatatcgatttaattatcaactcaccggttggcaaagacagcgtacacgatgacagttacctgcgcaaagcagcaattaaggcaaaaattccttatatgacaaccatcgctgctgccaaagcaagtattaagggaatcttgtatgttcagaaacatggcaatggtgaggtaaaatccttgcagcagattcacagtgagatttctgataaataa

SEQ ID NO: 326 - DNA, 1281 bp, Clostridium sp. CAG:62
atggctatggtaacagccgttgtaggagcaaactggggagacgaaggaaaaggaaagattacggatatgctcggtgaagagtccgatattatcgtacgctttcaaggaggtagtaatgcaggtcataccatcgtaaatgattatggtaaatttgcccttcatattctgccgtccggcgttttttataaccatacgacaagtgttatcggaaatggtgttgcgctgaatattccggatttatttaaggaaattcagggaattgtggaccgtggtgtaccgatgccgaagattaaagtttcggaccgcgctcagattgtgatgccatatcatattttgtttgaccagtatgaggaagagcgtctggctggaaaatcatttggttcgacaaaatccggtattgcgccattctattctgataaatatgcaaaagtcggaattcaggtttccgagctttttgatgaagaacttctccgtgagaagttagagcgcatttgtgttcagaaaaatgttattttggaacatttgtatcacaaaccgacattgaatgttgacgagttgatggatacgctgcgcgagtaccgcaagatggttgagccatatgtatgtgatgtgtctgcgttcctttatgaggcaagagagcagggcaagagaattttgttagaaggacagcttggttccctgaaagaccctgaccatggtatttacccgatggttacatcttcttctacactcgcaggctatggtgcagtgggagcaggacttccaccatatgagattaagagaattgttacggttgttaaggcatactcaagtgctgttggagccggtgaatttgttagtgaaatttttggagaagaggcagatgaattaagacgccgcggtggtgacggcggtgagtacggtgctacgacaggccgcccaagacgtatgggatggtttgatgcggtagcaagccgttacggatgccggattcagggtgcgacagaggttgcacttaccgtgcttgacgtacttggttatctggatgaacttccggtatgtgttggctatgaaatcgatggcaaagtaacaaaagatttcccaacaacagcttctttgaaaaaggcaaaaccggtatatgaagtgcttccgggctggaagacagatatccgtggcattacggaatacgataaacttccggaaaactgccgtaagtacatcgagtttattgaaaaagaattaggtgttccggttaaattggtttccaatggaccgggaagacatgagattattcatcgataa

SEQ ID NO: 327 - DNA, 1494 bp, Clostridium sp. CAG:62
aagaaaatgagaaaaatgaaacgacttacttcggtatttgcgttattactcgttgcatccctccttgtaagcaatgcggaggtcctcgcgaatagttctgatggcaagcattatacatatacttatgattgctgggatgttgaccgtgagtctccggatgcttattcggttgagcgagtaatttccggttctgattttaaagattgtggcaatttttctgagccacagggtcttttctcaaccggaaataagatgtatgttgcagatacaggcaataatcgtatttgtgaatttacatatgaaaacaatgagtttacttatgtaaaagaggtaaccggttacaaagatgctgagggaaaagatgtaaaattgaatggtcctcaggatgtatttgcgacagacgatggacaaatgtacattgccgataccggtaataataaaattgttcacttggatgcagacggcaatatggtaaaagtaattggccgtccaaatgacaaaacctatacggatgcaaaattccttccacagaagttagttgtggatggtgcaaaacgtatttttgctcaggttcagaacgtaaacaaaggtttccttgaatttgatgacaccggagactttacgggatttgtcggagccagtgaagtaacttatgatttccttacttatttgtggaaattggttgcgacaaaagagcagcgtgcacagatggatttgttcgttccaacagagtattcgaacctttgtctggattccgaagacttcatttatgcaacaatcagtacatttgatggagctgtagagtcggctgaaccgattcgtaagctgaatgcaaagggaactgacattttggtacgtaacggttacaatgatccatatggtgatttgcgttacaccgaaaaaggcgagatgaaaggaccttccaagtttgtagatatctgctgcttgtcaaatgatgtttattatgcactggataatacaaaaggccgtatctttgcttatgatttccaggggaatatgctgtatgcctttggcggacatggttataaagccggattgtttatgaatccttcggcaattgaagaccttggtgattccctcttggttacagatcagaagttaggaacgattacccagttcactttgactgattatggtaaaatgattaacgatggtctggctgagtacaagaagggtaattatgatgaatccgctaatatctggcgtaaagttctgaagcataatggtaactacgaccaggcatatattggaatcggccgtgcacttcttcgtgagaagaactataaagaggcaatggattactttgaattaaaacttgatgccaagaattattctaaagcatttaagctttaccgagaggtttggtttgaggagaacattggtacgatcttgattattattgcaatcctcattctccttggatttggtgttggatttgtgaagaaagccagaagggaggttgaaaaaggatga

SEQ ID NO: 328 - DNA, 1434 bp, Clostridium sp. CAG:62
atgaaagcaagcatgcagaagctgattgcgatgggtctttgtgttgttcttgcagtaggttctcttactggatgtggcggctcctccaatgatgcaggcagtgcatcaggcgatggcgcaaaaacatcatcttcttcagacaagaaaacatttagtgaccttggtggcatggatatcacagtaggtgactggttcacttcaaaggatacccttgcagacagaaccgacgagtttggtaaaaagcagaatgagtactggaagagtattcaggagaagtacaatttcaaaatcactcgtgattctgtttattcctatacagatgcaaaatcagattatgtaaatgacgttatggcaagtagtccaaaatacgaactttactatctgtatcaggaatttgtttctgagcctttgatgaaaggcttgatgtatgatttgtcaactcttccggagttcaatttcgatgaagaaaaatggaatccaaccgttaaagagttgatgagcattggtgatggtatctggggtatgagcccagacaatgagccacgtggtggtattttcttcaacaaacgtctcttcaaggaagctggtattccggaagatgagccatatgatttgcagaaaaaaaatcagtggacatgggacaagttcgaagagtattgtaagaaacttacaaaggataccgatggtgatggtaaaacagaccaatatgctatggcaagtttctcaaaatactatctgccaatgtgtgcagctaacaacaatgcaacatttgtatcccgtgataaagacggtaaatacgttgatgcaattacatccaaagagttcaaagatgctatgaactggggtgtagacctgattaagaaaggttatattaagccaaaaccatcagaaaacgtagcatgggattggtataaagctgcattccgtgatggtgaagctgctatgcagactgccgaagtttatgagattagcgctttcgctgatatggaagatgactggggattcgtaatgttcccatacaatcaggatcagaaggatgctaccaacaagacagtgccaaacgacaacatcgttgttatgccaagctgcttcgatcaggaaaaagctgagaagattgcatttgcttacgatttgtacacagagcctgttgaaggatatactcctcatgatcagattcttgagcagtattacccacagttcagagatgaccgtgcagtagatgaaacaatcggtatgatgttagaggagaagcataaatctacttcttatctgccaatgattagtgaaattgactatggtgatttctgttatcctgtatatgcaaatgcaacaacacctgctaagaagattgaagagctttcaaccaaatgggataccaagattagcaaagttaatgctgagtatgacaagtttgcaaaagagcatacaaaataa

SEQ ID NO: 329 - DNA, 1965 bp, Clostridium sp. CAG:62
atggaaaatgtatcccgcatgaaagaattaatttcacgtttgaaccaagctgccaaagtatattatcaggggcagggtgaagtgatgtcaaattttgaatatgataaactttatgatgagctgcttgcattggaaaaagaaacaggcattacaatgaataacagcccaaccattcatgtcggatatgaaaccattagtgaacttccaaaagagcagcatgttcagccaatgctttctctgaataaaacaaaagaaccggcggatttggttgcatggcttggaaacgagcaaggtcttttgtcaatgaaattagatggtctgagtattattttgacttatgaaaacggtgaattagtaaaagcattgacacgtggaaatggtgaaataggagaagtcatcacgaataatgcaaaaacgtttgtaaatataccgggacgtattcagtataccggcactttaattgttcgtggtgaagctttgattcgatattccgattttgaagaattaaataagcaggaaaatgtagaagaacagtataaaaatccgcgaaatctctgcagtggaagcgtacgacagttaaataacgagattacggcaaaacgccgtgtgcatttctacgcctataatattatttcgattggagatgaaatttcattcacaaagaagaaagaggggctttcttggcttgtgaaacagggctttgaagtggcaccttaccgtgaagtttctgcttcaaacatagaagacatgataacttatttttcaaattatgtaaagcagtccgacttgccaagtgatggtttggtattgacttttgatgatgttgcctatagtgctacacttggacgtacagctaaatttcctcatgattcgattgcatttaaatggcaggatgaactggcagaaacgacgcttcgggaaattgaatggagtgcttcacgtactggcttgattaacccggttgccgtttttgatgctgttgaattagaaggaaccaccgtttcccgtgccagtgttcataatgtaagcattttgaaagaactgaaattgggacttggtgataaaatattagtctataaggccaatatgattattcctcagatacaggaaaacaaaacacagagcggaacgtgcgtaattcctgataaatgtccggtctgcggtgcgtctacaacattagagcaggaacacggttctgtctttttgctctgtcccaataaagagtgttatgcaaagaaaataaaactgctgacacattttgtaagtcgtaatgctatgaacatcgacggcttatcagaatccacacttgaaaaatttgtagcagatggcatgattcattcattgacagacattttttatttagaaaaatatcaggataaaattgttgagatggaagggtttggtgaaaaatcctacgacaatctcattgagtctattgaaaaggcaaaacaaataccacttgcaaatttactatacagccttggcattaaaggcattggcttaagtatggcaaaacttattgccgaaaaatatccgtatccgattacaaagatgcaggaaataacaggagaagacctgcttaaagtggatggcattggtgaggtattagcaaagtcttttgtccggtactttgcagataaaaacaatcaggaacagttaaagaatttagatgacctgcttattgtttcttatccggagaaaaaagagcatcagccatttgccggccttacctttgttattacagggacattaaatacatttgataaccgtaatcagtgcaaagacatgattgaatcgctcggtggaaaagtggcaggaagtgtcagcaaaaacaccagttatctggtgaataatgatattacttcccagtcctctaaaaataaaaaagcaaaagaactttcggttccgattattgaggaagccacacttgctcagatgattgaagaggctaacgaaaaagcttaa

SEQ ID NO: 330 - DNA, 1383 bp, Clostridium sp. CAG:62
atgcctattttacgttccggtttgaaatgttacgaaatggaggtggcaaatgatgctgtctttttatcgattggcggaagtcgccatttattccctgctgaattttcttccttttcttgccctggcactttatccgttccggcacagtcttcgtttttcgataaaaacaacatttttttgattgttcttgtgacaattttgcagctttttctcggtgcatgggctgcctttgctcccggaaacaacaccggaaccatcagtgcagtaagcaccatcctgtatgctgctttttattttcttgccataaaaaaacactttggcaaaacgttttttacacttttaatgatttcaaatcttgcgagcctcgctgtaatttcatcaaagaccatagaaaatcttttcttccctgacctcgccgtacaaagttaccgctggtctttttctctcatgcttgctgtggtagaaataattcttgctattcctctgtttttctatatgaaaaaagtgtatacaccggcagtagaaaaggagccatccggctttgagtggcggtatttgtgggtaattcctgccaccttttatgtgatgtggtattatgcgttctacggaaatgcttccaaatcaagtcttgaaattgccctgcatccgaaaaatacgctgtttttatttattatcaatgtcggtgccattttcatttactatgtcgttacacgcctgattttggagcagaccaaaaccctcctgctgacggaacgcaaccatgaattgaccatgcagacggtacaatacgaaaatttgcaagagaaaatcacagaggtgcgccgagccaagcacgatgtccgccaccatatcacacttatgcaggaatacctgaatacgagaaactatactgctctaagtgagtatctaaaacagtacagaatgagtttaccagacgatacgccggtacagttctgcgcaaatcctgccgccaatgccgtacttgtatattttgcacaacaggccaaagagcagggtattacctatctcgtaaaaacagaaattccggaaaaaatcaacattccggaaaccgacatttcggttctcctcggcaacctgttggaaaacgctgtagatgcctgcaaatcggaacaaacaccgggcaaaaaaatcatcgtccgcgcaaatactgacggcggctcactctgtatcaccgtagataacactttcaccggaacgcttgcacataccccagatgggaatcttgtttccaccaaacataaaggacttgggcttggaacccgctccgtaaaaaatattgcgaatcagcatggcggcatatgccggtttgaggcaaaggatgggatgttttacgcttctgtgctgtgccagataggggagtga

SEQ ID NO: 331 - DNA, 1779 bp, Clostridium sp. CAG:62
atggcatttgatggttttacaattgctgccttagtcagcgaaatggacgccaaattaaccggcggccacatacaaaaaattgcacagccggaggcagacgaacttctgctttccataaaaaataataaaacacagtataaattgcagatttcagcgagtccttctctcccgctgattcatttgacaaattcaccaaaaccttcgccatttacagcgccgggattttgtatgctgttaagaaaacatttaggtggagcaaaaattctgtcatttgagcaggtcggattggaacgcgttattagaattcagttagaaaacctgaatgaattaggggatgttgttcaaaaatcactgatggtcgagattatgggaaaacacagtaatattattttagttgacgaaaaaaatacgattgttgacagtattaaacatattaatggattaaccagttctgtcagacaggtactacccgggcttgattattttataccaaatacacaacataaaataaatccatatgaggttactacaaatgactggaatgagactctttttataaaaccggtttcgattgcaaaaatgttatacggctccttatctgggtttagctcatctctttcccacgaactcgcttatagaagtcacctcgacggagatgcaccaacggcttccttaaacggaaatgataaatcggcgttgatggaacagtttcgcagcataatgcagcaaacaaaaggaagggatttttctccttgtattgtttttcgaggggcaaaaccgattgattttggtgctttttcatttgcgatgtacacagactgtacctgtaaaatatatgaatcgatgtccgaagtggtagaaaccttttatggagaaaaggatacgcttgagcgcatcagacaaaaatcaattgatttgcgtaaatccgtgactaatattttggaacggaactataaaaaacgtgatatgcagtataagcaattgaaaaaaacagatggaaaagagaaatataaagtgtacggtgaattactgacaacatatggttatcagctctccgagacagatacttcgctaacttgcgtgaattattataataacgaagaaataacaattccggttgatgaaacgatgacggcaattgaaaatgcaaataagtattttgcccgttacaacaaactaaaacgtaccgaggaggccgtcaaagagcagcaggaagaaaccgaagaaactatcacacatctggaatccattatgacagaacttgatattgcacgaaaagaggaagatttactagtcataaggcaggaattaagtgattttggatatatgaaggaaaaacggtcaggaaaaaaaggaaaaccgataaaaaaaagtaaaccactccactttatttccagtgacgggtatgatatttttgttggaaaaaataattaccagaatgacgaactgacctttaagacagcaaccggaaatgattggtggtttcatgctaaaaacatgcccggttctcatgtgattgtgaaaacaaatggcgaagaaccgccgattaaaacgtttgaagaagcgggaagtttagctgcctatttctctaaaggaaaaggggcagacaaggtggaaattgactacacacagaagaaaaatgtaaaaaaaccaaacggaggaaaaccgggatttgttgtatattataccaattattccttaatggcatcctcccatattgagggaatccggtgcgtaaatgccgaagattccgtatttcttgaaaggagttatgtgtaa

SEQ ID NO: 332 - DNA, 1725 bp, Clostridium sp. CAG:62
gtgaagcagttatttaagtttttaagttcatacaaaaaagagtgtattttcgccccgttgtttaaattgtttgaggcgacgttagaattatttgtaccgcttgttatggcagcaattattgaccatggaatcggaagcagagattatggttttattggatggatgggaggtatattggttcttttggcagcggttggtttgaccgctgctcttgtggcgcagtattttgcggcgaaagcagctgtgggatttgccgccggactgagacaggcgttgtttcgtcatattcagtccttatcgtttggagatgttgaccaggtaggaagttctacattgattacccgtttgacaagtgatacgaaccagttacaggcagctgttaatatggcacttcgtttgtttttgcgttcgccgtttgtagtgctcggtgcgatggttatggcgtttacaattgatgtcaaggctgcgcttgtttttgtagttgtcattccattattatcaatcgttattttcggtgtgatgtttgtcagtattccgatgtaccgccgtgtgcaggaggcacttgataaactgttaggaagaacccgtgagaatttgtccggtgtccgtgtgcagcgtgcttttaataagcaggaacaggagaaggaaaaatttgcggaagaaaatcaggcattaaataagttccagatggtagtgggaagagtttccgcacttacaaacccgattacctatctgattatcaatgtcggagtaattgcgttaatctggattggtgcgctgaaagtagatgccggttatttgtctcagggacaggtagttgcgttagttaattatacggcacagattttggtagaattaatcaaactggcaaacatgattgttatggtaaataaagcgattgcctgtggtgaccgtgtgcaggaagtctttgagagagaaccgggactttctacgccgaatgaggagacaaagccgggggatggcgacattgctgtttcatttgaacatgtcggtcttgtctatccggggacccatacggaatcccttaccgatattcatttttccgtgaaaaagggagagaccgttggcgttatcggtggtaccggttccggaaaaacatcgttagttcatttgattccgagattttatgatattacatccggtaaattactcgttgatggcgtagaggttcataagcagtcacttgccttgttgagaaaccggattggtgttgtgcttcagaaagccgttttgtttgaaggaaccatccgctccaacctgcaatggggcaaaaaagatgcaacggaagaggaaatgtggaaggcgcttgaaattgctcaggcaaaagaagttgttcttggaaaaccggatggactggattcggttgtggagcagggagggcgaaatttctccggcggacagaaacagcgtctgacaattgccagagcattggtgagaagaccggaaatattgattatggatgatagtgcctcggcacttgattatgcaacggatgccgctcttagaaaggcaattcgcgaagaattaaaagatatgacactttttattgtttcccagcgtgcggcttcggtgcggaatgcggataagattgttgtgcttgatgatggcgtgattgtaggaatgggaacgcatgatacgctgattgattcctgtgaggtctaccgggaaatttatgaatcccaatacggaaagggggcaagatag

SEQ ID NO: 333 - DNA, 1035 bp, Clostridium sp. CAG:62
gctttttatatttacgggaggtgcggcatgaaaacaagaaatttcattttaatcggtcttacgattttgttgtggttttcttttcgatttttgcttccgttgacgcttccctttgtactcgcctatttttttgcgaaactggtatcgccaatgatacaatttttggtaaataaattaaaatggagacggaaagtcagtatttttttagttgttttttttacgctgttgatattaggtggatttagcgcttatatcattacattaattataagtcagggaatgctgctgctgcagaaaataccggtttatgggcagatttgcggaagaatgcttgaaaaaatgtgcagccactgcgaccggatgctggagcttgcggatggaagcagttttgattatttagagggtcaggcagcagggctttatcagaaaattggcacggatttacttcctaaattgtccgggtgtgccatttttctcgtaaaaaagggaattggagccattagtgctctgtttattttctttttgtcggtgcttttaattttgctggatgacaaaatgcctgcggtgcgtgggaggcttcgcccatttgtgcaaaaactgcgtggtgccggacttgcttatctcaaagcgcagtcactattgttattcattattgcggcacttttggcacttggtttttatttcatgggaaatgattatgcgatacttcttgcgattggaattgctttactggatgcatttccggtgcttgggagcggcatggtactaattccgtgggcggtattaagtgtcattggcggacgatattatgatgcggcaattgttacaactcttttttgcgtggttacatttttgagagaaattttagaaccgagactgattggaaaagaagtggggattaaaccattgtatctgattatttccgtgtacgccggaatcgaattatttggcatcggtggtgtgattttggggccggtttctctaaccattttgaaagcggtacgtgaagaactcatcgagcgggaacgaacctag

SEQ ID NO: 334 - DNA, 951 bp, Clostridium sp. CAG:62
atggtgaaagcgatggcaaagattgcaaaacagttgacagaattaatcggaaatactccattgctggagttgacaaattatgaaaaggaaaatgagttagaggcaaatctgattgtaaaattggagtattttaacccattaggaagtgtaaaagaccgtgtggctcatgcgatgattgagcagggaattgcggatgggaaaattaattcagataccgtgattatcgagccaacaagcggtaatacaggaattggacttgcgtttgtgacagcggcaaagggattacacctgattcttacgatgccggacaccatgagtgtagagagacgcaagattgtatcggcgttaggtgctgaaattgttcttacaccgggacgcgatggtatgaaaggtgcgattaaaaaggcggaagagctgaaagaggaatatggaaatgcatttattccacagcagtttgaaaatgaagcgaatccggcaattcataaaaagacaaccgcacaggaaattttgaaagataccgatggtaaagttgatatttttgtatcggcagttggaaccggcggaacggttaccggaaccggacagggattaaaagaagcaaatccggatgtaaaagttgtggctgttgagcctgccggctcaccggtattatccggaggaaagccgggaccacataaaattcagggaattggagccggatttgtaccggatgttttggataaagaaattttggatgaaattattccggttgaaaatgatgatgcttttgaaacatcaagaaaagtagcaaagagtgatggattgttagttggaatttcttccggtgcagcactttatgcagctacacagttagcaaaacgcaaagaaaatgcaggaaaaaatattgttgttttactgccggataccggtgagagatatttgtccacttctttgtttgtggtagaagagtaa

SEQ ID NO: 335 - DNA, 3198 bp, Clostridium sp. CAG:62
atgggagcttttttattttttttaatggaggtaactatgtataacaaagtatcaacaggcatgaattttgtcgagagagaaaaagaagtagaaaaattttggaaagacaaagatatttttcgcaaaagtattaaactgcgtgagggggcaccaacgtatatgttttacgatggaccgccaacggcgaatggaaaaccgcatattggtcatgtattgacccgtgttattaaagatatgattccgcgttaccgtacaatgaaaggctatcgtgtgccgcgtaaagccggatgggacacgcatggtctgccggttgagctggaagtagaaaaactgttaggtctggatggaaaagagcagattgaagaatatggtatggaaccatttattaatcagtgtaaagaatctgtctggaaatacaaaggtatgtgggaagacttttccgataccgtaggtttctgggctgacatggatgacccatatgtcacatatgatgacaattatattgagtctgagtggtgggcattgaaggaaatctggaataaagaccttttgtataaaggatttaaaatcgtgccttactgccctcgctgtggtacaccgttgtccgcacaggaggttgcgcagggatacaaaaccgtaaaagagcgttctgctattgtccgctttaaggtgacaggtgaggatgcctatttccttgcatggacgacaacaccttggaccctgccaagtaacgtggctctttgtgtaaacccgaatgatacttactgtaaagtaaaagcagcagatggctatacttattatattgcgcaggatcttttggatacggtacttggtaaactggcaaaagatgatgagccggcttatgaagtgttagagagtttcccgggaaccgcattagagcataaagaatatgagccattgtttgcctgcgcgaaagagtgtgctgataagcagaacaaaaaaggatttttcgtaacctgtgatacttacgttacgatgaccgatggtaccggtattgttcatatcgcaccggcatttggtgaagatgatgccaatgtgggaagaaactatgaccttccttttgtgcagtttgtaaatgaaaaaggcgagttgacagaagagactccatttgcaggtattttcgtaaagaaagcggaccctgaggtattaaaagacttagatgccagaggacagttgtttgatgcaccgaagtttgagcatgaatatccacactgctggcgctgtgatacaccgttgatttactatgcaagagaatcctggtatatccgtgaaacagcagtaaaagacgatttgattaaaaataataacactgtaaactggattccggagtcaattggaaaaggacgttttggaaactggttagagaatattcaggactgggcaatttcccgtaaccgttattggggaactccattaaacatctgggagtgtgaaggatgtggacatcaggaatgtatcggcggaagaaaagaactggcagagcgtgccggagatccaaaagccgctgaggtagaactccaccgtccatacattgatgaagtaacctttacctgtccggattgtggaaaagttatgcaccgtgtaccggaagtaatcgactgttggtttgactccggtgcgatgccatttgcacagtatcactatccatttgaaaataaagacgtgtttgagaaacagtttccggcccagtttatctccgaggcggttgaccagacacgtggatggttccattcgctgatggcagaatctactttacttttcaacaaagcaccatatgaaaatgtaatcgttcttggacatgtgcaggatgaaaatggacagaagatgagtaagagtaagggaaatgccgtagatccgtttgatgctctggaaaattatggagcagacgcaatccgctggtatttctatgtaaacagtgcaccatggctgccgaaccgtttccatggaaaagcggttaccgagggacagcgtaaattcatgggtacactgtggaacacatatgccttttatgtgttgtatgcggagattgaccagtttaatccaaccgagcatacattagaatatgagaaactttcgattatggaccgctggcttttgtcccgtctgtattcgacggttaaagaagttgatgaggaccttgacaactacaaaattccggagaccgcaaaagcattgcagagttttgtggaagatatgagtaactggtatgtgcgccgctgtcgtgatcgtttctgggcaaaaggcatggagcaggataaaatgaatgcctacatgactttgtatacggcacttgtaacaatcagtaaggcagcagctccgatgattccatttatgaccgagagcatttatcagaatcttgtgtgcaatctggattcaaaagcaccggaaagtattcatttgtgtgattttccgaaagttaaggaagaatggattgacaaagaacttgagacacagatgaaacagcttttggacattgttgttcttggccgtgcatgccgtaatacagcaaatatcaaaaaccgtcagccaattggaaaaatgtatgtaaaggcagaaggcgaattgtccgatttctataaagaaatcattgcagatgagctgaatgtaaaagaagttgtatttaccaatgatacaaaagaatttacgacatatcagtttaagccgcagcttcgtactctcggacgccgtttcggaagccgtttgaacgaattgaaagaagtgcttgccggattagatggcaatgctacgatggatgcgttgaatgcttccggtgaagtgactgttacggttggcggcgtagatgaagtgctggcaacagaggatttgctggtagaaacggcacagatggatggctatgtgagcgaggaagatcacggtattaccgttgtattggatacaaacctgacaccggagttaatcgaggaaggatttgtgcgtgaggttatcagtaaaattcagaccatgcgtaaagatgcaggttttgaagtggttgaccatatccgtgtttacgagcagggaaatgataagattaaagaaatcatcaaagcaaatgaatctcagattaaagccgatgttttggcagatgaggttattttggataaagtagaaggttacaccgcagattggaaaattaacggtgaggctgttacactgggtgttacaaaagtggaagcgtaa

SEQ ID NO: 336 - DNA, 1692 bp, Clostridium sp. CAG:62
aggagactattgttagtaaatttacatgtaaaaaactttgcgataatagacgagattgatgttgatttttcttccgggttaaatattcttaccggagagacgggagccggcaaatcgattttgattggctctatcggcatcgcgctcggtgcaagagtttcgcaggaaatcataggaaagcatggcgactctgcgatggtggagattgttttccagattgaagatgaagagacaaaagagaaattatcaagattaggtgtagacccggacgaaggacagattgtcatttcccgccgtattacgggaagccggagtgtaaaccgaattaatggtgaaaatgtatcggtcagtgtgattcgccaggtggctgccctctgcattgacattcatggacagcatgaaaaccagtcattattgcagaaggataaacatttagcaattgtagatgagtttgccaccaaacagtgtgtcgctctgaaacaagagattgctgctttataccgtgaatatacagcgctgaaaaaacagtggcaggatgaagatgtgtcagatgaggagcgtgcgagagaacttagttttttggaatacgaaaaacaggaaattgagcaggcatctttacaagccggtgaaatcgaagaagtggaagaagcataccgcagagcatccggcgctgagacaattgtggaatcgcttggtctggtacaccgtttgacaagtgatacggccgcgggagctgtgagccatgcgttgcagagtatgcagcggattacaggctttggtgatgaaattcggaacttgcaggaagaacttttgcagattgaaggacttttagatgattttaatcatgaaacagcggattatatgcaggacttttctttcgatgccaatgagttttcggatttagagaaaagactcgatacgattcacaatttgcaggcgaaatacggaagtacctatgaagaaatactttcgcatttgcaagaagtagaggataaactgcaaaaacttgcagattttgaacagtataaggagaaacttcttgctaaaataaaggaatatgagtcggatttgacaaagaaatgtgagcagttatcaaaagaaaggaaagaaaccgcttccattcttcaggaaaagattaaagctgctttatcagatttaaattttgcctatgtagattttgaaatttcatggagccgcaaagatacatttggtgcggatggatgggatgaagctgaatttttgattgcaacgaatccgggcgagccaaagaaaagcctcggaaaaatcgcatccggcggtgagttgtcccgtattatgctggcaattaaatcggtttttgccgaaaaagaccatattgagaccttgatttttgatgaaattgatgccggaatcagtggacgtacggcacagaaggtttcggaaaaactgaaacttttaagtaaaagccaccagattctatgcattactcatctggcacagattgcggcaatggcagatacccattttttgattgaaaagatggttgatgaaaatcattcggagacagtgattcgtccgttggataagtcgcagagtgaacaggaattggcacgtattcttggcggtgttgagattacagagtcggtacttgaaaatgcgagagagatgaaagcgttagcaaaccaaaaaagttcagatagttttcagaattag

SEQ ID NO: 337 - DNA, 1962 bp, Clostridium sp. CAG:62
atgaaaaaagagtattttacaattccaaatctaatgggatattttcggattttattaattcctgtattttgtgttttatattatcattcggagaatgctggctgcttttatggggcggttattgttctatgtctttcgtttttgtcggatttttttgacgggaaaatagcaagacactttcatcaggtgaccgaatggggaaaaatgttagaccctattgcggacaaactgacccaagcggcacttgcgattatgtgtaccgtgcatttccctgcgaccatctggttgtttttattatttgcagcaaaagaaatttatatgggactgatgggattacttgtgattcgaaagaaaaatcaggtttttggtgccaagcggtttggaaaaattggtacggcaggcttggattttgggattttagcacttattttattccccggcatgcctcttttagtatcgaatttattgattctggtactgatgattttaatggttgtcacctggattttgtatcttcggtttcatatcgaattactcacaaataaaacgtttggaaaaatcaaaaaacgttataaagcagtgggtgtggcaggtgtttttctctatctgattttgggagcggcacttccatatctgaaccagccaaaagtgagtgaagaatataaaaaagaatttgcaaataaagtttttgcatcggaaaactcggcaggagaccgcgtgatgctcattgaagataatggggaggcattggcggaaagaattcgaatgcttgagcatgcaaaacaatccattgttttgtccacgtttgattttcattcggatatcagcgggaaaaagatgttggctgccttgtgggcagcggcagaacgtggcgtcaaggtgaaaattttggcggatggctgcaattcatggctccgtatgacgggaaatgcctatttttatgcacttgcttcccatgaaaatgtgacgataaaaacgtataatccggtcaatcccctgttaccgtttcacgcgatgagccggatgcatgataagtatgtgattgttgatgattctttgtatctgctaggaggaagaaatgtctatgattctttccttggggcgcaggacggacctaaaaattatgacagggacgttttagtttaccacgaaggagaaaaagaaggctccatttatcaggtaaaagcctattttgaagcaatctggaatgattcgctgtgtaagacatggaatgataaccatttgcttggcttaattcccggtgtaaaaagggcagggcaggaactggaaaaacagtacatttctatgaaaaaacaggaacctggatggtttcaaaacatatcatatcaagaaaaaacagtggtggcaaaccggattacactgctctcaaacccgacttgtctttacagcaaagaaccgcaggtgttttacggtctgtgcgaattgatgaagcaggcaaaaaaagaagtcatctggcacacaccgtatattatcaataatgattatatgtatggtgaaattgcaaagatagccaaagaggtccctgaatttaccattatgacaaattcagtgaaaaataacggaaatccgtttggctccgtggattatgcacttcacaaggatgaggtgttaaagatgggggcgaaagtgcttgagtaccacggtggtgtttcttaccacggaaagagtgcggtgattgatgacaggcttgcaattgtcggttcttttaacatggatatgaagagtgcttatcaggatacagagttaatgctggtgattgacagcaggcctttgtgtgagatattgaaaaaaagttttacttcctatcaagaagaagcggatgcagcagacggtacagtggacagtaaagaggaactttttgatgatacaacaggtgcgttaaaaaaagtttccaactatgtaatctcaaagctgaatccgtatttgcgatatttgttctga

SEQ ID NO: 338 - DNA, 1302 bp, Clostridium sp. CAG:62
tatggaaggaagaaaattatgttagatatcaaatttgtaagagaaaatcctgatgttgtaaaacaaaacattaaaaataaatttcaggagcacaaactgccactcgtggatgaagtgattgcgcttgataaagagcgtcgcgagacacagcagaaagcagatgaccttcgtgctcttcgtaagaaaaattcaaagatgattggtgcgctgatgggtcagggcaaaaaagaagaagccgaggcaatgaaggaagaggttgccggttatgccaaagaactttctgatttagaagcacgagaggtagaaattgcagaggaattgaataagcgcatgatggtaattccaaacatcattgacccgagtgttccaattggtaaaaatgatactgaaaatgtagaaattgagaagtttggtgatccggtggttccggattttgaaatcccatatcatgcacagattatggaatcatttgatggactggatttggattcggcacgtgacgttgcaggaaatggattctattatctgatgggcgatattgcaagacttcattctgcagttatttcctatgcaagagactttatgattgaccgcggatttacctattgtgtgccgccgtttatgattcgttcaaatgttgtaacaggtgttatgtcgtttgatgaaatggatgcgatgatgtacaaaatcgagggtgaagatttgtatctgattggtacgagtgaacattctatgattggtaagtttatcgataaaattattccggaggagcagttgccaaaaactttgaccagttattctccatgtttccgtaaggagaagggtgctcatggaattgaggaacgtggtgtttaccggatccatcagtttgaaaagcaggagatgattgttgtctgcaaaccggaagacagtaaaatgtggtttgataaattgtggcagaacaccgttgatttattccgtacattggatattccggtacgtacgttagagtgttgttccggtgacttggccgatttgaaagtgaaatcgattgatgtagaggcatggtctccacgccagaagaaatattttgaagtgggaagctgctcgaatttaggagatgcgcaggctcgccgtttgaagattcgtgttgtcggtgaaggtggtaagtattttgcccacaccttaaataatacggttgttgcaccaccacgtatgttgattgcgttcttagaaaacaacttatgtgaggatggttcagttaagattccgaaagcattacagccatatatgggcggtaaagaaaaaattgaagtgaaataa

SEQ ID NO: 339 - DNA, 879 bp, Clostridium sp. CAG:62
atggcagtcaagagaacaggtttgggtaaaggactggattccatgattcctccgaaagcaacgcaaagagctgtaaaagaggacaagaatacggtttcaaaaaccggagaaacaattttgaaaattaatgaagtggagccaaacaaaaagcagccacgtaaattctttaatgaagaagcgttacaggaattaagtgattccattaagcagcacggaattgttcagccattggtagtagcaaagaaagatgattattttgaaattattgccggtgagagaagatggcgtgcggcaaaattagcgggattaaaggaagttccggttgttattaaagattattcaccgcaggaaattatggaagtcgcgctgattgaaaatattcagcgtgaggacttgaatccggtggaagaagcaaaagcatatcaaaatttgattaaggaatataatttaaagcaggaagaagtggcagagagagtttctaagagtcgttctgctattaccaattcacttcgtctgttaaaattaagtgatgatgtgttgacacttttaatggaagaagaaatttcaagcggacatgcaagagcactgcttggtctggaagataatgaaaaacagcttgaaattgccgaaaagattgcaaaagatcacctcagtgtaagagaagttgagaaattagtgaaaaatatcaatcagccggcaaagaaaacaaagaaaaaagaactttctaatgactttttgtaccatgatatggaagaaaaagtgaagttgaagacaggaacaaaggtaagaatcaatcgaaagtccgagaataaaggtaaaattgaaattgagtattattcacaggacgacttagaaaagattttgggatacttcaaataa

SEQ ID NO: 340 - DNA, 2010 bp, Clostridium sp. CAG:62
ttggaggaatatcaaaaaatgagtaagaaaccttattatttgacgacggcgattgcttacacatcgggcaagccgcatattggcaatacttacgaaatcgttttggctgatgccattgtccgctacaaacgttttcaggggtatgatgttcgttttcagacaggaaccgatgaacatggacagaaaattgagttaaaagcacaagaagcaggaatcacaccaaaagaatttgtagatggtgtttcgacagagataaaaagaatttgggatttgatgaatacgtcttatgaccgctttattcgtacaaccgatgaggaacatgaaaagcaggttcagaagattttcaaaaagctttacgataaaggcgatatttacaaaggattttatgagggtatgtattgtacgccttgcgaatctttctttacaccatcccagctggtggatggcaaatgtccggactgtggcagagagtgccagccggcaaaagaagaagcttatttccttaaattaagtaaatatcaggaccgcctgatgaagcacatcgagacacatccggaatttattcagccggagtcccgtaaaaatgagatggtaaataactttttgaaaccgggcttacaggatttgtgtgtttcccgtacaagcttcaaatggggaatcccggttgactttgacccggcacatgtaatttatgtgtggattgatgcgttaagcaactatgtgaccggtacaggttttgatttggatggaaatcacacgcttgtggatggcgagaatttatatgaaaaatactggccggcagatttgcatctgattggaaaagatattcttcgtttccacaccatttactggccgattatgttgatggcacttgaccttccactgccgaaacaggtatttggacatccgtggcttttgcagggtgacggcaagatgagtaagagcaagggaaatgttatttatgctgatgatctggtagatatttttggcgtggatgccgtacgttattttgttttgcacgaaatgccatttgaaaatgatggtgttgtgagctgggaactcatggtagagcgtatgaactctgatcttgcaaacgttcttggcaaccttgtaaaccgtacgatttccatgacgaacaaatatcttggcggcgttttggaaaataaaaatgtgacagaagcagttgatgacgatttgaaagagactgttttgtcggtgccaaaagcagtggaagaaaaaatggataaactgcgtgttgcagatgcgattacggaagtgttccgtttgttcaaacgctgtaacaaatatattgatgagacggagccatgggtacttggaaaagacgaggcaaagaaagaccgtctttctactgtcctttacaacttagtagagagtatcgtaattggtgctagtctgttagagccatttatgccggagacgacagagaaaattctcgcacagttaaatgcgaaaaaacgtggttatgaagaaatggatacgtttggtcagtatgagtccggtacaaaagtaacggattctccggaaattttgtttatgcgtctcgatccgaaagaagttttggcaaaggctgaagaaattaaacagaaacagatggcagaagtaaaggctgagtccggtgaagaagatgccggcgaggaagaaggaattgacatcgaagcaaaaccggaaatcacatttgatgactttatgaaaatgcagttccaggtgggcgagattattgcctgtgaggaagtgccgaaatcgaaaaaattactttgcagccaggtgaaaattggcagtgaagtcaaacagattgtatcaggaattaagaaatattattcaccggaagaaatggttggcaaaaaagtaatggtacttgtcaacttaaaaccggcgaaacttgcaggagtattatcggaaggaatgcttctttgcgcagaagacgcagaaggaaacctctccctcatgactcccgagaaaaaaatgccggcaggagcagagatatgctaa

SEQ ID NO: 341 - DNA, 1404 bp, Clostridium sp. CAG:62
atgatacatcagtataagaataatggatataatattgtgttagatgtaaacagcggttccattcatgttgtggatgacgttgtttatgacgtgctttctctgatggatgaagaaaatgcagatcgctatggagaagccgaattttcacgtattgccgacgttattttgaagaatgattataaagaagaagttacgaaagaggatttaaaagacgtcttttccgacttacaggaattagaagagaacggaacacttttcacaaaagatgtttacaaagaaggcgtcattgatttcaaaaagagacagacggtagtaaaagcactctgcctgcatattgcccatgactgcaacttggcatgccgttactgttttgccggtgaaggagaatatcagggcgaccgctctcttatgagttatgaagtaggaaaaaaagcattggattttttggtagccaattccggcagcagaagaaatcttgaagtggatttctttggcggagagccacttcttaactttgatgttgtaaaaaaattagtagcttacggcagagaaattgaaaaagaaaaagacaagcatttccgtttcaccttaacgacaaacggtgttttgttaaacgatgacatcattgaatttgcaaatcaggaaatggacaacatcgtcttaagtattgatgggcgtaaagaagtgcataaccacatgcgtccgttcaaaaacggaaccggaagttatgactttattattgataaattcaaaaaagtagcagaatcgagaaaccagcagaaatattatgtgcgtggaacatttacccataataatctggattttgttgaagatgtgctgcatttggcagatgaaggctttgaacagatttcggttgagccggttgtagcagacccgaatgaaccgtatgccatccggccggaagatattcctcaaatctgtgagggctatgacattcttgcaaaagagatgcttgcccgcaaaaagcagggaaaaggatttaatttcttccattacatgattgacttaagcggcggtccatgtgtttacaaacgtttgtccggatgtggttccggaacagaatatttagcggttacaccgtggggcgatttgtatccttgtcatcagttcgtgggtgaagaacaattttgcttgggaaatgtagatgacggtgttgtaaatacggatatgcgcgatacatttaaattgtgtaatgtatatgcaaaagaggagtgtaggaactgctttgccaaattctattgcagcggtggctgtgcggcaaatgcttatcactgccacggtgacattaacaaaccgtatgaaaccggctgtgaattgcagcgcaaacgtgtggaatgtgcgattatgctcaaggcagcagaagcctatgatgagagaaattag

SEQ ID NO: 342 - DNA, 888 bp, Clostridium sp. CAG:62
caaagttggaacttgataggaggtatagcaaagatgaaattaattaaattaaaacgaagaaaaccgaaccgctcagtcggtggtgatatcggtatttacattttgctgattttgtttggtatcttctttgtacttccgttggtatactccatcagtagtgcatttaaaccgctggatgagatttatctgtatccaccgaggtttttcgtgaagaacccaacatttaataacttccaggatttgcttgttgttatgtcaagctcctatgtaccatttacccgttatgtctttaacacggtattaattacattgcttggtacggtaggtcatttgattattggttcaatggctgcttatgttttggcaaaatatgagttcccgggaagcaaaaagattttcaagattattcaggctgcaatcatgttcaatgcttatgtattgcagattcctacttgtattattatgagtaagcttggatggattgatacgtacttagcactgatggtgccggcgttcgcactgccgatgggattgttccttatgaaacagtttatggagcagattccggatgcattgattgaagcggctaagattgatggtgcgaaagagggaagaatcttccttcagattgtcatgccaaacgtaaaaccggcatggttgacagtaacaattttctctgtacaaaacctttggaacatgaaaggtcaggtgtatatctactcggaagaatataagatgctgccatatgcattgcagcagattatggccggtggtgttgcccgtgccggtgtaggttccgctgcgacaatggtcgttatgatggtgccgattttaatctttgttttggcagagagtaacattctggaaacaatggctagttccggaatt

SEQ ID NO: 343 - DNA, 2274 bp, Clostridium sp. CAG:62
aattattttatgcttgcaaaaatcgtaagagaatgttatggcaaagaaatcagtgaatgcgggaaggaagaactttatcatgctctgcttacgctggtgcagaaaaaggcaggggaaaaggaagagaatacaggaaagaagaaactgtattacatatcagcagagtttttgattggaaaactgctcagtaataacctgattaatcttggcatttacgaggaagtaaaaaaagaactttccgatgccggtaaaagtcttacagatttagaagaatacgagccggagccatcacttggcaacggtggtttaggaagactggcagcctgctttttagattccattgcgacgctttctctgccgggtgatggtgtcggattaaattatcactacggtctgttccgtcaggaatttaagaacagaaaacagatggaagagccaaatccatggatgaataaggacagctggctgattcgcagtgacaaatcttttacggtttcttttggcggtttcgatgtgaaagcatcgttgtatgatattttggtgaccggctacgagagccggacgaaccgccttcacttgtttgatttggattctgtggatgaaacgattgttcatgatggaattgaatttgacaaggaagatatacgaaaaaatctgaccttatttttgtatccggatgattctgatgacaaaggccgtcttttgcgcgtgtaccagcagtattttatggtaagctgcggtgcacagctgattctttcggaagcaaaggacagaggctgtaatctgcatgaccttgcagactatgcggcaattcagattaacgacacgcacccatccatggtaattccggaattgattcgtcttttgatgaaagagggaatcccatttgatgaagcagcagaaattgtaacaaatacctgcgcctacacgaatcatacgattttggcagaggcattggaaaaatggccaatgtcgtttatcgaagaagtggcaccggcgattgttccgattattcagaaattaaatgagaagataaacgcacagtatcacgatgaaaaagtagcaattattgatggagagaatcgtgttcatatggcacatatggatattcatttttcgcacagtgtcaacggcgttgcctatctgcatacagagattttgaaaaatacggaactgcataatttttatactctgtatccggaaaaatttaataacaaaaccaacggtattacattccgccgctggctgcttcacgcaaattcactgctttcttcattcttatcggaaacgattggagaggaatacaagaaagatgcggaaaaattaaatgtactttttgattatcgtgatgacaaagcggtctgccggaaattattagaaattaaagacgcaaataaaaaagcacttgcttcttatttgaaacagacacagggaatcaaattgttagacaatgcgatttatgatatccagattaagagactgcatgagtacaagagacagcagttaaatgcgttgtatgcaattcacaaatatttggaaattaaggcaggtaagattccgaaacgtccgattgttcttttgtttggcgcaaaggcagcaccggcgtatgttattgccaaagatattatccatttgattttgtgcttgcagcgtctgattgaaaaagaccgtaaggtgagaaaacatctgcaggttgttatggtagaaaactacaacgtcacaaaggctgaaaaactgattccggcatgtgatatttcggagcagatttcgcttgcctcgaaagaagcaagtggtaccggtaacatgaagtttatgttaaatggtgcaattactttgggaaccgaggatggtgccaatgtggaaattcatgaacttgtcggcgatgataacatttatgttttcggagaggacagtgatacggtaattgcccgctatgagcgtggagattactgctcaaaagattattatgaaaaagattcggagttaaaagaagccgttgattttattgtcagcaagaaaatgcagaaacttggtgacaagacgatgcttacaagactttataacgagttattgaataaagactggtttatgacattcccggattacagagcgtatgtggcagccaaagaaaaagcctatgcggattatgaaaacagggaagaatgggcaaagaaaatgcttgtcaacatttcaaaagcaggtttcttttcctctgaccgcacgatttcgcaatacaatgatgaaatttggcacctgtcagaaggtactaagtaa

SEQ ID NO: 344 - DNA, 2187 bp, Clostridium sp. CAG:62
atgttttggacgattttacaagtaaaaaggaggtatttcatgaaccagaaaaacatcatttccaaactcactctggaagaaaaaatagcgatgattcacgccgccggactttttcgttccggtgcagtgaaacgacttaatattccttcgcttgttatgtcggatggaccaagcggagttcgtcaggaatttgaaaatgacagttggacaccaattgatgatacaacggattttgtaagctggctgccgagtaatacgtgtctttgcaccacgtggaatcctaaccttgcccgtaaatttggcgaagtgttaggggatgaggcacgcggacgaggaaaagatgtcattttagcacccggcatcaacatcaaacggactcctctgtgtggaagaaactttgaatatatgagcgaggatccacaccttatcggacgtatggcagcccctttggtgcagggaatccagtcacaggatgtagctgcttgtgtgaaacattttgccctgaataatcaggagtgtgaccgattaagtgtcgataccaaagtcgatgacaaaacactttttgaattatatctgccggcattttatgatgcattaatggaaggtggctcgtatagtgtgatgggtgcctacaataaatatgacggcgaattttgctgtgaaaatgcaacgcttttaaaaaagattctgcgtgatttatggcactatgatggggttacaatttctgactggggcggcgtacacaacacagaaaaaaccgctctaaatggggttgatatggaaatgtccgtcacaccggattttgacgattataagttagcaaatccacttcttgaaaaagtaaaatccagaaaaatcgacgaatccgtaattgacgagcggattgagcggattttaacaatgatggagcggattaagctcggtgacaaaaccagaaataaaggctgcacaaacacaaaagaccatcagcagaccattcagcagattgcggaagaaggaattgtcctgttaaaaaatgacacggcacatctcccgctttccaaggaaacaaagaaaattcttgtcctcggcgataacgccaaaagaacacatgctgccggcggtggaagtgcggaaatcaaagcactttatgatatttcgccactgcttggcatgcgtatggtgctcgggggtgatgcacagattgactggctgccgggttattacgtggataacgaaaaacatgtaaccggtgaagtcgactggcaggcagaaagtctggatgtagattatacaacagatcgcggaaaagaacagtttgacaaagaaatccgcccgatacgtgagaagtatctgaaagaggcactggatgcctgcccgtcctacgatgaagtcatctttatcggtggattaaaccacgcttacgatgtggaaggatttgaccgcccggacatgacacttccatatggacaaaacgaagtgattgaggctttgacagaaaaatgtaaaaatctcaccgtggtactgatcaacggcggtccggttgaaatgccatggattaataaagcaaactcactgattcagacaagctactgtggcatgcatggcggacttgctttagcacgagttctttttggcgaggtaaatccatccggacacttggcagaaacctatccggttcacctttgtgatacaccgaccgaaaaattcaaatcctatccgggcacagtggataattccggtcagcgtcatgtggaatacacggaaaaattaatggttggctaccgctattatgaaaccgaagaaattccggttctcttcccatttggatacggtcttagctacacaacctttgatttgcatgatttttccgttgaaaaaaacgacgatgaaactgtttgctgccgctgccagattacaaacactggaaacagagcaggtgcacagactatacagctctatgtcggcatcccggaagaagggcagccgaaaaaacaattgaggtcatttaaaaaggtggcactcgccccacaggaaacaaaacatgtttccctctgccttagcaaaaaggactttgccacctataactgtaaaaatcaaacctttgcgataaacgaaggtacctattccttatggattggcacttcggtaaaagatattttctttcaatccgaagtcaccctttcccagagcggaatcgtaaaataa

SEQ ID NO: 345 - DNA, 2439 bp, Clostridium sp. CAG:62
atgaatacaccattatcatggattaaagcttatgtaccggaacttacctgtacagagcaggaatatatggatgcgatgacaatgtccggaacaaaggtcgaaggatatgaaaaattcgatgcagatttggacaaaattattgtaggtaaaattgagaaaattgaaaaacacccggatgcagataaactggttgtctgccaggtggcaattgacgaggaaggaacaacaacgcagattgtaacaggtgcttccaatgtaaaagaaggacagaaagtgccggttgttttggatggcggccgtgttgccggcggtcatgatggtaaaaaagttgccggtggcgtaaaaattaaaaaaggaaaactgcgtggcgtggaaagtaacggcatgatgtgctctattgaggaacttggttcttcaaccgatttttatccggatgcagcagaggatggtatttatattctcagtgataatccggaatataaagatgcgccggttggcagtgatgcgattgccttacttggccttcgtgatgctgattttgaatatgaagtgacaagtaaccgtgtggactgttttggtgttcttggtattgcaagagaagcagcagctacatttagaaaaccatttgttccgccggttgtaacagagagtggaaatgatgaaaagacagaggattacatttccgttgaaattcaggcgccggatttgtgttcccgttatgtggcgcgcgtggtaaagaatattaagattgaaccatcgccggagtggatgcagcgcagactggcagcaagcggaatccgtccgattaacaatatcgtagatattacaaactatgtaatgcaggaatatgcgcagccgatgcatgcgtatgacttagatacaattgccggtcataaaatcgtagtaaagagagcagaagacggtgagaaattccagacactcgatggtcaggagagagaactggattcttccattcttatgatttgtgatggtgaaaaatccgttggacttgccggaatcatgggtggtgaaaattccaaaattacggacgatgtaaagacgatgctgtttgaggctgcctgctttgacggtacaaacattcgtctttccggtaaaaaaatcggtatgcgaaccgatgcacaggcaaaatttgaaaaaggcttagacccaaatactacgatggaagcgatgaaccgtgcctgtcagttgattgaagaattaggtgccggtgaagttgtcggtggctgtgtggacgtttatccggagaaaaaagagccgattgatgtggtttatgatgttgataaaatcaatgcattacttggtattgatgtttccgaagatgagatgtgtaaatattgggaaatggttgagcttgtaccggataaggcaaagaaatgtgttcatgttccaacttggcgtcaggatattctgcgtcttgccgatttggcagaggaagtagcaagattttacggttatgataagattcctacaacgcttccaagcggtgaggcaacacagggcggtgtttcctaccagacaagcatttgcaatatgattcgtaatgtgattgagtcgtatggtttttcggaaggaatgacttattcttttgaaagcccgaaagcatttgataaactgctgattccggaagggaatgagcttcgcaaggcaattgaaatttccaatccacttggagtggattacagtatcatgcgtacaacaccattaaacggtatgcttacctcgctttcgacaaactataatcaccgcaacaaagatgtgcgtttgtatgaaatggcaaatgtatatctgccggaatcccttccgcttaccaaactgccggaagaaaaaatgatgttagcacttggtatgtacggacagggcgatttctttgatatgaaaggctgtgtggaagcaattcttgacagacttggtatcacaacaggtgttacttatgagccaaaaggagaacattcctatttgcatcctggaagaaaagcggatataatgatagatagagaagtccttggctatctgggtgaagtacatccggaagtggcagataattataatctgggaacaaagacatatgttgctgtactggatgttgcaaaattagctgaaaaagcaaactttgatatcaaatatcagggcgttgctaaattcccggcagtaacacgtgatatttctctggttatgaaaaagacagtattagccggacaaatcgaggaagtaatccaaaagagcggtggaaagttgcttgaagattatcatttgtttgatatttacgaaggggaaaatgttggaaaagatgaaaaatcactggcatattccattcgtttccgtgccaaagatcgtacgttagaggataaagatgtatcggctgttatggataaaatcttaaagaaactggaaaacttaggagtaactttaagacagtaa

SEQ ID NO: 346 - DNA, 999 bp, Clostridium sp. CAG:62
gtgattggatgcaaaacagtgcaggaggcggcaaaaatgaccgaaaaacggacggacttagcattagaggcaagagagagttttcccagaaatcatgtagaaatacagggggttgttctggaaaagaaaaaatgtctgcaaggcaaggtgaaaattacgacggtaattattcgggatgaagcaggcagcaaagcaatgaaaaaaccaaaaggaacttatattacaatcgaatcaccacttatgcttcatggagatattgacgagagagagccatttttgctctgtgtctgtgaacagttggaaagtatgataaagggacttcgtaaaaagagcgttttggttgttggattgggaaaccgggaagtgacctcggattcattaggaccgaaaatgacagacgccctttttgtgacgagacattttaaagaagaatttggtgcatcttttatgcaggaaaatggatatggctgtgtgagtgcaatagcacccggtgtcatggcgcagaccggaattgagactgaagaggtattacaggggattatacggaagacaaaaccggatttggtaattgtcgtggacgcattagcatccagaagtgtgcaaaggctttgtacaacggtacagattacagatacgggaattgagcctggtgccggcgttggaaaccgcaggaaggaactaaccaaaaagacgcttggaattccggttgttgcaattggtgttcctacggttgtagatgcggcaaccattatttccgaccatttggagcatgtattagagaaacaggggtattcggaggaggaaattgagcggtttatttatgaaattctgaccgaggaaacaaccgatgtgatggtaacgccgaaaaatattgacgaatcggtgaatcaaattagtaaagatcttgcaaaagtattaaatcattgttttcaaaaacgggataattatggaaacagcagcatatccttttatgaaaaagaagatatgaagagagaatga

SEQ ID NO: 347 - DNA, 1413 bp, Clostridium sp. CAG:62
acaaacgatagaaagaaggataaaaacgtgagaaaactgattcaagagattcataacgggaaaaatataaaggaaaatttaaaacattatgcggatattgccgtaaaaacatatgtggattatggaacgcttgaaatgactttttctgcgtattcgcttttggaagatgaaatacaggtgttagatgcggatgagaaggagaaaatgctctcgcaggtaaaacaggcgattggctgtttggcggatgagtcctgcgatttcgcggtacttggtgaaaaaatgaatcatctgcgggatgaaattacggataaaatggatgttttaactgcgtacacggaccgcatgatttgttatgaatatgtgttaaaccgcatggaattaaaatatctttccaagaaagaattgtcagagaaactggcagcttttgaggaagaagagtacatgaaaatgttagaagggtatttgtttggcagtaaagatcaaaaggtggcacttgataaaattcgtttgattatgggacagattccggttcatatgacaaagaataaattgtttgagcggattggtgaagcacttacgttatatcaggatggcgataaatcggcactggatggctttttgtatatggtgcgtacgagtgcgatgctgtatgagccaaagcaggaagaaaatcagtttccggagattttagaggccctgcaaacgtttgaacagaccgattttgagtcattagagggcgagaaatacaatcaattggtatcacttttggaaaagacagccaaagaaattcatgaaattacggacttttattatgaagtgcaaaatgttgtgaatggtgtgtatgctatggcactgattcttccttaccgtgagaaaatgagtcggattgaaaaagcgggaagaaacgtttggcaggcattggcacaaggagagttaaaagaagaactgttagtgccgttagagggcagcatcgaggagtgtgttgaaaaatccagtcatttggaatcgattttatatgaaatccgcagttcttataagaaagaattgatggaaaccggtcttgccggacaattccacgattttgtattagtggcaaatcttttgtcagacagtttgtttattgacttgtcggtatccggtgaggaagaggaaaaagcagacctttcctacgtgagaaaatgcacagatgaattagtaaatgaactttccaagaagttgagtcaggtgtcaaaaccggtaaaaaaagcgattatgggacttgtccttgaaaaactgccattgacattccaaaattcggatgaggtacttgattatatccgtgttaatctgatgggatgtcaggacaaggcagaaaaatgtgtggtacttacgatgttagcagacttgattcgcgaggagcaggagtggacataa

SEQ ID NO: 348 - DNA, 1206 bp, Clostridium sp. CAG:62
gaaaaatacaaaggagtaggtaaaagaatgaaaatcggaatcatgggcggaacatttaatccgattcataatgctcatttgatgatggctcaggctgcgtatgaacaatataaattggatgaaatatggtttatgccatcagcaaaaccaccgcacaaaaatcaggatgagattgcagaaaaagaacatagaaaacgtatggttcaatttgcgattgacaaaatcccgtattttaaaatttcaaatattgaatataaaagagcggggaaaacctacacatatgatacacttgtagaattaaagaaagaaagagaagatgcgcacttttattttattatgggtggcgactctttagcgcagtttgaacagtggtatcatccggaaaaaattgtgaaattgtgtacgatattggctgcctcacgggatgagatttcctatgagcagacgaaagagtactgcaagcagttaagtgaacggttagatggagattttcgcccactgaaaatacctgccatgtcaatttcttcacatgaaatccgaaaacgtatcaaaaagggaaagtcaattatcggatattgtccggagcctgtggtacgttatattcagatgcaccggttatatggtgactctagttttgtaatacctaaaaacgaaaaagaacagatggactgcttagcggcatcgcttcggccgaaacgatttgttcatacgttaggagttgccaatatggcggcaaatcttgccatgatgcatgatgatgtttcactgcaaagagcaaaattagccggtcttttgcatgactgtgcgaaatatctgacgaatgaagagatgtttgtcttatgtgagaaactggaaattccattgtctgagtccgaaaaaagtacccctgctgtaattcatggaaaattaggtgctaaattagcggtgcttcgatatggtatagaggatgatgaaatttgttctgccattgcctgtcatacaaccggcaagtcgcagatgacgacattagagaaaataatttacattgcggattatattgagccaaaccgtgatatggactgcaaaccatatccgcttgaaagaattcgaaggacagccttttttgatttgaatcaggcaaccggtatgattttaaaaaacacattaacgtatttagaagagaatcagatgccgattgatgaaatgtcactggaagcgtttcattat

SEQ ID NO: 349 - DNA, 936 bp, Clostridium sp. CAG:62
cgattgatttttgtctatttagcacaaaaatcaaaaaacattttaatattaaaaaaggaggaatttgaaatgttcgctaaaatttcaaaaaaggttgtagctgtagctttagttgcaactatggctgttaccaccgctgcagtagcaagtgatgatacagctagcgcagcaatgaagaaaaaggcttctgttatgcagggtaaggaagtaaaattgactgcaagtggaagtgcaacatggtcatccagcaatgataacattgctcactgccagaaaacaaaaggcaagtccatcaaagttcttggtatcaaaaaaggtaccgcaacaatcactgcaactgtaggcggaaagaaacagacatgtaaagtatctgttaaaaacgcaaagaagggtacagtaatttacaacttcgctaaatctactaacccggataaccatccaccatacaaagctgattactctgagttcaaatataactcattccgtatctggctttgtgacgcaacattctggggcgagaaaacttacatctctcctgactaccgtggacgcaaactgaaaatttctttgaaagtaaagaactccggtaaacgtacacttcctgagatgggtgtttgcttcaactatactaagggtggagacacaggtgcttacccatgggctcttcatgtttctgctaagaaactgagcgctaaagttaagaaagacaaaacacataagcactgcaagattgtcacaaaaactatgaagaaaggtaaatcttacacctttaacttcacatttacaattcctaagaatgctgtaaatggtgacacagacaaagatacaggtgctaactacccaatcatgatgtacatcccgaacatgaaagatacttctccatacaaagaaggagattctatcacagttcagaaatgtgtaatcaaagttgcttaa

SEQ ID NO: 350 - DNA, 1197 bp, Clostridium sp. CAG:62
atgttaaataaaaaatcagtagatgatattaatgtaaaaggtcagcgcgtgttagtacgctgtgactttaacgtaccgcttcaggatggtaagattacagatgaaaaccgtctggtagcagcacttcctacaattaagaagttgattgccgatggcggtaaaattattctttgctcccaccttggtaagccaaaaggagagccgaaaccggaactttctttggcaccggttgctgttcgcctttctgaacttttgggacaggaagtaaaattcgcagcagatgataacgtagttggtgaaaatgcaaaagctgctgttgctgctatgaaagatggcgatgtaattcttcttgagaatacacgttatcgtgcagaagagacaaagaacgaagataatttctccaaagaacttgcttctttggctgatgttttcgtaaacgacgcatttggtactgctcatagagcacactgctcaaatgtaggtgttaccaaatatgtagatactgctgttgttggttacttgatgcagaaagaaattgatttccttggaaatgcagtaaataatccggagagaccatttgttgcaatcctcggtggtgccaaagtttcttccaaaattccggtaattgagaaccttttggataaagtagatactttgattatcggtggtggaatggcatatacatttatggctgctcatggtgagccggttggtaaatctcttttggaagaggattacaaacagtatgcacttgacatggagaagaaagcagaagaaaaaggtgttaaacttttgattcctgtagataatatagtagcggatgatttctcaaacgacgcaaacttcaaagttgttgagcgcggtggtattccggatgacatggaaggtctggatatcggacctaagacatgcaaattgtttgcagatgccatcaaaggcgcaaagacagttgtttggaacggaccgatgggatgttttgaaatgccaaactttgcaaaaggaacgattgcagttgctcaggcaatggcagatttgaaagacgctacaacgattatcggtggtggtgatagtgcttctgcttgcaacaaccttggatttggtgacaagatgacacatatttctaccggtggtggtgcttcacttgagttcttggaaggaaaagaacttcctggtgttgcagcagcaaacgacaaataa

SEQ ID NO: 351 - DNA, 582 bp, Prevotella sp. CAG:279
atgatagaatatgtaaaaggagagttgacggagattacgccggcaagtgccgtggtggaatgcggcggggtgggatatatgctcaacatctctttaaacacttatacacgcttgcagaatgagcggcaggcaaaagtttatgtctacgaggcgatacgcgaggacgcacatttgctctatggttttgccgaccgggaggagagggcattgttcctgttgctgataacggtgtcgggggttgggccgaacacggcgagaatgatcctttcgtcgttttccacagccgacttgcaaggagtcatagcctcgggcaacgtgaatctgctcaaggcggtgaaaggaattggtgcaaaaacggctcaacgtataattgttgacctccgcgataaaataaatcagggtgcggatacgttaattattcagtcggaggcgacgtcggaaacttatgaggaggcacaggcggcgctcattatgcttggatttgccaaacctgcggtgcagaaggcattgggcaaactgctcaaggataatcctgcggaaaaagttgagggcttgattaagaaggctttaaagattctttag

SEQ ID NO: 352 - DNA, 276 bp, Prevotella sp. CAG:279
aaaataatcccaaaggcaatggaaaaaagaaatttaagaaaagaacgtgttggggttgtttccagcaacaagggtgacaagacaatcaccgtggctgtaaagtataaggaaaaacatccaatctacggcaagttcgtcaacaagacgaagaaatatcacgctcacgacgagaagaatgagtgcaatgtaggcgatacagtgcgtttggtagagactcgtcctctgagcaagacaaagagatggagattagtagaaatcattgaaaaagctaaataa

SEQ ID NO: 353 - DNA, 336 bp, Prevotella sp. CAG:279
aatgaaagagccgtgatgcacccacctacaaatttcaaattttatttttggtttttcagaaaaatcatatatatttgcaatcgattcaattttgttcttatgccaactttatttaaacatataaaaacctgtcctgctaagatttttaatttctatgcaaatggattcaggcaaatgaccgttggaaggactctgtggctgattatccttctgaagctaatcatcatgtttgctattctaaaaatatttttatttccggacttcctcggaggcaaatgtaaaacagatgaagacaaagccaattacgtccggtcggaattatcaaaccgcaactaa

SEQ ID NO: 354 - DNA, 339 bp, Prevotella sp. CAG:279
aggatgctgaaacgactgtttgccatattgctgcttgtcgtagcaaccggaacaattccggctgcatcccagtcgcgctacgcatggaaagacacttatgtgacaacgtcgatgaaccccgtaaacaatccccgcgccaacgacggcattgaagtgtacacccgcccgggagcgttgattgtgcgatgtccggagcgcacgaatgtggttgttatgaccatcctcggtcagaccatctcaaaagccacaataaatgccggtacacacgaactgcgtatcggcactcacggaatctatattcttaaacttggcgacaccactgtgcgcgtcgccctataa

SEQ ID NO: 355 - DNA, 261 bp, Prevotella sp. CAG:279
atggcaaatcataaatcatctatcaagagaattcgtcagactgagacacgtcgccttcgtaaccgttactacgcaaagactgcacgtaatgctgtgcgccgtcttcgcgcgttgaacgacaaggctgaagtagtagaagcttacaacaaagttagctcaatgttggatcgtcttgcccgcaagagcgttatctcaaagaacaaggcagctaacttgaagagcaagctcgctaagcacgtagctaaggttcaagcagcataa

SEQ ID NO: 356 - DNA, 546 bp, Prevotella sp. CAG:279
atgctcatcgacgatactgaaatagtcaaaaggcttcacgacccgaaacaatgcagggaggcattcactgagatcatcaagacctacagcgagccactctattggcaaatacggcgcatggtgatgaaccatgacgacgccaacgacttgctgcaaaacacgtttctgaaggcttggtcaaacatagagaacttccgcggcgacgcgaagctctccacctggctgtataaaatcgccatcaacgagtctattacgttcatcaacaaggaaaagcagaaacaaaacatttcaatcgacgatgacgactcgtttctcgtaaactcgcttgaaagcgaccaatggtttgacggtgacgagctgaaactgttgctgcaaaaagccatcgcaaccctgcccgagaaacagcgcatgattttcaacatgaagtatttcgacgagatgaaatatgaggacatgtcggaaatcctcgggactacggtgggtgcgctgaaagcttcataccaccacgctgtaaaaaaaattgaactttttttctcgcagaattaa

SEQ ID NO: 357 - DNA, 570 bp, Prevotella sp. CAG:279
tgctccaaaagtagaattttaatgaaaaaatttcctttattggcgttgttccttctggtgctctcggcgtgcaagctcgatccggtgcgcgacgtgtgggagtactatgaggactggcgcaatgaaaacaatgcgtggctggcacagcaggaggcgcgcacaaatgccgacggcacaccttactatcagaaggtggtaccggagtttgaccgcaacgcctatgtgctgattcattactttaccgaccgttcggcgacggagggcaacttgtcgcctctgatttcttcgactgtcgacgtgaagtataagctgcttacgtgcagaggtgtcggcgtcgattccacctacttgctgacgtcgcctgccgacagtgtttaccgctctaagttgagtgccaacatcaccggtttccaaatcgcgttgatggctatgaacgtgggcgattcgtgcgaggtggtgattccttaccagcaggcttacagcaactctggcaaaggcacgatcctgccttactcgcatctgcattatttcttgaaactcaaggatatatataagtatcaaaagaagtag

SEQ ID NO: 358 - DNA, 273 bp, Prevotella sp. CAG:279
tcaaatgcgtccggagggttacgaccgatgattacgcgcgccggtatcgagaccgcctattgcttcctgcaccagaaggagcgtgtctatgcccattcgacaatggactggcagcgtgacgacatcgagtatgccatttcctcgtttgccgacgacatgaatcctgagctgtattccttgctggcagacggccgcacagactttctgcgttcgcacgccacgtttcatgccgatatgctccacgctctcgacatccttgaaaagatgctctga

SEQ ID NO: 359 - DNA, 474 bp, Prevotella sp. CAG:279
atgaaaatatgcctattcgttgtaggaaaaacaaatcataactatctgtcgccaggcatcgaggactacagccggcgggtgaaccgctacgtgccgttcgcaatacaatatatcgccgatgcaaaaaacacccgcaatctgacgcaagcccagcaaaaggttgccgagggacagaatctgctcgccgccttcgagccgtcggactgcgttgtgctgctcgacgagcacggcaaagaaatgaaatctatggaattttcagcatatattgaaaagaagatgcagaccgtaggcaagcggttggtgttcgtagtaggcggaccatacggattttccgacgatgtctatgcccgtgccaatggaaaaatatcgctgtcgaaaatgacatttccgcacgacttgatacgccttgtgttctgcgagcagctctatcgggcatactccataatgcacaacgagccataccatcacgaatag

SEQ ID NO: 360 - DNA, 744 bp, Prevotella sp. CAG:279
atggctactaaaatattcggattaatcggctaccctctcgggcattctttctctcggaaattctttaacaacaaattccgcaacgaggacatagatgccgaataccgcaattttgagattgacgacatttcacttgccgaaaacattttcctccaatccgaaatatgcggtctaaacgtgactatcccatacaaacaacagataatccctcttctaaacgaagtggacaaagacgcgcaagcaataggctctgtcaatgtcatcaaattcgtgcgcaagggcgagcttgtaaaaacaatcggcttcaacactgacatcatcggatttcacgactctattgctccacacatccggtctcaccacaaatctgccttgattctcggcacaggcggagccagcaaagccgtggctcattgcctacgctctctcggaatatcaatcgattttgcttcgcgcacatcaggaaacgggaaaatggcttatacagacctgacggagcagattgtttcctctcatcaaattattgtcaacacgacacctctcggaatgtttcccaacgtagacgcctgccccgacatcccctatcaagggatctcatcaagccacatctgctttgacctgacatacaaccctgcagaaacattgtttctccgcaaatcgaagcaatacggcgccgacacaataaacggtatggaaatgcttatcggccaagccctcgctgcctggagaatctggaatgactaa

SEQ ID NO: 361 - DNA, 543 bp, Prevotella sp. CAG:279
acagctacgggcgcacgctccggcaacatgacgctcgccgtcaactccctgttcatgcaactttatctgctctactcccatttcatggacgggtttgcatacgccggcgaggctctcgttggcaaatatgccggcgccgccgacaagcgttcgctgcgtcgctgcgtgtcgcatctctttgcatggggatggagtctcgccgcaatattcgctttcgcctatggcgtcttcaaccacgaagtaatgtcgctgttcagcgacaagcccgaggtcgtagcgtttgccgcagcctaccgatggtggatagccctcgctccgatagcaggtatggcggcgtttatctgggacggcgtgtttgtcggacttaccgccacccgacagatgctgttgtcgctcgcaggcgcgacagcagtctatttcgccatctattttctttccccttttcccgacgccaacagcagtctttggacagcctttttggcatatctcgccgtccgcggagcgatattatggctctgttttgcccgcaaaaacgaatattga

SEQ ID NO: 362 - DNA, 339 bp, Prevotella sp. CAG:279
atggactacaagagatcgaatgcgccgcttaacacggttactcgcgatgtgatcaaactttcacaagacaccggcaacgtgtatgaaactgtttgcatcatcgcaaaacgcgccaaccagattgccgtagagatgaaaaaggacttggaaaagaaacttcaagagttcgctactctcaacgacaaccttgaagaagtttccgaaaacagagagcagattgaaatctcccgttactacgagaaattgccgaaacctgtgcttatcgcaactcaggaatacatcgagggcaaagtgatgtacagaaacctcgttaaggaaaaagaaaaagtgagcctctaa

SEQ ID NO: 363 - DNA, 372 bp, Prevotella sp. CAG:279
atgaagagacttttgcttgtgataatcgcaatgatgtcgctgcttccggcattcgccggcgaaaaggcgaagatgacgctcgtgacaaaagtacatgactttggatatgtcaaggagaaaggcggcgacgtgacatgctggttcgagtttcgcaacactggcgacgagccgttgataatccgcacggcgcgctcttcgtgcggctgcacaaagcccgcttatccaaagaagcccattgcccccggcgagactgccaaaatcggagtgacgtataagcccgacggccgccgcggagcgtttgacaagaccgtcacggtggtgaccaacggcgggacggcgtatttgaggattaaaggcaacgtgataccgtaa

SEQ ID NO: 364 - DNA, 456 bp, Prevotella sp. CAG:279
atggcaacttggtttgaatgtaaagtgaaatatgagaagttgacagaaaatggtcaacaaaaagcggtaactgaaccatatttggttgatgccttgtcgtttactgaggctgaggctcgaattatagaagagatgactccgtttgtgacaggcggtgagctgaaggtgacggctgtaaagcgcaccaatatcgcagaaatcttctgggacgaggagggcgataagtggtataaggttaaggtgaacttcgtgaccattgatgagaaaactgcagtggagaagaaaactgccaattttatgatggtacaggctgcggatttcaagaaagcctacgacaactttatggaaggaatgaagggtacgatgtccgactttgaggtggcctctatcaatgagacaatgataatggatgtctataaagaggatttaggtggaaacgagggcgcacaggcataa

SEQ ID NO: 365 - DNA, 588 bp, Prevotella sp. CAG:279
atgaaacacgaactaccaaaactgccgtggcaggcggacgcattgaccggcgccatcagtgccacaactattgacttccactatgggaagcatacgcgcacatatcttgagaatgtagacaaacttgcagctgaaactccattgtcggagttgccgctcgacgggattgtgcgagtcgccgacggcgcgttgctcaacaatgccgcccaggcatggaatcatcttttctatttcgacgcgctgtcgccatcgccaaagccagcctccgacaaggcttttcttgccgcagtggagcggtgcttcgggtcggtcgatgtgctgaagacaaagatggagcagtcgggagcagcgttgtttggctccggatggacatggcttgttgcagactccgacaatcatttgatggtaatcaacacaccggatgccgacaccccgttgaggatggacgggctgcacccactgttgtgtatcgacgtgtgggagcacgcgtattaccttgactatcagaatcggcgcgctgactatcttcacaacatctggaacgttgtggactgggaggttgtggagcgtcgtttttccggaaagtaa

SEQ ID NO: 366 - DNA, 852 bp, Prevotella sp. CAG:279
aataattatcaatcatgttgcggaattaagggaaggaatataaaaacaaacgatacaatgaagcaatacctggatctgctccgccacgtaaaggagcacggcacaatgaaaggcgaccgcaccggcaccggcacgaaaagcgtgttcggataccagatgcgcttcaacctcgccgacggctttccgctgctgaccacaaagaaactccatctgaaatcaatcatctacgagctgctgtggtttctgcgcggcgacaccaacgtgcactatctgcaggaacacggcgtgcgcatctggaacgaatgggccgaccccgacggcaacctcggacatatctacggctaccaatggcgctcatggcccgactacgacggcggcttcatcgaccaaatatcggaagccatagaaaccatcaagcacaaccccgactcacggagaatcattgtcagcgcatggaacgtagccgacctgaagcgcatgaacctgcctccctgccacgcattcttccaattctacgttgccgacgggaaactgagcctacagctctatcagcgcagcgccgacatcttcctcggcgtgccgttcaacatcgcttcctacgccctgctgctcatgatggtggcacaggtcaccggacttgaagccggagaatttgtgcatactctcggcgacgcgcatatctacaccaaccacttcgagcaagtggaggaacagctgaaacgcgacccgcgcaagctgcccacaatgcgcatcaatcccgacgtgaagagcatcttcgacttcaaatatgaggacttcacactcgaagactacaatccgcatccacacatcaaaggcatcgttgccgtataa

SEQ ID NO: 367 - DNA, 705 bp, Prevotella sp. CAG:279
atgccgactaagagaattgttcaggaccccgatttcggacgtatagagatacgcaccaaccggcgcgcgcgcaacatcacaatgcgtccgaaggacgacgggctgcacgtgacggtgcctccctatacgtcgcttgcctctgtcctcaaagccatagagccgcatcggcagacgcttcgtgagggatgcgagaagttgcgtccgcggctgattgactttgatttcacaatcgatgcgccgtgcttcaaactgtgtgtcgcctcgggcacacggcaatttttctcggtgcggtttgacgacgacaaggcaatggtgttttgcccgcccgacactcagttcagccgtccggaagtgcagaagttgctgtcggcagccgttgtcagggcaatgaaacgccgggcgcagcagtttttgcctccattgctcgccgaacttgcctcgatgcatggtctgacctataagaaagtgcgtgtcactggagcgcgatcgaaatggggaagttgcacaagcgcaggcacaatcaacctgtcgtgctacctgatgctgctgcctccacatctgatggactacgtgctgcttcacgagctggcgcatacccgagagatgaatcacggtcagcaattctatgcgttgctcaactcgatgaccgatggcatggcgttgcagctgcggtcgcagctgcgtgctttccgcacatcgttttag

SEQ ID NO: 368 - DNA, 357 bp, Prevotella sp. CAG:279
atggatttgattaaagttgccgaagaggcatttgcaaccggcaaacagcatccggagttcggaccgggcgacactatcacagtggcttaccgtattaaagagggtaacaaagagcgtatccagcaatatcgcggcgtagtaatccgcatttctggagaaggcacaaaaaaacgcttcacagtgcgtaagatgagcgacaacatcggagtagagcgtatcttcccgattgagtcaccgtttatcgacagcatcacagtcaacaagtttggtaaagtgcgtcgtgcaaaattgtactatctgcgcaaccttacaggcaagaaggctcgtatcaaagagcgtcgtgttgtcaacaagtaa

SEQ ID NO: 369 - DNA, 273 bp, Prevotella sp. CAG:279
gaaatggcacataaaaaaggtgtaggtagttctaagaacggacgtgaatcggaaagcaaacgattgggcgtcaaaatcttcggtggtcaatttgctaaagcaggcaacatcatcaaacgtcaacgtggcacagttcaccatccgggtttgaatgttggcatgggtaaggaccacacattgtttgcgttggtagacggtacagtcaactttacagaaggtaaaggcggccgcaagtttatcaatgttcaaccattggacgctggcaacaattaa

SEQ ID NO: 370 - DNA, 525 bp, Prevotella sp. CAG:279
atgttaaataaaaaagtagaagaagcactgaacgcccaaatcaatgcggaattttggtctgcctatctctatctttcaatgtcagcctattttgaggcagaaggaaagagcggctttgccaattggttcaaagttcaattcaaagaagaacaggcacacgctgaaatatttatgaatttcatccaatcccgcggaggccgtgtcattctcaaagccatcgatgaagtcccgacatcttgggaaagcccgcttgatgtgtttaaagaaactcttaaacatgaacaaaaagtaacatcgttgatcaatgagctatactccattgcagaagaagcgaaggactatgccacaagaaacactctcacatggttcatcgacgagcaagtagaagaggaaaagactgcgcaggagtatatcgacacgctcagccttatcggagacaacggttatggcttataccaacttgacaaagaacttgccgcaagggtatacaacattcccgcgcctcttgcaaacacgggcaactaa

SEQ ID NO: 371 - DNA, 1026 bp, Prevotella sp. CAG:279
atgaaaactgtctgcttaaacatattggttgtgctgctgtcgattgcaagcctcacggcatgccacgacgagccccagtttgccgacacgccgacaggcaatttcgaggcgctgtggtcggctctcgaccgccattactgcttctttcaatacaaaaacgtagactggcaggaggtgcacgaccgatatgccgcgaaaatcagcaacagcatgacctctgaagagcttttccgcgtatgctccgagatgcttaaagagcttaaagacggacacaccaacctgtcgtcatcattcgacacgtcgcgctactggatttgggagcaattcccgcaaaactacgacgagcggcttgtggaggaacactatctgcactttgactaccgacgcacaagcggaatctcataccgcatcctcgacaacaattatgcctatatgcgctacccgtcgttctcctacagcatcggcgaaggcaaccttgacaacgtgctggcaacgctcgcccttgccgacggtctgatcatcgatgtgcgcgacaacggaggaggcatcatcaccaatgcggagactctcgtggcgcggttcatcgacaagcgcattctcgcaggatacatctcgcacaagaccggctccagacacgacgatttctccgagccatacgcttactacatcgacccggcaaaaggcagggtgcattggaccggaaagccgatagccgtgcttacaaaccgttcaacctacagcgccgcaaacaatttcgtgtcgataatgaagagtctgcccaacgtggttgtggtgggcgatgccacaggtggcggatgcggaatgccgttcacgtcggaactgcctaacggctggagcgtgcggttcagcgcggcgcctatctacgacgccgaccgacagctcacggagtttggagtgcagccgaccgacggctgccagactgatatgaccaatgccgaccgtcaacgaggcgtggacaccatcatcgagcgtgcgttcgaagctctgaccgacatgcaacgataa

SEQ ID NO: 372 - DNA, 477 bp, Prevotella sp. CAG:279
atgcgtcaagcgtttatcatattctctgcagtcattgcccttttggcgtcggctaaaaccaacaccacacgtcctgtggcaggcatctcggaaaaggcattgttgatgaagacaatcaatgcggaaaacgacaccgcttcgtttgccgacaaaataatcctgtcgggctacaagaagacggtcaacgacgcgtttgagtcgttctttgtcgacaaccagacgcctttcctcatttcacacctgacgctgaagttccagtatacaaacgcactgaccggacaaatcataaaagaagcaacctatgaagtgccgtgcgacattccttccgggcaaatgcggcagctgagcatccgcactttcgacaagcagcactccttctactatgcaaactcacgcaagcccaaccgtccggcaacgccctacagcataagctacaaacttatggcatacgacatccgcatcacagtggagaagtag

SEQ ID NO: 373 - DNA, 387 bp, Prevotella sp. CAG:279
atgctgaaattgtgtatcaattcgcgcgacgaactgtttgtgctcgaccttgacaaggtggcatacatacaagcgagcggaaattactcgcgtatcgtctatatcggcggaatgcagatgatgataacgcttggactgtcgaaattggagggaatgataaagatgattgtcccgaaagaccgccggagcccgtttgtgcgacttggacgcagcctgcttgtcaaccaaacctatctgacccacatcaatgtgttgaagcagcggctgacgctgtctgacaatcaggagcattcctatgtgctcgacgtgcctaaagcattgttgaaggcatataaggacttgattagaaaaagtttcgccgagagaattaaaaacaaagaggagtag

SEQ ID NO: 374 - DNA, 483 bp, Prevotella sp. CAG:279
atggaaaaaatagcaagttttacaataaaccacttgactctcaatcggggtatatacgtctcccgtaaggactcaactgaacatggtgatataatcaccactttcgacgtacgtatgaaagagccaaatcgggaaccagctgtaagccagtcggctctgcacacaatagagcatctcgccgcaacttttcttcgcaatcacaagcagtggaaagacaaaatcgtgtattggggacctatgggctgctgcactggcaactaccttattgcgaaaggcgaccttgcttcatccgacattctcccattgatggttgagacttttgaatttatccgcgatttcgacggcatcattcccggagccacacctcgcgactgcggtaactacctgctcaacaatctcccaatggcaaaatgggaagcaaagaaatatcttgacgagacactatatgtggcaaccgatgacaatcttaattatccagactaa

SEQ ID NO: 375 - DNA, 636 bp, Prevotella sp. CAG:279
aaagccacttccacttcatcctcggtcaagaattctaaaaaaggcgtaaatatcctttcacgaataaacccacagcaaatttcattgtcatacaaaacatacacaaaaaccaaaacgactatgaaacgattttttatcacagcagcaatcgtagcgatattctcaattgccgcacacgcgcagaaatatgcgctcgtagacatggaatatatcctcaaaaacatcccgcaatacgagatggccaacgagcagctcaaccaggtgtcgctgcgctggcagaaagaagtagaggctaagtcgaaagaagccgagacgctctacaagaactaccagagcgacatggtgtttctgaccgacgagcaaaagaaaaagaaagaagaggaagtggtggctaaagaaaaagaagccgccgaactgcaggcaaagtacttcggcccgcagggtgaactctacaaaaaacgccagtcgctgatggagccaatccagaacgacatctatgaagccatcaaaaagctctcggaagagaagggctaccaggcgattttcgaccgcgcgtcgtcggctggcatcattttcgcttctccacgcatcgacgtgagcaatgatgtgctcgcaaagttaggttattcaaaataa

SEQ ID NO: 376 - DNA, 507 bp, Prevotella sp. CAG:279
atgaagaaaattggcatactttccgacacccacggatattgggacgaccgctacgctacgcatttcgcaggatgcgacgaaatttggcatgccggcgacataggaaccgacgaggtgatcgagcgtctgaacgccatcgctccggtgagggctgtggctggaaacatcgacgggcaaccgatgcgacgcactctcggcacttggcgcgactgggaaaccgacggagtgcgcgtggcgatgacccacatcggcggatatcccggaaaatacgcgcctggggtgaaattcaaactcgaggtgaagcgtccgcaaatcttcgttgacggacacagccatattcttaaagtgatctacgaccgccaactcgggctgctgcacatcaacccgggagctgcgggagtctacggctggcaggcggtgcgcacactgattcgcctgtatgtggactgcggaacgataaaggatctcgaagtgattgaacttgccaaaccgacaaaattaaaatag

SEQ ID NO: 377 - DNA, 762 bp, Prevotella sp. CAG:279
atgggcaaaaataaattgaagaaattcggggagatggaaacattccccaacgtgttccaatatccattcgcagaattgcagaaagggccgtttccattgaaaggaaagtggaacacagagtttttcaagaacgacaaccccatagttctggaacttggttgcggcaaaggagaatatgccgtcggcatggcaaaaaaatttgccgaccgcaacttcatcggagtcgacatcaaaggcgcccggatgtggaccggcgccaagcagtcggtgcaggaaggcatcgccaacgtagcgtttctccgcacgagtatcgaactaatcgcctccttctttgaggccggcgaggtgtcggaaatctggataacgtttcccgacccccagatgcagaaagtcaacaaacgcctgacgtcgacccgcttcatgcaactctatcgccagatattgaaagacggcggactcgtgcatctgaaaaccgacagcccgtttctttatgcctataccgacgccatggtgcgtctgaacggcttcgccaccgaggtcaacaccgacgacctttatcacagcggacttgccgacgatattctcgaaatccgcacgttctacgaacgccaatggcttgcccgcggcttgacaataaaatacatcaactggcatcttgacgccaccacggcgcttcaggagcctgaaatcgacatagagaaagatacctatcgcagtttctcgcgcgggtatcttgaaacagaccctcaatattcaaagtaa

SEQ ID NO: 378 - DNA, 504 bp, Prevotella sp. CAG:279
tcagaattctgttgcatttgcaagttgaattcagctaatttaaaaatcgacatgatccgcaaatcaacccttatctcttttcttatcgcaataatccttgcgccttgcgctctgtcggctcaaagcacggcggctcaacgggcgagatggatggagcaaataagaaaaactaaatttgaattcttcaccaaagaggtgaatctgtcaaaagagcagcaaaaccaactgtttccgctatatgaggaaatggaaaagaccatctacaagatgaacagcgaagcggaggctctgatgaaaaaaacggctgccgacacaaatgcatccgaaactgaatttgaagcggcggcgacagcaatggctaaaaccactctacaacagggtgagattgaattggattatttcaacaagttcagcaaattcctgtcgaaaaagcaacttttccggctaaagcaggcggaagaaaaattcacccaatatttgctgaaacaacgacgctcgaaataa

SEQ ID NO: 379 - DNA, 675 bp, Prevotella sp. CAG:279
atgaaaaagtcgataatggcgtcgctgcttctggcggcgacgcttttttcaagcgatatggcggctcaggaaaaatatgtctacaatgaattctatttccagcgctcctcgcttttcagcgagctgccggtggggaagaaagacatcgtttttctcggcgacagccagaccaacggttgcgaatggcacgaactgctcgggatgaagaacgtgaaaaaccgtggcatctcgtcggacgtgattcagggtttcatcgaccgtgtcgacccgattgttgaggggcagccggcgaaggtgtttattctcggcggcgtaaacgacatctctcacgaccttactcccgacagcctttgcacgtcgatggagaagctgattgtgaaaatcaagcaagggtcgccacgcaccaaaatctacttgcagagtctgttgcctatcgacaacagtttcggccgctaccgcaagatggtgggcaaggagcaggtgattgtggagaccaaccgcttgtataaggagatggctgagcgccatggcgtgacgtggattgacctgtactcaaagatggtagaccctgccacgggcagcatgcgcaagggtctcaccaatgacggtctgcatctgcttggcgccggatatcttgtgtggcgcgacgcggtgctgccttatgtgaagaagtag

SEQ ID NO: 380 - DNA, 792 bp, Prevotella sp. CAG:279
atggaactgttcggactgataggaataaaggacattatagatattctgatagtggctacgctgctgttctatatctataagattatgaaggagtcgggcacgctgagcatttttctcggggtgctggcattcattattgtgtggtttgtggcttcggtgttcttgaaaatggagcttacggggcgcatactcgacaagtttatgaacataggcttgctgattcttgtaatcctgtttcaagaccagattaagcggtttcttgtggaaatcggatcgcatcagcgttggagatttgtccacaatctgtttcgtcgccgtcagaccgacgagaagccgcaggcttcttggattctgccgattgtctacgcctgtctcaacatgtcgaagtcgaaaactggtgcgctgattgttataaaaggtgttgtgccgcttgacagctacgagaagtctggcgacattatcgacgcggaggtgaacggacggcttatcgaaaacatatttttcaagaacagtccgcttcacgacggggcgatgattgtggctggcggacgcataaaggcggcaggatgcatcttgcctgtgtcgcacgattccaacgtgccgcgtcagctcggactgcgtcaccgctcggctctcggcatctcgcagtcgaccgatgcgatggcgataatcgtgtcggaggaaacgggcaacatctcggtggcttgtggtggcaaactgtcgttgcgcctgagctcgaccgacctggaggcgagaattaaccaatttgtttctggaaatacagacaaataa

SEQ ID NO: 381 - DNA, 543 bp, Prevotella sp. CAG:279
cagaaaaatcaaagagtacggactggaatgaacaaattaaaatacatctggattgtggcggcaatgattgtcgcactgagcgcatgcaccatcagctacaagctgaacggcgccgccatcgactattctatctacaagaccatcaacgtcgggcagtttcctatccgagcggcaatggtctacgctccgctgcagccgatgtttgagaacaagctcaccgacacatacaccaagcagacacgactgcggattgtcgacagctcaaacaccgatctgagcgtcgagggagagattacaggctactcgctcaccccgcaggcggtgaccgaggacgcatacgcatcaaagacaagactgacaatatcggtgcgcgtgaaatacaccgaccacaagcagccgaagaactcaatcgaccagtcgttctcggcgtttcgcgacttcgactcttctgagatgctgaccaacgtccaggaccaactctgcgaggaaataaccgaggaactcgtaatgctgattttcaatgccacagcaggcaactggtaa

SEQ ID NO: 382 - DNA, 561 bp, Prevotella sp. CAG:279
cgtgtttgctgtgcgactgagtataagagatttaggaaatttattggtaaaaaaccaataaaatatttgcaaatcgccatttttgtgtattatcttcgcatcagatttccaagaaaaacacacaaatcaaaaccgagaattatgtttgagcacaaaatcatgagaaaccaagaactgatggcaaactggcaacgcagcctgaagaaagccatcgaaaccaaccgctacgacagccgttacaacgtgatagaccgtgcgctccgcggcggcacaccacgctacgacgtgagttacgactacgcgttgcgaatgatgtatcagatggtgcgcgacggcaagccatgctcccgccggagtaaactgaagcgtcagatgtgggaggagataagcctccacgtcaggcgcgtcatgcacaggcgcaaatgcacgattgccgaagccgtggcgacagtgcttgccgagcaaaaagcgtcacgctacttcctgtcgaaaaaacaagcttcaaaaatcatctaccatgaaatacacaaccgcagcaatcatcgtagcctcactgtttag

SEQ ID NO: 383 - DNA, 453 bp, Prevotella sp. CAG:279
agcgccgcccgattgaaaatgcgaaaaaagagattaattaacagtaataaaaaaaaaactaaaatgcctactattcagcaattagtaagaaaagggcgcgtagttttgaaagacaagagcaaatcgccggcgttggacagctgtccgcagcgtcgtggcgtttgtgtgcgtgtctacacaactactccaaaaaagcctaactcggcaatgcgtaaagttgcgcgtgtaagattgacaaacggtaaagaggtgaactcttacatcccaggagaaggccacaacttgcaggaacactcaatcgtgatggttcgcggcggacgtgtgaaagaccttccaggtgtgcgttatcacatcgtacgcggcacattggatacagccggtgttgcaggcagaacacagcgtcgttcgaaatacggagcgaagcgtcctaaggcaggtgcagccaagaagtaa

SEQ ID NO: 384 - DNA, 888 bp, Prevotella sp. CAG:279
atgagcaggatcatcagattaggatacattcagcaagccaacagcgcctgcataagcaagaatagagaaaaccttgtcgcaaaaataaaacgcttggcaaacgacggcgcgcaacttgtggtgctgcaagaattgcacgatagtttgtatttctgccaaacggagagcgtcgacaattttgacttggcgatagacattaacggcgaagaaacaggcgtttattccaacgtggcaaaaaaatgcggcatagtgcttgtgacatcgctgtttgagcgcagagcgccggggttatatcacaacaccgccgttgtttttgaaaaagacggatccgttgccgggaaatatcgcaagatgcatattcctgacgatccggcatattatgagaaattctactttacgcccggggatataggttttgaaccaatccagacatctgtcggaaaacttggtgtattggtttgttgggaccagtggtatccggaagcggctcgattgatggcattgaaaggcgcagaattattgatataccccaccgccatcggatgggaaagctcagacgatgaagcggaaaaaatgcgtcagcgacaagcgtggatgctgtctatgagggggcatgccgtagccaacgggctgcctgttgtcgcagtaaacagagttggacacgaacccgacccgtcgaatgcaaccaacggaatccaattttggggcacaagctttgtagcgggacctcaaggcgagctgattgatgaagccgctaccgacagcgaggcggagaaaattgttgcaatagatttgacaagaagcgaacaggtgagacgctggtggccgtttctgcgtgatcgacgcatcgacgcttatcaaaacatcctaaagcgttttgatgactga

SEQ ID NO: 385 - DNA, 255 bp, Prevotella sp. CAG:279
atgaaaaaagacattcatccatcaaactatcgcgaggttgttttcaaagatatgtcgaacggcgaaactttcatcactcgctcgactgtcgctgctaaggagacaatcgaaatcgacggcgttacttacccgctcgtaaaactcgaaatcacgagttcttctcaccctttcttcactggtaagcagaaattggtcgacacagccggccgcgtagacaagttcatgagccgctacggaaaccgtctcaagaaataa

SEQ ID NO: 386 - DNA, 294 bp, Prevotella sp. CAG:279
gaattaaacaacagaatttttaacattaaaaattatagtatcatgacgaagactatttcttttaacgagttgagaaaaatcaaagattgcttgccagacggttctatgcacaaaattgcagaccgtctgaacatcaacgtgcaaacagtgagaaactattttggtggcactaattattccttcggaaagaactgtgggcttcacattgagccaggtcctgatgggggaatcgttgttttggacgacaccacaatatatgatatggcattggatattttgcgtgagcaagaatag

SEQ ID NO: 387 - DNA, 660 bp, Prevotella sp. CAG:279
gtttcgttcatcgtcttttctgtttttcccgacagcacaccgacaaccatcagcgccgccagaattatttttgtcttcatgtatgcaaaattacactttgagcagcaaccatttattaccaaaatcacggattggacaacacattttgcagaattgcccaaaacttttctcaacattcattgtttatacaataaaatcatactaacttacatcaaaaacctgaacattatgaagaagtttttcatcgctacaattcttgcagtcgctgccgttcttccggcatcagcacaagtacgttcactcgatatgaaagcaaacctccgcagcgatttcggccttggcatcggagtgacattccagctgccgcgcaactttgagttcgccccgtcgctcaactattatttcaacgacagcaacacgctgactatcgacggcgacttccgctatcgtttcgagctgccacgcaacttctcgctctacccaatcctcggtccagtgttcttccacgccgacgactacaacaagctgggtgtcgacataggcctcggattcgcatacgacatcaattcacactgggctatcggagctgaaggcaaataccaatatgtcgacgattgggacgatgcgtatctgtcgttctgcgcttcttacaaattctaa

SEQ ID NO: 388 - DNA, 645 bp, Prevotella sp. CAG:279
atgaatacaatagaacttgtcaacactctgccgcgggtgtttgccggacaaccgggcatccagtcggaagtgtggttgaagacgctccggtttgagcgcggaaaaaaatatctgatttcggcggaaagcggttgcggaaagtcgtcgctgtgcgcatatctctacggctaccgcaaggactatgaaggcacgttcctgtttgacggtcgctctatagacgagctgaccgtggaggagtggtgtgacgtgcgacgtcgccacattgcctatctgccgcaggagatgcgactgtttcctgagcttacagctttggaaaatgtggagctgaagaaccggcttaccggacataagacaactgccgagatccgcagcctgttcgagcggctgggggttgccgaccgcgccgaccgtccggtgggaaaattgtcgataggacagcagcagcgagtggcaataatacgcacggtgtgccagccgtgcgactttttcctgctcgacgagccggtgagccacctcgacgagacaaacaaccgtatcgttgccgacattatcaccgaggaggcggcacgcattggcgcggctgtcattgctacatcggtgggcaacaatcttgacatcgcagtggaggaggcactgaagttatga

SEQ ID NO: 389 - DNA, 822 bp, Prevotella sp. CAG:279
atgattgatttcaaggatattgcagcgacatcaaaactatataatttccatagccacacgcagttttgcgatggccatgcagagatgcctgaatttgcggcaaaagcggcagagatgggattctcacactatggcttctcgccccactcccctgtgcctatcgagtcgccgtgcaatatgaaaaccgacgacgtggcggagtatctcggcattttcaaccgactgaagcaagaatacgcggggcaagtggaattgcttgtttccatggagattgactatcttggcgactattggggaccatcgaatgaatatttcagcaaactgcctctcgactatcgcatcggctccgtgcatttcatcccatcaggcgacacaatggtcgacaccgacggacacttcgactcgttcaagacaaaaatggcattattcttcgacaatgacattcgctatgtcgtcgacacattctacgaccagacactgaaaatgattgccgccgggggacttgacattatcgggcatttcgacaaaataggtcagaacgcatcttatttctctccaggaatcgaggacgagccgtggtatgccaagcgcgtggaagaagtgatggaagccatcaaagatgcgggcattattgcagagataaacaccaaatcaatgttccagcaccacagattgttccctaacgagcgttatttcaagcgtttgaaagagattggcattcccgtggttttcaattccgacgcccactaccccgacctcatcaatgccgggcgtatggaagcaatgacaatctacaacaatctacttgagttcaacttataa

SEQ ID NO: 390 - DNA, 471 bp, Prevotella sp. CAG:279
agatgcaaaattaagacacaaatgacaaaattcaaaataggcgacgagtggtggaccactccgacagaaagtgaaaacggcaaccgcataatcgttaccggacgccgtggcgtggaaaatgccattgcatcaggcaaattcaacgaccgtatagaaataacgtggaaatatgattccgataaaaacgggatgcccgactttaagacgtcgtcgctgatggaggctgtcaccgatgcgctgaacgccgccttcaaaaaagaccaagccgccattctgacaggcatctataccggtgacggcgagcgcaactgggttttctacacacggaatctgaagaaattccaatacatcctcaacgatgcgctccatgacatggaagtgctgccactgacattctatgccgagaacgaccccgattgggaaggatatcaggaaatgaaggtcaagaccgagattttggaagaagaatag

SEQ ID NO: 391 - DNA, 834 bp, Prevotella sp. CAG:279
atggaagacaaagtagtgaaaatcgacattcgggaagccatatccagcaagctgccaaaggcatcgcgctggataccaggcttcgtttaccgttggcttgcccgcctgattcgtcaggacgagctcaaccgagtgctttgcgaaaaccgaggcaagacaggcagcgctttcgcagaaggcgcgttgcagacgctcggcgtgagcgttagcgtgatgggcgaggagaatatccccgcttccggcaggtttgtatttgtgtccaatcatcctctcggcgggcttgacggcatcggtttgatagcgtttctcgggaagcgttacggcgacgaccacctgcgttttcttgtcaacgatgtgctgatggcagtgaagccgctcgacaacgtgtttttgccaatcaacaaatacggcagccagtcgcgcgagtcgatgcgggcagtcgacgcagcctatgccggcgatttccagataggcactttcccagccggactgtgttcccgagagggggacgacggtcgcgttcgcgaccttgaatggaagaaatcgtttgtcgccaagagcgtggaaacgcatcgagacgtcattcctgtatattttagcggtcttaattcaagatttttttataaatttgcaaaattccgcaagaagttgggcatcaagttcaacatagagttgattcttctgcccggcgagatggttaagaatcgagggtcgaaatttgaaatacgtgtaggcaagcctatcccctggaccaccttcacctccgcccgccgtagtggcgagtgggcagaaatcgtgaaggataaagtgtatgatatggcagatgagcaatag

SEQ ID NO: 392 - DNA, 567 bp, Prevotella sp. CAG:279
ttgattcatggacaaacttcgatcctgaaaacacagtttattaatacaaaactcattcactgtattcacctgaaggaggaagccgccgaggcttcctccttttttagttttcaagaatttgccagtctgcggaattgtcactatttttgtcaaacaatgatacagcggattgtctgcatactgattgttgtgctgctgcagatggcagccacttcatgctctgccacaaaacagagcgcccacaccgtatgcccggaaccgacaatgacgctgagcgacgacaacgccgaccgccattgcgactctgccccgtcggcaagcgacctgatgactcatcaaaaggctggactgacactgcccgcaaccgagacgttcgccgcacaaagccgcacacaggcacgcacaaaccattggcaatggcaacgctcgttgcgttgcgacgcgcggatgcgcattcttgcaggcaaccgccggcacgccgtcagcagcgacgtgctgtcacaaaccttcggcatcgacacccagtctacgggctatgtctttgtcatacgccacatcatcatttag

SEQ ID NO: 393 - DNA, 411 bp, Prevotella sp. CAG:279
atgacagacacaaaatatgtatatgagcgcgagatggaagtgcgcgattacgaacttgacgcagagggcatcgtcaacaatgccaattacttgcactatttggagcatacccgccatggcttttgcgtggcaaacggcatttcgtttgcgcagatgcaggagaagggtgtgattccggtgcttaaccgggtggaaatcgattacaagacgccgctccgcagcggcgaccgctttgtcagcaagttgtgggtggagcggaaaggcgccaggtttgtgtttcatcaggatttgttcaagacagacacgggagagtcggtggtgtcggctgtggtgagctgcgtctgtctttctgacggcaagctcgacagaggggatatgcttgccgaggtgtttaaaaaacatttgcgttga

SEQ ID NO: 394 - DNA, 516 bp, Prevotella sp. CAG:279
atgatagagtcggaagtctataaattgtcagctggtgcctatatgcggcagttgtttcctttgtatttgaagcggagatggtggctctttgtgcttgtagccttgccgttcccggtcttggcgttgtggaatctgaattttctctacgcagcccttatggttgagtttttcgtgattccgatgatgctcggacttgcatatttctattatgcgttgagcgaggaatgcgtgtcgtcgatacgccgttgccgtgtaaggattggcgaaggcggaatcgaacgcgagtttgtcgatggggagaatgccgtcatttcagtaaaaaaaacaggatgggaggctttctgcaggtgcgatgtcgcggatgccggaatcaaactgtttcatgccggcaaagccatggcgttcgattttatcccgtcaagcgcattttctgaagaaaaatacttgttggcaacagcgctgataaataacgctttgcccaacggggatgaaagtctgcgaaaaaatgttcaataa

SEQ ID NO: 395 - DNA, 429 bp, Prevotella sp. CAG:279
atgatgacagaagcaatcgcgcacctgacagcgcacaacatcaaaccgtcggcacaacgaattgctattatggagtatctccttagccacaggacgcatcccacggtcgatatgatttacaacgacctcataggaaaaatgccgaccttgtcgcgcaccacagtctacaacacgctgcgcttgcttggcgagaacgatgcgattctcgaactgacaatcgacaagcacatcgcgcactatgacggcgacacgtcgccgcattctcacttccagtgcaaacgttgtggcaggataatcgatatcccgttgcaaaaggttgatgttgaacaaaatgggcacgattttgttatacaagaaacggaagtttactatcgaggctattgccgcgaatgcattgaaatcatgaaagaaacagaattgaaacattaa

SEQ ID NO: 396 - DNA, 300 bp, Prevotella sp. CAG:279
atggcaaaagaatcaatgaaagcgcgcgaggttaagcgtgcgaaactcgtagccaaatatgcagcaaagcgtgcggcgttgaagaagattgtaaacaccggcgaaccagccgaggcttttgaggcagctcaaaagcttcaggctttgccaaagaactccaacccgatccgtatgcacaaccgttgcagcctgacaggacgtccaaagggctatatccgtcagttcggcatttcgagaatccagttccgtgagatggcgtctgcaggattgatcccgggcgttaagaaagcaagctggtaa

SEQ ID NO: 397 - DNA, 558 bp, Prevotella sp. CAG:279
atgaaacgattggctatattggcgtttgccatgtctgtaatggcggccctgctgacgggatgccatacatctaagaaagtgacaacaacagatactcccggttctcccaattcggaggttgttgcggtagattcgtatggctatttgtcgaggcgtcttggcatcagcataggaaagcacgacaaagaaaatttagaactctttaccgttgctgaaaaatggcttggtgtgccttatcgctatgggggcaacactaaaaaaggttgcgattgctcgggctttgtgtcgcaggtgtataaggcagtctatggcaaatcgttggaacgtaattcagcggcgatacgcgacaagaattgcagtaaaatcagacgtagccaattgagaaccggagatcttgtttttttcaagacgggttcgtcgcgaaaaatcaaccatgtgggcatctaccttaaagataataaatttatccatgcctcttcaagcaagggggttattgtcagcagtctggaagagaagtattatattagaacatatgtgtgttccggacgcgtggattaa

SEQ ID NO: 398 - DNA, 387 bp, Prevotella sp. CAG:279
atggaaattacaggtaaaatcatcgtagtccttccgcctcagagcggcgtttctcaagcaggaaacaactggaagaaacaagaatacgtgctcgaaacagaagagacataccctaagaaagtgcatttcgacttcttcggagagcgcgccgaccaatacaactggatcaaaatcggcgaccgcatccgcctaagcttcgacatcgaaagccgcgaatacaacaaccgctggtacacaagcatccgaggctggaaagccgaaaaagccgacgatgccgccgcaactcaagccccggccgcgccaagccctgcagcacagcctgcggcaccgatgccagacttcacacaacctgacagcaacagcagcagcgacgaccttcctttctaa

SEQ ID NO: 399 - DNA, 279 bp, Prevotella sp. CAG:279
ttggcttggaagggctggcgcggcattccgggcatatttttattgcgccaaaaacaacagaataataaaaataaaatacataaagaaatgattattgtacaagtaaaagaaggcgagaacatcgaaagagcattgaagaaattcaaaagaaaatttgagaaaaccggtatcgtgaaagaattgcgcgcacgccaggcttttgagaaaccatctgtggcaaaccgtaagaaaatgatgaaagcggtttacgttcagaaacttcgctcagaggaggaataa

SEQ ID NO: 400 - DNA, 288 bp, Prevotella sp. CAG:279
aggaaatatggttatttttgggaaacgtataaaactattgaaactattgaaactatgactgatatttcatcaatgattcaggaactactggtcaggtttgggagtatagacattgccgagagcgagtttaaacgtctgattttcgaggacgaggcgcttaaggcttattttaaggaatggtgtgacgatatgggctaccgcgaacgcacagcgtttgttgactattgtcacgaatacttggacaatcacgaatctgcatttgattcccttacagaatatgacgaataa

SEQ ID NO: 401 - DNA, 888 bp, unclassified Lachnospiraceae
atgtcgaaaaagaaagaaggattagcgttgaaaaaacggagaaagactggtagattaaaatcaggtatcgcctttcggaagaaaggaagaaattatatgttttgcagagttttcggcggggcctgcacgggcatcgacggacggattgtccgggtcgaagccgacgcggggaatggcctgccatcgtttcatattgtcggcgagatttccgccgaggtcagggaatcggggatgcggatacggactgccgtcaaaaattccggattttctctgccgcccaaacgttatctggtaaatctggccccatccggatttcggaagtcggggaccggatttgatctgccttcggcagtagcgcttctttgctgtatcgagcaaatatctccaaaatttttaaataacagtctgtttatcggtgagctgagcctgaatggttctctggttcctgtccgtgggatccttccggtggtcagtcaggcggtgaaagagggttttttatattgttttgtacctccgggaaatgttcaggaggcattgattatttccggaatgacggtttatggcgccgaatcactgaaggcggtgatcgatcatcttcaggggatccgtgaattagttccggcggaacctctggcgccgccggaagtgaaagagggaagcggatttcctctggattttggggatatccgcgggcaggcggcgggaaaacgctgcgcccggattgctgccgccgggtggcatcacctgcttttgatcggtccgccgggcagtggaaagaccatgatggccgagcggattccctatattatgccgcccatgtcccgggaagaacagatggaggtgacaaaaatctacagtgcggcaggacgtctgaaaccggggagcgga

SEQ ID NO: 402 - DNA, 1281 bp, unclassified Lachnospiraceae
atgtcgaaagagattgttcaggtaaaaggacgggaggttctagattcccggggaaatccgacggttgaggtagaggttacggtgaaggatggcagtgtcggaagggcgatcgtgccttccggggcatcgacgggcatttatgaggctctggagctccgggatgaggaaatgggccgttatggcggcaaaggagtccggaaggctgtcgctcatgtcaacgacgaaattgcaaaggcgctctgcgggatgagggtgacctgccagcaggaaatcgatgccagactgatggaagcggacggtacggaagcaaagaaaaatctcggggccaatgcggtactcggcgcatccctggcctgcgcccgggccggggctcaggtttataagcagcccttatatcgttatatcggcggtgtggcaggcacgctgcttccgatgccgatgatgaacattttaaacgggggcgcccatgcggacaacagtattgactttcaggaatttatgattgtgcctgtgggggcggaaacctttaaggaagcccttcggatgggctgtgaagtttttcattccctgaagggcgtgttaaaggagatgcatatgaacacagccgtcggtgacgagggcggatttgcgccgaacctgtccggcaacgaagagggtctgaaagttattatggcggctattgagaaggccggctatgttcccggaaaggatataagcctggcgctggatgtggccagcagtgaattttataaggatggaaaatatattctttccagcgaaggaaataaagtatttgacagtcaggcaataacggcgtattatggtgaattaatagaaaattatccgatcgtgtctatcgaagacggctgcgatcaggatgactgggaaggctggcagcgtttgacacagaaacttggccggaaagtacagcttgtcggggatgatttttttgtgacgaatacaaagcggctggaggaaggtatccgacggtcggcggccaatgccattttgattaagccgaatcagatcggtacgctgacggaaaccattcaggctgtccagatggcttcgaataacggatatggtgcgattatgtcccatcgttccggagaaagtgaagacacgaccattgcggatctggcagttgggctgaactgcggtcagattaagaccggttccctttccagaacggaccgtctggcgaagtataaccagcttttgcggattgaggaaaggcttggaagggcggcaaggtttgtaaatccttttaaaaccatataa

SEQ ID NO: 403 - DNA, 594 bp, unclassified Lachnospiraceae
cagcagcgtgcggctctggcgagagccatggtcacccatccgaaggtattgcttctggatgagcctttatctgcgattgacgcgctgttaagacactccctgcaggtggagatccgccgtatccagaaggagatggatattacagcgattttcgttacccacgatcaggatgaggccatggttatgtcggatgtgatcaatctgatgtatcagggaaaaatcgaacagtcggcgccgccgacccagatgtatacccagcctgtatccaaatttgcagcaacatttatcggtcattataatgttctgccgatggaagtctttaaaaagctgaccggcagagatgaagatgccaaggatgtggcattccgtccggaggtcgttgaaatcagcactgaaccggtggaaaaagaagggtatctgtcgatgaaaggaaaggttctggtcagcctgcctcatggaaatgtcctccgttatgcagtgatgtgcggggaaaatcaggtggatgtggatgtattatttaaaaaagcaaccttaattgaaaataatacagaggtctgcctctcctttaaagaagaagattgtattttcctttga

SEQ ID NO: 404 - DNA, 1287 bp, unclassified Lachnospiraceae
ttatccattaacagtgaaaatttatttccgattataaagaaatggctgtattcagaccatgatatatttgtcagagaactcgtatccaatggctgcgatgcgattacaaaattaaagaaattggatatgatgggcgaatatgcgattccggaagatgaaaaactgaaggttgaagtgatcgtcaacgccgaagataagacgatgatcgtccgggataacggtatcggtatgacggccgacgaagtaaaggaatatattacgcagattgccttctccggtgcgacggatttcctggaaaagtataaagacaaaacaaacgaagaccagattatcggtcattttggcctcggattttattccgcatttatggtggcggagcgtgtaacgattcagaccctttcttataaagaaggtgcagagccggtatactgggaatgtgacggcgaatctgaatattcgatgtccaaaggggcaaaggaaacccacggtacagagattacattatatctgaacgaagacagctatgaattttcgaatgaataccgggcacgggaagtccttcagaaatactgcgcctttatgccggtggaaatttatcaggcaaaagagggcggcgaaccggaatatcagaacgtgaaggaagatgagctgcgtccgacagataagattgaagaatacttcacagaaccggcgaagaccgaagaaaaggaaaatgaagacggaaccaaagaaaccgttgaaatcgtaccggaacagaagatggtgaagattcgcagacgcccgttcctcattaatgatacccatccgttatgggcaaagcatccgaatgaatgtactgaggatgaatacaaagccttctaccggaaggtatttaacgattacaaagaaccgttattctggattcatctgaatatggattatccgtttaacctgaaaggaattctctacttcccgaaaatgaatctggaatatgaggctgttgaaggaacgattaagttatataacaatcaggtatttattgcagataatattaaagaggtcattccggaattcctcatgctcttaaaaggcgtgatcgactgtccggatctgccgctgaacgtatcccgttccgctctgcagaatgatggttttgtccagaagatttctaattatattacaaagaaagtggcggacaagctttccggtatgtgtaaaaccgaccgtgaaaattacgaaaaatactgggatgacatcaatccgtttattaaatacggtgtgatgaaggatgaaaagttcaaagaaaag

SEQ ID NO: 405 - DNA, 672 bp, unclassified Lachnospiraceae
atgtaccggatattaatcgtagaagatgatctggggattgcccaggcgatgcagaaccagattcagacatggaatctggaagcgaagtgtgtggaaaatttcagagatgtgatgaaggaatttgcggcgtatgatccccagcttgtccttttggatatttcactgcctttttataacggatattactggtgtacggaaatccgcaaagtgtccaaggtgccgattttatttatttcttcggcatcggataatatgaatattgttatggcgatgaacatgggcggcgatgattttattgcaaagccttttgatttaaatgttttaatggcgaagatccaggcgacgctgcggcggacttacgattttggcggccaggtgtcgattttgcagcaccggggcgccatactgaatatttccgatgcgaccctgacctatgaaggtcagcggattgagctgacgaaaaatgactaccggcttttgcggacgctgatggaaaataaaggaaaagtcgtcagccgggatatgctcatgcagaagctctgggagatggacagctttgtcgatgaaaatgccctgacggtcaacatcgcaagactgcgaaaaaaactggaaaatgccggactgaccgattttatcggaacaaaaaagggtctgggctatattattgagtga

SEQ ID NO: 406 - DNA, 1287 bp, unclassified Lachnospiraceae
gcccgccgcgaaatcgcagaaatgaatccggtggatatcgctgcattgattgaagaatttcctgaaaatgaacgtacccggattttccgttttcttccaaaagctctggcagccgatgctttttcctatctccccatcgaacttgaacaggatattattattaacctgtccgatcgggaagccggtctcattctggacaacctgaatgcagacgatgcggcggacttaatcgatgaaatgcctgccaatgtggtgaaaaagcttctggcgaccgccgacccggaaacccgtagagacatcaaccatctgctccagtacccggatgattctgccggaagcattatgactgtagaattcatggattttaaagaggggtataccgtggatcagtctttacggaaaatccggcaggagggaattgacaaagagacgatcaacacctgctacattctcagtccccaccgccgtctggtcggcgccgtgtctctgcgccggctgctgctcagtgacccggtggaaaccatgcggaatattatggaagatcacgttatttccgtcaacacaaaaatggaccaggaagaagtcgctcagctttttcagaaatacgatttcaccgcccttccggtcgttgacagtgaaaatcgtctggtcggcatcattaccgtcgatgatattatcgatattttacagcaggaaaccactgaagatatggaaatgatggccgcgatcacgccaaccgataaaccttacatgaaaaccggggttatcgaaacatggaaaaagcgcatcccctggttactgcttttgatgatttcagccacctttaccggaaagatcatctccgcctatgaaacagcccttgcatcctacgtcgttttgacggcctttattccgatgtttatggacaccggcggaaatgccggaagccaggcttctgtatccatcatccgaggcctttctctgaacgaaatcgcctacagcgataccttaaagattgtatggaaagagcttcgcgtcggacttttaatcggcatcaccctggctctggcaaatttcgtcaagctgctcattctggaccgtgtcactgttccgattgctgccgttgtctgtatcaccctggttgtcactgtcatcttcgccaaaatcgtcggctgctttctgccgattctggccaaacgtctcggctttgatccggccgtcatggccagcccgtttatcacaaccattgttgatgcgctttccctcattatttattttcggattgcctgcatcattcttcatatttaa

SEQ ID NO: 407 - DNA, 528 bp, unclassified Lachnospiraceae
atggaaaaatctatgacaatgcacaaaacaaaatccatggtttttgcagctcttttcgctgccctggcctgtgtcgctacaatgagtctacatattccaacaccgggtaccggcggctatatccatcccggcgatgccatcgtcgttttatccggtatcctgctcgggccgatttacggcggactggccgcaggcctcggttccgcactggcagatcttttaagcggatatatggtttatgtaccgattaccttcgttgtgaaagccgtaatcgctgttgtctgctattttgtttatcataaacttctcggcaaactgaaccatatcatcctcaaaggcatcatcaccggctgcttttcgaccattctcgtagctgccggatactgcttttttgaatccttcatctatggcagcggcgctctggcaagcgtcccggcaaacctcattcaggggctttccggtttaattatttcgaccgtattactgccgttgttaaagcaggtgccggatttccgcaatattatatag

SEQ ID NO: 408 - DNA, 636 bp, unclassified Lachnospiraceae
ggcacagcgccgggaatgatcgtggaagtcgatggaaataaacggattattctgatgccgggacctccggaagaactgaagatgatgttcgaggagagcattgcgccttatctttccggattgaaccatcaggtcatctgttccaaaaccgtgaaaatctgcggcatgggtgaaagtcgggtagcagaagtggtttcagacttaattgatgcccagaccaatccgaccatcggcacttatgccaaaggcggcgaagtccatcttcggatcactgccagcggtgaagattataaaacggccagaaagagcataaagcccatcgtcaaggaactgaaaaaccgttttggcgataagatttatacaacccgggagagtgaaacgctggagcagcacgtgatcggtcttttgaagcggaaaaagatgacagttgccgcagcggagtcctgtaccggaggaatgtttgcttccacattgattaatgtgccgggcgcatccgatgttctgaatgaaagttatattacctattccaatgaagcaaaacaccggatcctcggtgtaaagaataaaaccctcagaaatgaaggggctgtcagtgagaagtgtgcggaagaaatggccagaggcgctgccagagcg

SEQ ID NO: 409 - DNA, 603 bp, unclassified Lachnospiraceae
atgaaaataacctatattcatcacagttgttttgttgtggaattggatgactgtattcttatttttgattattataaaggtgagcttccggcatttgacccggataaacggattattttctttgtaagtcacagtcacggagaccactttaacccgaatatttataaatatgcggagacctgtcctcatgttatttatgtactttccggtgatgtgcggcgaagcttaagctttgccgtacggattggaaatggtggacaaaacacggtttttgtggatgaaaacaaaaaaatttacatgaatgtggataaccatggaattttataccgtgaaggcggtccacgggaaatgatgatcgaaacgttaaaatcaacggatgaaggcgtggcatttattattgaatatggcggaaagaccatttattttgccggagatttgcactggtggtcctggatgggcgaaagtgaagcggatgcagaacgccgggaagcagaatataagctggaaatggaaaaaatcagaggacgtcattttgatacggcctttgttgttctggacccgcggcaggaagaacattactggtggggcatgaatacattcatg

SEQ ID NO: 410 - DNA, 1620 bp, unclassified Lachnospiraceae
acccggtttccgatggtcatgaatgcggcctgccggacggtttccggccctttatcaattaaaggcgaccacagcgatattatgtatgcgttgaatacgggctgggtcattttatttgcggatacgccccaggcggtctacgacatgaacatctgcggtctgaaactggcggaaaaagtcaatcttccggtcattgtagcttttgacggattttttacgagtcatcagaagcggcggtgtgaagtctttgaatttgatgaaaatgtccgcgaatttattggcgagcggaagccggaagtggatttgctcgatatggaacatcctgtgaccatcggttcttacatgaatgaaccggatattattaacaataaatatcagctccatcaggccatgaagctggcggcgtcctggctgccgaccatctatgaggaatatgaaaaaatttccggaagaaattacggtctggtgcgtgaatgtcagatggcagatgcccaaacagcgatttttattctcggttctgcctatcatacagcccgggcggccgtgcacaaactgcgttcggagggaaaacgggccggagtatttacagccagtgtgcttcgtccctttccggcgaaggctctctatgaaatatgcaaaaacgtgaaaacagtgatcgtagccgaccgtcaggatagctatggcgccggcgggggaaatatgaccctcgagatcaaggccatgctccagagctttggcagaggagatatccgggtcctttctcggatttatggtctgggcggcaaagatttttatgcgtcggatgcggaggcgcttttcatggaaggagaaaatccggatgcaaaagcctttgattatgtgggaatcactccgggtcatggcggccgggaagaaatgaagtattatgaaccactgacaaaagcggtgtcctcgccggaaattctgaaacgcagtgtgaaccctgaaaacggccatgtacttgtggaaaacgcccggatcagcgatctgacagtcatgccgaaacggctcagcccgggccatggggcctgtccggggtgtggtattcccgtcaatgtcaatctgctgttaaagggcattgaaggtcatgtcgtccttctttttcagacgggctgcggcatggtggtgacaacgggatatccgaaaacctgctttaaagtaccgtatattcataacctgttccaaaacggggccgcaaccctgtccggcgttgtggaaatgtttcatcagcggcagaaacgccgggaatttccggcgggagatattacgtttattatggtcagcggcgacggcggtatggacatcggtctcggatcggcgatcggagcggctctgcggggaagtcatctgattcttttggaatatgataatggcggctatatgaatacggggtatcagttatcctattctacgccaaagggagcccggagttccacatctcatgtggggccggcccagtacggaaaaacatttttccataaggatacggcggcaatcatggcggccacagggatgccttatgtggcgacggcagccgaatctaatccggcagattttgtgcgtaaggcggcaaaagctcagttttatgccaaatccgagggg

SEQ ID NO: 411 - DNA, 720 bp, unclassified Lachnospiraceae
atgacaaaaaactttgcccatagaggattttcaggaaagtatccggaaaatacaatgctggcgtttgaaaaggccattgaagcgggagctgacggtattgagaatgatgtgcatctgaccagggacggcgaggttgtcgttattcatgatgaacgggtggaccggacgacagacggcacaggctttgtaaaagattttacgtatgaagaactgatgaagctggatgcttcctatacctttaaagaatatggcgtacagcatattccgacactccgggaatatatggagctcgtcaaagataaggacattataaccaatatcgaattgaaaaccggcgtctttgaatacccgggcattgaaaagaaggtctacgacatgattatggaatatggactgaaagaccggatgattatttcctcatttaatcactattccattttgcggatgaaggccctggacccgacgatcaaatgcggtcttctggaggaatcctggctgattaatgccggagcctatgtggcttccacaggggtggaatgttatcatccgatgtataaaaatatgacaccggaagtggtcgctgaaatcaagtcccgcggtctggaaatcaacacctggacggtgaatgaaaaagaagaaatcgaagagatgtttgagcggggcgtggattcagtcatcggtaatttcccggatattgtcaatgaagtccggaaagggttt

SEQ ID NO: 412 - DNA, 858 bp, unclassified Lachnospiraceae
aatatccgaagtgcgatggaagagagtctgaaccgggccggatggtacccggattacagtaaagaacgattaaagagagcgcttggagcgttccatcatctggagccatcccatatttgtatgggaaatggcgctgccgatgttatctaccggaccgttttcgcattaaaaccgaagaaagcgctggtgctggcgccgacctttgccgaatatgcggcggcgctccggtgcgtagatgcaaggattgattcttaccggatcgaccatgcggattttcaggtaaaaatggatatctgcgaacagattgaagcggatacagagatggtttttttatgcaaccccaataatccgacggggcttttaatatccaaagatattatcgaaaaggttttaaaacggtgtgaggctgtcggcgcatggcttgttgtcgatgaatgttttcttgaatttattgctgacggggaaaaatattccgtcatcgaagatcttttgcatcatgagcggctgatgattatcaagtcttttaccaaaatgttcggcattgccggccttcggctgggctatctgctttgcggtaaagccgggcttgcggagcggattgaccgtttcggctgcgactggaatgtaaactgcgtggcggaagccgccggactggaagctttgaaatcacaggattatataaaaaaagttatccgttatataacgaaagaacgggagtggctctgccgggagctgacagctatgggatttttgacggttcatggcgccgccaattatctgctgtttaaggttccggacggcagcagagagaatctgggaaaatggctgttaaaacggggaatcatgctccggtgctgt

SEQ ID NO: 413 - DNA, 1044 bp, unclassified Lachnospiraceae
gtccataaggagccggtaacgctgccgagaaatattcagtttattctgctgaccctcggccccgcctattttctgctctggggaattcttttacagcccttttccgaaatgcttcgcggtctttattccattatcatagaaccggatgttcttatcaccgactatgtcatcatcggaggtgtcggcgcagctctggtcaatgccagtctgacaacgatcatgtgtatcgtcattatttattttcttaaaatgaatatcgacggaaataccatcgcggccctttcactgatgttcggcttctctcttttcggaaagaatatttttaacatctggtttattatttttggtgtttatgtctatgcccgctaccatcggacgcatttatccaactacatatatatcggtatttacggcaccagcctttcaccgatcatcacccagacgatgcttctcgtgagcctgccttttcctttaaggtttttactgagtcttcttgtcggaggtatcatcggatttgtgcttccgccgctgtgtgcccacctttataatacacacaaaggctactctctgtataatgcaggctttgccgccggaattatagcgaccatcgtcatttctctctataaatccttcggcatcaccattgaaacccgtaagctctgggcgaccggatacaacgtgctttttatggaaatactgctttcgttttttgtatttctgattatcatcggcgtcattaccggccagaatgttttccggaaatatatgaatatcttaaaatatccgggcgtgggcggaaccgattttactttcagcgaaggtttttccccgacactggtgaatatcggcgtcaacggtattttttcaacattatttgtcattgtcatcggcgctgaattaaacggtccgagtatcggcggaatctttacaatcgtcggtttttccgccgccggaaaaaatctccggaatatcgcaccgattatgatcggtgtcacgctggcaagcttctgcggcccatggtccatcactgatccgtcagccgtt

SEQ ID NO: 414 - DNA, 516 bp, unclassified Lachnospiraceae
ttaattaatatttcagaacttatttctacaccactgaaaagcgagacttttgaggttcctgtgacgatggaattttatgagttgagtggagacagatttccttttagagaaaagggcagtctgcttctgacagttgccaataccggcagccggaagcttcatttgaatggccggtggcaggggacgattggaattccctgtgacagatgcctgaaggaagttgcagtgccttttgatattgagatggatgaggatgtggatctgtcgccggaacgccaggaagatctggcagacgacagttatatcgaagaaagcagtattaacacagatgctctgcttaatcacgaaattttaattcgttttccgatgaagattttgtgccgtgatgattgtaaaggcatatgtctgaaatgtggaaaggatttaaaccttggagagtgcggctgtgaccggaggtctttagacccgaggatggctgcgattcaggatatttttaagaattttaaggaggtgtga

SEQ ID NO: 415 - DNA, 540 bp, unclassified Lachnospiraceae
ctgaaaaccgttttatggaaattaattgcgttccggtgcgtgatgaatatggcccatctggcaatgtctccggacaagagcggtcaggttcaggaaacagctcttctcatatcgtcagccctgctgcttccgcagtttacggagattacggcatttcttttaaaaatggcgtgggcctttacggaggcgctggcggattgccggacactgttgaagggcggaaaaatcccggtattaaaggatgatacatcctggtatctgacatgggatcagatgcttcatatggacaggcatattctggatgggaatgacagccgggaaggcctggattatgccgaatatcttcgactgttcctgtttttaatgaaccgggaagtgaagtatcggcggatgacccatctgatggaaaaaaacatacggctattaccggaatacagtcatttccgcatggcggactgtgtttatggaatccaggcggcgttctgctgcccgacgggcgccggagcagactgcagggtgcagatggcgctttcatactga

SEQ ID NO: 416 - DNA, 894 bp, unclassified Lachnospiraceae
catgttattatcggactttatgaaggaagtaaatcatgggcaaaagcagaagctcagggatttgaagtatttactgcagcagaagctgctaaaagagcagatatcatcatgattcttatcaacgatgaacttcaggcagatatgtacaagaacgacattgaaccaaaccttgaagaaggtaatatgttaatgttcgctcatggtttcaatatccactacggatgtatcgttcctccaaagaacgttgatatcactatgatcgctccaaaagcaccaggtcatactgtaagaagcgaattccaggaaggtaaaggaacaccttgtctggttgctgtttaccaggattatacaggaaaagctcaggaaatggctctggcatactctctgggaatcggcggcgcaagagccggcgttcttgaaacaactttcaagacagaaacagaaacagaccttttcggagaacaggcagttctttgcggtggtgtctgtgcattaatgcaggctggtttcgaaacattagttgaagctggttatgatccaagaaatgcttattttgaatgtatccacgaaatgaaattaatcgttgacctgatttaccagagcggttttgcaggtatgagatactccatctccaacactgcagaatacggcgattacatcacaggtccgaagatcgttacagacgaaacaaagaaagcgatgaagaaaatcctttccgatatccaggatggtacttttgcaaaagacttcctgttagatatgtctcctgcaggacgtcaggttcatttcaaagcaatgcgtgcaaaagcagcagcgcatccatcggaaatcgttggcgaagaaattcgtaaactgtatagctggaatggcgaaggaaaattaatcgataactaa

SEQ ID NO: 417 - DNA, 873 bp, unclassified Lachnospiraceae
atgaaaaaaatactggcaattcttatgtgcggtgccttactgatgggatttaccgcctgcggacagaaaacaaccgaaaaaacggcgtcaaccgacagcccggagggggctcaggaagaaagcggcgcatcagccgatctgaaggaagtcaatgtggtattggactggtatccgaatgcggtgcatgcatttatctatgatgcgattgaaaaaggctactatgcggaagagggaattaaagtgaatgtccagttcccgtccaacacaaatgacgccatgtctctgacggcggcaggcaaggcggaagtcggcatttactatttgccggatgtgattatggcccgggcaaaccaggatgtgccgatccgctgtatcggagccctgactcagtcagacctgaatatcattttgtcactgaaggaaaaaaatattcagagtccgaaggatctggtcggaaagacgatcggctattccggaaccgaactgagtgaagcgatggttcgggaaatgatggaaaccgccggcgtttctgcggattctgtgacgatggtggatgtcggttttgacctgatgtcttcgatgacgaccggccaggtggatgcgaccatcggctgcatggtgaatcatgaagtgcctcagatggaaaaggaaggatttgaagtaaattatttttatccgcatgaatatggcgtgccgggcagctatgagttgatttttgtcacaagtgatgatatgattaacaacaacgctgatgttttggcggcattcatgagagcttcggccaaagggtttgaagatatgaaggcagacccggaagcagttctggatattttactgaaaaatcagaatgaagaaaatttcccgctggataaa

SEQ ID NO: 418 - DNA, 864 bp, unclassified Lachnospiraceae
atggcaaaattaaatttagaagaattactggttggcaaaaaaatggagccgagatacctggagtataactggcgggacgttgctttgtatgctctggctgtcggcgcaaaaaaagaagatttaatctatacctatgaaaaatatctgaaggccattccgacctatggaaccattccttactggggaacgattaatgtcaaaccgtatcagtggatgccgcttccggcatcgatgctggcagatgaaatcattaaaccgacggtagcgtttttaaatatggatcatgagattattttttatcgtccgatcgacccgattaagggaactttccagtatcaggatgtgattaccgatgtttatgaccggggcgaaggcaaaggcgctgtcattaaaacgaaagtcgatgttcgggatgaagcgggaaatatggtatgcaccaactattcgacaaccttcttccatgaagccggaggcttcggcggaaaaccgatgccgaaaaatccaattgagattccggacagagcgccggattatgtggtggacgattacatttctccaatccagaaccttctgtatcgtctgaccggagatacaaacctgattcacgtagacccggattatgcgaaagatcataaatttgaccagccgatcatccagggcttatgttcctttggttttgcctgccgtatggccatcggagccctcttcccgggtgaaccggaacgtgtcacacgtatggccgctcagatgcgtaacatccttctgccggatacaccggtggcactgcacctgtggaaaatggatgaaggaaaggcttatttccagttcgtggatacaaagaataaccgtccggtgcttgaccgc

SEQ ID NO: 419 - DNA, 807 bp, unclassified Lachnospiraceae
atgaaaaaactggtgattgttttagggacggtcagcatatccctttcggcgattttcgcccggatggcttcggcaccgtcgatcattctggtgttttaccggatgctttttgcctgcgtccttctgcttccggtagtatttgtcaaatgccgtgacgaattgaaacggcttcaaagaaaagatatttttctctgtgcctgcagcggcctttttctgggtatgcattttactctttactttgaatctctcaaatatacgagtattgcggcatccgtggttcttgtgaatctggaggtcttttttgtagcgcttttcctgttttttatgtaccgggaaaaaattccggtcaaaggtattctgggcatcggcgccgcttttctgggaacggtactcatcgctgtgaccgatatgggcagcggaagtaatgtggttttcggagatattctggccttcggaggctccttttgcgtcgctgtctatacgttgatcggaagaagctgccggacccatatttcgacatcggtctatacctgttttgtttacggctttgcctgtctgacggtcggcattgctgcgctcatatcaggaactcccttttccggttacgaacccgtcaactacggtctggcccttggaatgaccatattctgtaccttcttcggccacagtgtttacagttggggactcaaatatctcaatgcttcctacatcacgaccatcaaactccttgaacccgtctttgcatccatcctcggacttctcatcttccgtgaaattccgggagcctttgttatcatcggcggggcg

SEQ ID NO: 420 - DNA, 987 bp, unclassified Lachnospiraceae
gtgatcgttactgagcagtttgtacctatgggacctgccgcaagccaggtcgccgtgaagcagaccggaaccaacggcggcggttatatgggcgtgaattcggcccatcctctggaaaatcccaatgcatttacaaatattatcgagatgctttcgattcttctgatccctgcggcgctgtgctttacattcggacgcagcataaaaaataaaaagcagggcattgcgatttttgccgccatgttcatctgtctggtggcagcgctggcagttatcggccggagcgagcagatggccgtgcctcaactggcacaggacgggatggtggatatctccgaagtctcccaggccgggggcaatatggaaggcaaggagacccggttcggtattcagacatcggcgacatgggctgcgtttacaacggcagcttccaatggctctgtaaactccatgcacgacagttatacgccaatcggcggtatggctgagatgtttttaatgcagctcggcgaagttattttcggcggcgtgggctgcggcctgtacggaatgctggcctttgccattctgaccgtttttattgcgggactgatggttggaaggacgccggaattcctcggaaagaagatcgagccctttgaaatgaaatgggcggtcgtcgtctgtctggcaactccggtcgcgatcctgatcggcagcggcatcgcagcggttgttccgtcggtggctgacagcttaaataacagcggcgcccacggtttttccgaactgctttatgcctattcatcctgcggcggcaacaatggttccgcctttgccggatttaatgccaatacggtatttctgaatgtatcactgggactggtcatgctgtctgcccggtttatgccgatcgtcggaacgctggccattgccggaaatatggcgtctaaaaagaaggtggcggcaacggcagggacgttgtccacaaccaatgccatgtttgtg

SEQ ID NO: 421 - DNA, 1212 bp, unclassified Lachnospiraceae
tttgaatgggataacgaaacggaagcccctgaggaatccgccggtctcacatccaaagccatcgaaattttatccgatgaatattataaaacgattattaatccggaggtcaaaaagcttctaaagcatttggcctccgaaaaaaatctgagtctgaaggaagcggacatcgttaaagaccttcaaaaacagtacgacagtatggaaccgattcctcaaaaagagtatcgggaatatcagggccttatcgccagagcttcttctgtctgggcccgtgcgaaatccgccgataattacagccagttcgaacctgtcctgaaacagatcgtagactttcagaaacgttttcttgcctgccgtctcaaaactgggcacccggatatgcggccctatgacctgcttctgaatgattatgaggaaggctttaccatgaaggcgctggatgaattttttgaaacactgaaaagggaaatcattccccttattcaaaaggttgccgaaaaaaaggaccggatttccaaggattacaacgtccggacctatccggtggcacttcagaaggattttaaccggatgctggcagagcatgtgggttttgattttaaacggggcgtgatgaaagaaagcgcccatccctttacgaccaatctccacaaccgggacgtccggattaccacacattacgatgtgcacaatctggaaagtgccatattctcaacaatccatgaaagcggccatgccctttacgaaatgcacatcgacgatgatctgacagcgacacctgtcggatgcggtacttcgatgggcatgcatgaaggccagtcccggctttttgagaacaatctcggacgcagccgtgctttctggatacctctttttgaaaagttaaaggatacctatccggaagccctctccgatgtggatctggatcactttattctcggcatcaataaatccagcccgagcctgatccgtacggaatccgatgaactgacctattcccttcatattctgatccgctacgaagtggaaaaaatgatttttgaagaaaatgccgatatggaaaagctgcctgaaatctgggctgaaaaacacagagaatacctcggcgtaacgcctgagaaagacagcgaaggcatccttcaggatattcactgggccggaggcagtttcggttattttccgtcctacgccctcggcaatgccattgcc

SEQ ID NO: 422 - DNA, 483 bp, unclassified Lachnospiraceae
atggaagcgattaccggattatttaaccgtattatttcggtgataccgatgattcggttgacaaatatctttgagatattgattatcagtgtattgatttattacattctgatatggattcgtgacacgcgggcgtggacactgcttaaagggattcttgtgatttttgcttttgtgctggttgcctacgtttttcagatgagtacgatcctctggctgttccagaatctgatcagtgtgacgatcatctcgattttcgttctgtttcagccggaacttcgaagggccctcgagcagcttggacggaagaatcttttatcttcggtctttaatctcagcagcggcgcggcagtggatgaacaggcagcaaaagtgatcgagaaaacaaaatcagaaattatcaaggcctgtgtggagatgtcaaaggcccggacgggggcgctgatcgttatcgaacaggaggtacgcctcagcgaatatgag

SEQ ID NO: 423 - DNA, 414 bp, unclassified Lachnospiraceae
atgaaacagttgatgcggtttgaacttaagaaaatattcatgaaacgtattgtccggatggacgttttgggattgctgattctcaatatcctgtttgttttttcggattattattcgatgtatgcctttgacggcaaaagccgggaggggagcggcggagcggccgtagagatcgatcaggaaatatccgaaagatatcagggccttttaaccgatgaaaaagtaggacagatgctggaagaatttcgtccaaaagtggataccggcggactgaatgcggcttgtttgtatcagaacgcctttcagtcttcggtttttgcccggttttcggatgtggatggaaactggaacggacgaagtgtttcggacgtttttggaaatgaagcggttaaaatcggatatgtgaatgggtgg

SEQ ID NO: 424 - DNA, 849 bp, unclassified Lachnospiraceae
gacatatttgctcagagggcatccacgagggaaggaaagattcaggtcgaactggcccagctccggtaccggtcaacccggctgaccggacttggacggtccttatcccgtctgggcggcggtatcggcacgaggggacccggtgagaagaagctggaagtggaccggcgattgatccgggaacggatttcccagttaaaacaggagctggaagcggtgaagcggcacagggaagtggcccgtcagcagcggagccggaatccggtaccggtggctgccattgtcggttacaccaatgcaggaaaatctacattattaaatcaactgaccggcgccggtgtgctggaagaggataagctttttgccacactggacccgacaacacggaatctgaagcttccgagcggtcaggaaatccttctgaccgatacggtcggattcatacgaaagcttccccatcatttaatcaacgctttccgaagcacgctggaggaagccaaatatgcggatataattctccatgtggtcgatgtatccaaccctcaggcagacattcatatgcatgtcgtctatgacacgctgaatgaacttcaggtcggtgataaaccggtcgtgaccctctttaataaaacagaccgccttgaagcggagggatcggaaggtatttttaaggacttccgggcggataaaacgttgaaaatatctgccagatatcagagcggttttgatgaactcaaagcggtgcttgaagatattctccgggagagcaaaatgctcatcgaacgggtttttgaatacagccgtgccggggatattgccgtgatccgtaaatacggtcagcttctggaa

SEQ ID NO: 425 - DNA, 624 bp, unclassified Lachnospiraceae
ccttttgaaggcggtccggcagatatggccggaatacagaaggatgatattatttttaaagtcagcggtgaggaagtgaccgggcaggatctgagcaaggtggtggcccggatgaagggtgaagccggaacgcaggtagaactgacgatataccgtccatgggaggatgcctatattgattttacagtggacagggcagttgtcgacgttccgacggttgaatggcagatgctggacgatcaggtcggttacattcagattgttgagtttgaagaagtgacggcgggacagtttaaaacggcggttgaagcgctgaaatctcagggaatggaaaagctgatatttgatcttcgggataatggcggcggcctcctggacagtgtgtgcgaaatactggatgttgttcttccgaaggagcttctcgtttatacggaggataaaaacggatataaggaagaagaatgggcgaaggatgacgatgccctggatctgccgatggcggtgcttgtcaatggaaatacagccagcgcctctgaaatctttaccggagcattaaaggattatggcgtggcggagattatcggaacaacgacctttggcaaaggcattgtccagtccatcatt

SEQ ID NO: 426 - DNA, 1089 bp, unclassified Lachnospiraceae
ggcgctttctgggggattacccgggcggccggagtgaatgtcagcagtaaaaacggcggaaataacggaatgaatgtgaacatcgtccgtacttcatcaacggatgttcagacgattaaggggacggatgtttcggatatcgttcaggaagcgatgccgtccatcgttgctgtcaatacccagatggtgacgaccagcagcttttttggccagacctattcccaggaaggcagcggcgccggttcaggaatcatcatgagtgaatcggaaggaacgctttatattctgaccaactatcatgtaattcaggattcgaccagcatccagacaacatttaatgatggaagcacagcggatgcgacggtaaagggctatgatgagaatgcggatattgccgtactgacggtagattatcagacattaagcgatgaaacaaagaaaaatatcgcagcggcggttatgggagattcgggtgcgctggaagccggaaacggtgcgatcgccatcggaaatgctcttggatacggtcagtcggtaacgaccggttccatcagcgccgtggaccgggaagttcagatgaccgacggcgttgtgaagctgatacagaccgatgcagccattaacccgggcaacagcggcggcgctctgttaaatacacggggtgaagttatcggcgttaatacggtaaaatattccgatacgacggttgaagggatgggctttgccattccgatcgattcggcgctggaaacagccaaaggaattatcgacggaacgatcgttccgaagacggatgagaatacggcttatctcggtatttccggaggtacgctggatgaagaatatgcgtcaaaatacggttaccctgccggcgtttatgtcagcatggtatccagaggctctgcggcacagcgggccggactgcagcagggcgacatcattaccggatttaacggtgaagccattgcaacgatggaagaacttcaggaaaaactggagggctgtctgccgggtgaccaggtgacactgagtgtacagcgtcagaacagacagggcgaatttaccgaacaggagctggcaacgattctc

SEQ ID NO: 427 - DNA, 1323 bp, unclassified Lachnospiraceae
atgggtaccatgccggtcaaccggctgctggtaaccatgtctctgccgatgattatatcgatgcttgttcaggcattgtataatgtggtggacagtgtgtttgtatctcagattaatgaaaatgcactgacggccgtatccatggcctttccggtacagaacctgatgattgcggtggctacaggtacgggggttggtgtcaatgcccttttgtcccggagcctcggggaaagaaatttcaaaatggctaataaggcggccaataacagcgcctttcttgcggtgatgagttatctggtcttcctggttttcggcatatttggtgtggaaaccttttaccggcttcagacagatactccggaaattattgcctacggtaaagattataccattattatctgtatcttttcatttggattgtttttgcagattgcctttgaacgtctgcttcaggcaacgggacggacgatttatacgatgttttcccagacgacaggggcggtaatcaatattattcttgacccgatccttattttcggttattttggatttccgcggatggaagtagccggtgcggcggcggccacagtcatcggtcagattgtcggcatgattattacagtgatcctcaatatggctaaaaataaagacatccgcctgcatatccgggagatgaaaccggatgctatggtgatcggacggatttattctgtcggtgttccttctattataatggcaagtattacatcggtcatgagtttctgcatgaataagattctcatgtcatttacatccacggcgaccgccgttttcggtgtgtattttaaactgcagagtttcattttcatgccggtcttcggtcttaataacgggatggtgccgatcgttgcctttaactttggtgccaaacagcggcagcgtattacaaaaacgattaaactcggcttactttacgccttttgtatgctgaccatcgggctggttattttccagttatgtccaaaggaattgcttggactgttcaatgcttcggaatccatgctggccatcggcgttccggcgctgaagatcatcagcatcagcttcccttttgcggctttcagtattatcagtatttcagtcttacagtcattgggccacggcatttacagtatgttcatttctgtgggccgtcagctcgtggttctcgttccggtcgcttttctgatggctcagacgggaaatctggatttggtatggctggctttcccactggctgaattgatggcggtggctctgggcggaattttcctgcgtaaagtatttaagtcactggatttttag

SEQ ID NO: 428 - DNA, 906 bp, unclassified Lachnospiraceae
atgaaacctttaattattttaacaggtccgacggctgtcggaaaaacagaattatcgattgccctggcaaaagccgtcaacggtgaaattatttctgccgactccatgcaggtctacaggcacatggacatcgggacggcaaagatcaccccggaagagatgcagggcgtgccccatcatctgattgatattctggaaccggatacggcatttaatgtcgctatgttccagaaactggccaaagaagctatggaaggcatttatgcccggggacggattcctgttgtcgtcggcggcaccggattttatattcaggcgctgctctatgatattgatttttccgaagaaaatgaagatatgtcgattcgaaatgccctggaagctctggcagaaacgcggggcgccgaatatctccacgaagaactcgcccgggtggacccggaatccgcagagcagattcatgccaataatgtcaaacgtgtgatccgtgccctggaatattaccggatgcacggtgaaaaaatttccctgcataatgaaaatgaacggcagaagacgtcgccctatgactttttctattttgttctgacccatgaccgtcaggtcctttatgaccggattgaaaagcgcatcgaccttatgctccgtcagggactggttgaagaagtccgtggtctgatggcaaagggctatgataaaaacctggtctctatgcaggggcttggatataaagaaatcattccttatctgaatggcgaatgttccctggatgaggctgtttatattcttaaaagagacacccggcattttgccaagcgtcagttgacatggtttcgccgggagagggatgtccgctggctggacaaaagccggacgacctctgaaaatgaaattttaaatgaaata

SEQ ID NO: 429 - DNA, 621 bp, unclassified Lachnospiraceae
gacaaggcctatctcagagagttttatgtctttgagcggcattttcgcgaaaagggcattgaagcggaggtttgcgatatccgtcagatggtctataaaaacggaaaactccggacgccgacgggacatccggtggatgtgatttaccgccgggcggtaaccagtgacattatgaatgattatgatgcggtttcggattttattcaggcggtaaaggatggcagtgtctgtctgatcggcgccttccggacgcagatcatccatcacaaagccatttgccgtgtactcgtccatccgatgacgcaggcagtgcttacggcggaagaaaatgcctttatcgaagcccatctgccgaaaacggaagaactggatggggtagcggaaagaaacggtctggagcagatttatgaggataaggatgactggatcattaaaccggtggattcctacgcggccaaaggcgtttatgccggagtggattacagccataaagagtggaagcggattgttgagagctgccggcatcaaaaatatattgttcaggagtactgtcggccgtatcggacgaaaaatatcagttttggacagaaaccttatcaatttcagctttacagcaacctg

SEQ ID NO: 430 - DNA, 666 bp, unclassified Lachnospiraceae
atggccgcaaagcagcagaaaacaacgtcccggaggaaaacgccggtaaagaaaaaaacttcatcgggaaatacacgaaagaaaacaccggatctgacaccggaagaaaagattcagcaggcaggcatccgggatgaggttgtcgtcctcacgattctggcgctgagtattctgctggttctcagcaactttaatctgtgcgggaaattagggacagccatttccaatgtcacttttggattgttcggtcttatggcctatgtatttcctttcatttttttccttggcatttcattttttatcgccaatcgttcaagccggatcgcaaagataaagctggcggcttccatgctgtgctatttatttttaacgatatttgtacatatgatttcagagccctatgataagtccgtcacgcttattcaggcttacagagacagtgcggcaggacattccggcggcggtctgatcggcagcggcgtagtacacgtgctgcatccgctgcttggaacggtgggatgctatgtggtgattattgttctgattttaatcagcgtcgtgctgattacccagaagtctatttttatccctctgggtaaaaagggaagaaaggcctgttttaaggcttcggaacaccataaggcccagcgggccaaacggcgtctt

SEQ ID NO: 431 - DNA, 702 bp, unclassified Lachnospiraceae
atgaaaatgcgacgaaattgtgtgcggattctggcctgcgtgggcctctgccttggatttatgggaacggggcttgcagcagagggaatggattttccggtggtttatgaatcggaagaaaatattgggaattctcaaatcgctgcatccatgaaccagattgtctcggtgtctgactggaaacgccggatttatcaggccgtttattcggtcgatacctttgagggcgatgtcagcgccatccgggcttatgccggagcgaattttcatttcacggacagtcagggaaatattttatccgaggggacatatattgataaaagcggaaatatttccgctgattttaccgggggcgaagtctgcagagatgcaaatggctggtatatcctctggaaatctccggatatgaatgtctggcaggaaagccgggcttatattcaggcggacagtgattttgaaggtggaaataatcagacactcggtgtcaaaggaatgtccggaatttatctgaaagaaaattcaccggcggcagatgcgccgtttaataccagtttggtgaatgttgctgttgaagtggaggctctggatgtaaatctcccggtgatgaagggcaccgacacttcggatgcggattttcttcgaaaagcaggggtgaagctttacagtatttatggagaactgtcggagcttccgttaaaggcc

SEQ ID NO: 432 - DNA, 633 bp, unclassified Lachnospiraceae
atggccggtaaaaagaaaagtaaaaaaaagatggggctgacctcaaaaatatttatttcgttgatcgccggagcgattctcggtgtgatcctccactatgtggtaccggaaagctatatccgggatacggtgcttattaacggtattttttatgttgtcggaaacggctttctccgactgatgcagatgctcgttgttccgctggtattctgttcgctgatctgcggcagcgcggccatcggtgacacaaagaccctcggaaaagtcggcgtaaaaactctcggcttctatatgctgacgacggcgctggccgtcgtggtggcgctgagccttgccaatgtcattaatccgggaattggcctgaatatgtccgaaatttcagcccaggaaacaacagtcgcagaaagcgtcagcttcgcggatacgctgctcaatatcattccgaaaaacccgattcaggggctggcggaaggaaacatgcttcagattattctgtttgcactgattatcggtattattcttgcgaaaatgggcgaaaagacagcggcagtatccaacttcttttcccagtttaatgaaattatgatggaaatgacgatgatggttatgtctctggcgccttttggcgtgttt

SEQ ID NO: 433 - DNA, 798 bp, unclassified Lachnospiraceae
atgaaaaatattgtagtatgtattaaacaggttccggataccacagaagttaaacttgatccggttaccggaacacttatcagagacggcgttccaagtattattaaccctgatgacaaagcagctctcgaagttgcattacagattaaagaaaaaaccggagcaaaggttacggttgtttccatgggacctatgcaggcagatgtagcgcttcgtgaagctctggctatgggcgctgacgacgcagtgcttgtatccgacagaaagttcggcggcgctgatacatgggcaacatcttcaacaattgccggcgctatcaaaaaactcgactatgatttaatcgtagccggacgtcaggcgattgatggtgataccgcacaggttggtcctcagattgcagaacatctcggaatccctcatgtcagctacgcagcaagcgttgatgttgaaggcgatgataccgttgttatccgcagaaattttgaagaccgttatcatattattgaagcaaaaacaccattgttaatcacaactctcggtgaggaaatcgaacctcgttacatgagtgtcggcggtatcttcgacgcatacagagaaaaagaagtcaaagtatggggctatgaagatattaaagatgccgttgatgattccaacctgggcctgaagggttctccgacacaggttaagaaatccttcacgaaaccggtgaaagcacctggcgttcttcatgaagatgtcagtgccgatgaagcggttgaaatcattattaacaagttaaaagaaaaatacatcatttaa

SEQ ID NO: 434 - DNA, 603 bp, unclassified Lachnospiraceae
atggaaacacttcatgggctggtcgaacatattgtttaccacaatgaaaataacggatatacagtaatggcattgatgtgccagggggatgaggtgatgtgtaccggaaccatggcgatggtcaacgaaggcgagtacattaaagcggaaggggactatgtagagcatggaacctatggacgccagttccggatcgcttccttttctatcgaggcgccggaggatttgttttccatcgagcggtatctgggttccggggccattaagggcatcggaccatcgctggcgggtcggattgttaaaaaatttaaagaggacagctttcggattattgaaagtgagccggagcgtcttgcagaaattaagggaatcagcgaacggaaagcccaggaaatttatcagcagtttcatgataagcaggatatgcgtcaggccatgatgtttttgtcaaaatatggcatcagcacagcttatgctgttaaaatttacaatgagtatggaagccgtctttatgatatcattaaagaaaatccataccagcttgcggaggatgtgacgggcatcggttttcgtctggcagatgatatcgcccgccgggcgggg

SEQ ID NO: 435 - DNA, 1083 bp, unclassified Lachnospiraceae
atacttaaattaatgggaagaaatgcgacgcatctgccgggatggcttgcgaacagactctgcccggattttctcggacatctggaaaaaccggaaaagcttgtatatattacgggaaccaacggaaaaaccacagtgtcgaatctgacggcgtccatcctgaaggacaacggttatgaattcgtcaataactctaccggaagtaatgtcagcgagggcgtcgtatcggcactgcttgcaaagagcagcttctttggaaaggcgaaaacaaaactcggaattctcgaagtggatgaacggtattcaccgctgatctatccgtatatgcagccggatattcttgtgtgtaccaatcttttccgggattcttataagcggaatgcccatacggaatttattacgggcattttgaataaacagataccgaaacatacgaaactgattttaaacggcgaagacctcatcagcaatcatctggcagagggcaatgaccgccgctatttcggcattaactgtccggatggccacagtacgccgaataacattattaaggatgtcgctgcctgcccgaaatgcggaggacggctggaatatgaatatatccgctacaaccacatcggacgggcccactgtaccaactgcgactacggctcaccggagatggattataccattgaatccatcgattatgcgaaccaccggtgccaggtaaaaacaccggaaggcagttatgattttaaaatcatcggcgagaatgtgacagatatctacaacatgattaccgttatcgccctgctttcagagcttggtctgccgattgaaaaggtgcagaagtcttttgaaaaaatgaagattaccgcatccagatatgatgaaaaagaagtcaatggcaagaagattgttttaaatctggcaaagggacagaatccgatcgcctgctccagggtctgcgattttattaagcacgattccggaaaaaaagcggtgatctttatgctcgacgattattacgatgcccgggaatccagtgaaaatattgcctggatttatgatattgattttgaatttttaaaagatgattcg

SEQ ID NO: 436 - DNA, 627 bp, unclassified Lachnospiraceae
atggaggataaactatttggatatatgcagtggccggagattgaggcgattatttattcggagcatgaccgcccgaaacagattttgggaccgcataaggtggaagatggtgtgcttgtgcaggcttattttccgggggcagtaagctgtgaggttcttgtgaaaggccgggaaccgatgatgatgaaagcggtggattcggaatattttgcacagattctgccggatgcggatataccggattatatgtatcaggtgacttatggggatggtcatgttgtaaagtgccgggatgcctatgcttttccggcaacgattccggaagaagatataaaaaaattccaggcaggaatccattacgaaatctataaggtgctgggagcgcatccgatgcgtattcgcgggattaaaggggtccgttttgctgtatgggctccggatgccatgcgtgtcagcgttgtcggcgatttcaatcagtgggatggccggcgccatccgatgcagcgtcgtgaaggcgggattcatgagctttttattccagggctgaaagagggcgaactttacaaatacgagatcaagctcaaaggggatacggtggttttgaagtccgatccttacggtacgctg

SEQ ID NO: 437 - DNA, 711 bp, unclassified Lachnospiraceae
ccctatgttgccagcgaaaccaaggcttcccgaaaaacctatgccatcgccaatcgtttctgcattttcgatgaaaatgagcagctgatcggcgccatggcccagatgaaatttaaggaacgctctctggatatcgcccacgaagtcttaaaagccgaacacgattactataaagccgaatatcaaaaccagatgatgcataccagcggttttgataaatatctgggaaatgacccgaaaatccacgcgctccgtcagctcggactgaaggtatccaaaaccgatttttccgtattaattaccggagaaaccggcaccggcaaggaacttattgccaaatccatccatatcgaaagccatcgggccaacgaacctctggtctgcgtcaattgcggcgccattccgatggaactcatggaatctgaaatgtttggttatgaggaaggagccttcaccagcgcacgcaggggcggtaaaatcggtaaattccagcttgccaaccacggcaccctgtttctcgatgaaattggcgatcttcccctgcctctccaggtaaaactgctgcgtgtgcttcaggaacacgaaatcgaaaaggtcggcggtaccaaaccgatccctgtcgatgtacgcattatcgccgccacccgaaaaaatctccagcagatgatggaagaaggcaccttccgtgccgatctctattaccggctcgcc

SEQ ID NO: 438 - DNA, 564 bp, unclassified Lachnospiraceae
atgttgacgatattatttgacctggacggcacattgctgccgatggaccaggatgtgtttgtcagagactattttggacatctggcaaagaaggtggcgcccttcggttatgatccgaaagaccttccggcaaatctctggaagggtgttgcggcgatggttatgaacgacggcagatgttccaatgaagaagtgttctggaatgttttcaaaaaaatctatggaaaaaaggttgaggaagacaagccggtttttgacgatttctatgccaatgaatttcaggaaacagcaaaggtctgtggaagaaatccaaaggccggagcctgtgtaaaagcctgtaaggcgatgggacaccgggttgttctggcgacaaatccgatttttccggcgattgccacagaaagccggatccgctgggcgggattggagccgtcggattttgaatattatacaacctacgaaaattccagattcagcaaaccaaatctgaaatattatgaagagcttctgcagaaaatcggtgtggaagccggagaatgtctgatggtcggcaatgatgtttct

SEQ ID NO: 439 - DNA, 540 bp, unclassified Lachnospiraceae
atgagtgaaaataatgcaaagaaaaaaatgtcattcggtgagatttggcagaaattcggtacgattggtatctttgttctcttattgattattctggctgttataaagccggacagtgtatttaattcaagcagtgtgccgcagattctgaaacagagttcggttaacgttctgctggccctcggtgaatttttcgcgatccttattgccggcattgacctgtccgtcggttcggtggcagggctgaccggtctgctgaccgcaaagatgatgatcgtcggcgttccggtgccggctgcgattctggcaggtatcctgctgggtacagcctttggttttatcaacggtatgctcgtcaaccgtacaggcctgcatccgtttatcattacactgggtacacagtcgattttccgtggtgttaccctcgtattatcaaattcccgttccgtatacggttttccggtatcctttacagccatgatgagcggtaaagtgatcggtattccgattccggtaattattgcactgattgcagcagtt

SEQ ID NO: 440 - DNA, 837 bp, unclassified Lachnospiraceae
atgaaaacagcggtaatgacggacagtaacagcgggataactgcggccgaaggaaaagaactcggcgtatttatcgtgccgatgccggtaattattgatggggtaacttattttgaaggaaaaaatctgctgcagccggacttttttgaaagtcttatgagcgggaaggatgtgagtacatcccagccgtctccgggagatctgatggagctgtggaacagggttctggctctgggatatgatgatattgtttatattcccatgtccagcgggctgagcaattcctatgcgagcgcagcggttctggcagaagaatatgaccatcgtgtgcatgtggtggataatcaccggatttcgattccccagttagcatcggttatggatgcggtcaagctggtttctgaaggccggactgccggagaaattaaagagcttcttgaaaaagcagcgcttgaagccagtatttatattgcggtggatacactggaatttttgaaaaagggcggtcgggtgacaccggcggcagcagcgataggaagtgttctgggaattaaaccccttctttccatccagggggacaagctggatgcttatgcgaaagtccgggggatgaagcggtgcagaagacggttgatcgaagcggtggaaaaggatttaaatgaacgtttttcggagggcgatatgtccaaagtgcggattgcgacggcaggatcgtttcggaatccggagctggcagaggattggcgtcaggaagtggcccgggcctttccggattatgaagtggtttaccgggatctgggatgcagtatcgaatcccataccgggccggaggcaatg

SEQ ID NO: 441 - DNA, 615 bp, unclassified Lachnospiraceae
acggaactggggtattcggtggtttccgtcgcggacacagaactggtcggcatgataaaattacatccatacgatgcggtgattctttctgtggaagtgccgggagatgaccgggatgagatgtttcagcagatccgtctgttttcggacgccccgctgctcggtgtgtgtggtgaaaaaacgccggaatgggcggaatatatgcgcagccggtttgacgggggcatcgatccgcggctcagtgatgaagttctggctgagatgatggaggactatctgcgtcaggcctataaacgggttcacaatgtgcggctgcatcagtacaaaaatcttaaaatcaacaatggcggcattaaaaaagcagaagtgaattataaaaaactggatttgacggcaaaggaatttatgattttaaatctcctgatgtgtcacagagaccgcatccatacaaaggctgtcttatatgagacgatttggcggcaggcttataccggagatgataatgcggtaaagatacatatcagcaatctgagaagcaagctgaaacgggcggacccgggggagcagtatatcgaaacggtctggggactcggataccggatgtgcagagactga

SEQ ID NO: 442 - DNA, 1008 bp, unclassified Lachnospiraceae
atgctgaataattcactttatcaaaccattatgcgggattacaaccgccgccaggccgaagccaaacatgcccaggatcttcggacccgggagattttttcaaaactcccggaatatgaaactctggagcaggaaatcattactctgtgtgccggagaagcccggtccagagttttaaaaccggagggcgccggggaaacgtcccgccgcgaactccacgaccggatttcccgtctgaaatcccgtcagttgaagcttctgctggatgccggctatcccgaggattatcttgagcttcattacacctgtccccgctgtaaagacacgggcttttatgagaacgatctctgtccctgtttccgtcaggccgctgcccgccggatctatgaccagaccaaaatcgcgccgatcctcgagaaagagaacttcggtacttttcggatcgattattattcagagaccgtagatccccgcttcggcatcagccctgcggagaatatgcggacgatcgcggcacggtgccagcagtacattaagcatttcgatacccggtttgcgaacctctttatttacggtgaaaccggcgtgggcaaaagctttctgacccactgtatcgccaatgagcttctgaaatcttcccattcggtcctctatctgaccgccttcgaactgatcgaagctttcgaaaaacacacctttggcgataatgatgaccgggaagacagcctttatgaagatacgctttttgattcgatcctgaactgcgatgccctgattattgatgacctcggaacggaaaccgtcaacaactttacggtctcccagctttttctctgtctgaatcaccggcagcagtcccggaaatcgaccattatttccacaaaccttccggtcgaagccattcaggatatctacagtgaacgcattttttcaagaattatcagctattatgagatttttctgattatcggcgaagacatccgcttccggattgcccggagccgctga

SEQ ID NO: 443 - DNA, 501 bp, unclassified Lachnospiraceae
atgaaaaagtcactcgcaatgttactggcaggagccatggtgatcgcatcattaacagcctgcggaggctcccagaagaaggaaactactgcggaaacaaaagcagaaacaaaagcagaaacaacggaagaagctacagcagagacaaaaaaagctgcagcggatgacggaaaaacttacaaaatcggtgtgttacagttagttgaacatgctgctctggatgcatccaacaaaggttttgttgctgcactggacgatgcagggattgcttatgagatcgaccagcagaatgcacagggcgatcagtccgcatgtcagacaatcgcagaaaaactcgtgaatgacggtaacgatttaattcttgccattgctacaccggcagctcaggcggttgcaggctgtacaacagagattccgatcgtaggtactgcgattacagattatgccgcttccggtctggttgatgataatgccgctccgggcggaaatgtcacaggaagc

SEQ ID NO: 444 - DNA, 345 bp, unclassified Lachnospiraceae
atggatgtacatgaattattattaaaagtccagaatcacgaagtagacctggcatcggcagaggaatatttaaagaaactgccttatgaggatttgggatttgcaaaactggaccaccaccgggcgctgcgctccgggtttggcgaggtcgtttactgtgccggaaagacgacggagcatctggtacggatattccagagctttgcggaacgaaagagcaatgttctcggaacgcgggcaacaaaggaacagtttgcggctgttcgggaagtgcttcctgaggccgtgtatgaagaactttcacggacaatctatcttcagtataatgtgccgaagctggaaggc

SEQ ID NO: 445 - DNA, 531 bp, unclassified Lachnospiraceae
atgaagaaattcataaaaccagcggccgttcttgttattgcggctgtaattcttctgggaatacggtttgggcttgccggtgcagcctctgccagtgccgaagctgccatgcaggatgtttataaacagctgcttccgggaagtacaagttttaccgaagaagaatattccggcgaggatgctaatattacagcagtttataaaggtgatgacggctatattatagaaacaacaactgccggatatgtcaatgatattgttcttctgacaggcgttcagaatgacggtacggtgtcgggaattctgccggttcggattcaggaaacctttggtcttggtcagaatgcaggaaaagctgcatttttaggtcagtttctcggcattaacagtgaagcagccgtcggcgaagaaattgatgcggttacaggcgccactgtgacgtcgaaagccgtaaccaaaggtgtcaattcagccgttgcatttgtcaccggagcggatgtttcatccggcgctacagaatgggagggataa

SEQ ID NO: 446 - DNA, 816 bp, unclassified Lachnospiraceae
atgaaaataacagatgctgtccgaagcctgaagggcgtcggcgataaaacagaaaaaagtttaaataaattaggcatatttacgatagaggatttgatcgaattttatccgcggggttaccagtcctatgaagcgccggtgtatctttccgatgcggtgccggaaaaacggcaggcgattatcggatatcttcatcgggaactcgttcggattcccggcggacgggtggaaaaaacaagcggaacgctgatcgaagacggacgcagactccagcttttatggtaccggatgccttatttgaaaaaacagatcatttcaggaaaaaactatattttttacggaaccgtcaaaactaagaacggacagtggacgatggaacagccggaagtctatgaaccggaggcttatgaaaaacttcagtccacggttcagccggtatattcgctgacggaggggcttcatcaaaagacgctcagcaagctgatccggcaggtttttgacgaagatcccctttttgaggaataccttccggaagatctcagagaggaactgaaattatccgaatacaattatgctgttcagaacatccattttcctgaaaacagggaagcgcttgggcaggcacggcgccgtctcggctttgatgaattttttctttttgctctggcaatacagcggatgaagcatttcagggaacgttcggaaaacaggcatcgggccgcgtcactgacatgggctggggcttttataaagggactcagctacacattgacaggggctcagatgagggcgtgggaagatatttccagagatttt

SEQ ID NO: 447 - DNA, 795 bp, unclassified Lachnospiraceae
gacggtgtttatctctatgatacggacggacgcagatatctggattttgctgcggggatcgcagtcaatgcctttggctataatgtggaggaatataaagatgctctgaaagcccagatcgataaactgatgcatgtttccaatctttactataccgaaccgatggcaaaggcggctcataaactggcggaagccagcggattaaaacgtgtattttttaccaacagcggtacggaagccattgaaggcgccattaaggtggcccggaaatacgctttcaaaaaagacggaacaacggaccatgagattatcgctatggaacattccttccatggacggagcatgggcgccctttctgtgacaggcaatgcccattaccgtgaggcgttccagccgggcatcggaaatatcgtttttgcggaatataataatctggaagatgtaaaatcaaagattacggacaaaacctgcgcgattctttttgaaaccgttcagggtgaaggcggcatttatccgggagaaaaagaatttatccaggaaatccggaaaatctgtgatgaaaaagatattcttttgattttggatgaaatccagtgcggcatgggccggaccggaaagatgtttgcctatcagcactacggaatcctgccggatgtcatgacatcggcaaaggctctgggctgcggcgttcctgtcggcgcttttgtcgttggcgaaaaggcagaaaatgctctggaaccgggcgatcacggctcaacctacggcggcaatccatttgtgacagcggcggtgtgc

SEQ ID NO: 448 - DNA, 708 bp, unclassified Lachnospiraceae
atgacaaaaaaatggacatgggaaaccattgcagatactttaattcaggaattcaaagaaaatgtttataaaaaggatgaaaaaatgcccagtgaaaaccatatggctgtccgctttggcgtaacacgatcagaaatccgcaaagcctacgaacggctcaaggaacagggctatgtctattccatgcagggctacggcagcttcttttccgggaaacgggaaaaaatacggctttttatgaacaatgaaagttttacacataaaatggcttccctgaatctgcctctggaaacccgtaatatcggttttcaaaagcttcgggaagcctctcttattcacagtatgctcggtatcgacgacggaacagccgtctataaaatcacccgcctccggattctggccgatgaaccggcggctatccacatcagttatcttccggaaaacctttttccacagattcaaagggacggtccggacatccggtcggtttttgaatatatccatcactggggctacagggatctggctgcagacaatatgcagctgaccgtatccaccctcagtaaaaaagagcgtaccagccttcatattcagggatacgctccaagtcttgttctcacatcccgctgcatcgaaaagtccacggggactgtggtagaaatcgcacggacgatttaccgcagcgataaatttatttttgagttataa

SEQ ID NO: 449 - DNA, 531 bp, unclassified Lachnospiraceae
atcgatgaaaagtttacgatccagcagcgtattctgcttcagggaacggtctgccgcagtgaacgcagactgaaaaaaagcattgcttttaatgatgtgatcgtgacccggtccggtttttcacggctggtggaactgaaaatatttgtcaatgaccagcttctggatatttatgcggcggacggtgtcatcgtttccacaccgacgggttcgacgggctataatctgtcggcgggaggtccggttgtctttccggagacaaagatgatgattatcacaccgatctgtccccattcgctgtccgcccggagtgttgttgtgtcggcaaatgcccgggtacgtatcgaggtgggacgccggagaaaaacacagaaagaagaagccctggtgacctatgacggacagacggtttatgaactggaatcgggggattcggttgaaatcgtccggtcggatatcagtgtgccgatcatttgtatgccacagaataatttttgtgatacactgagcaataagataaaaaatgcctga

SEQ ID NO: 450 - DNA, 963 bp, unclassified Lachnospiraceae
gaggacccggattggaaaaatatggaacggatgataatgtatgtgatggccgccggggtggttcttggggccatcgaccggatatttggtaataaaaaaggttatgggaagcggatggaggacgggtttatgtatctgggaccgacggcgctttccatggttggaatgatgtgtatgattccggtgttttcaaagatggcagaacagctcttaatgccgctgtatcatttaacaaagattgatccggcgatgtttggcggtcttctggcgattgacatgggcggatatcagcttgcgaaggatatcgctgtggatgccgggctgggagcctatgccggaattgttgtggcggcgacgtttggctgtacatttatttttacgattcctgtggggatgcgggtgcttgaaaaagaagattatccctttttcttcagaggaattacggcgggcctcgtgacattgccggcaggacttatggccggaggcctgatctgcggcttttctgtttttaggattcttcaccagaatgggctgattcttatcgtatcccttcttttgatggccgggttgaaatggcagccggagtgcctggttcggtggcttggaatgtttgcatcggcgatgcaggtggtcattacgatcgggctgatgctgggcgctgtccggtatatgacaggcatatcggtcgttccgggactttatccgatcgaggaagccatgaaggtggttgcagccattgggattgtgatgctcggcagtcttccggcggcagaatttctgcagcgtattttaaaaaagccttttggatggcttggcggaaaaatcggtttgaatgaagtaagtgttgccggattatttgtaggaacggtcagtgtgcttccgcagctcacgatgcttaaaaatatggaccggcttgggaaaatcgtaaatacggcctatattgtcagtgcggcatcgatgttt

SEQ ID NO: 451 - DNA, 4329 bp, Subdoligranulum sp. 4_3_54A2FAA
atgaagcccatgcttacgcagctctggccgcagtttacggcggacgccgcgtttatggacagctacggcagcgccatcgtggagcgtgtcgttgcggacaggcaaaataaaatcatcactgtggtataccgtacggcaaatccggtgcccgctgagaccagcgggcgcctgatcgcatccttggagccgcagttcccgggctttgcactcaaggtgcagggcctgtttgcatatacctgccttacgtcccgtgccgtgttggagctggcagaggaattgaaagacgcgggcctgcccattaacggctttttgtcgggggctcaggtggatatttcgggggagcacatcaccgtgcgcgtgcagaatggtgtgctgctgctgacgcagatggaatttgccgtgaaactggaggagctgattgccgcgcgcaccggagtgcggccgcaggtggcgttggtgtgcgacacggctatttcggccgaggccgtggaagaacatatcttgaaaaaggcgccgcccgcccgccagttcaaggccaaaagcgaggggcctgccgtaaaggtgcagggattggacctggaggacgcgcctgccaagctggtgaatgggcatatgttccagccgacgggcctgacggcgctgcgcgatgttggggcagaggccggcaaagttacggtttggggcgatgtattctttacggagatcaagggaaactggcgcaagatctattccatttccatcacggattatacaggctccatcaatctgaaaatacggccgcaggagggagaaaactgcgacaagtgggaggagcttggccccggggacacgcttatcatcaagggcgactgtgcctatgacaaatacgagcgcgattatgtcatttacccttatgacgtgctgaaggtggcgcggaaaaagcgtgtggaccctgcgccggaaaagcgtgtggagctgcatctgcatacgaaaatgagcagcatggatggtttctgcgaccctaaaaccatcgtaaaaacggcccaccgcatgggtcaccgcgcggtcgctgtcacagatcacggcgtggtgcagggcttccctgaagcgatgctggccacggacgatatccgaaagaaagacccggattttaagcttatctacggcgtggaagcttattttgtggatgacatggtgcccgttgtgtatggtgcggccacgggcgccatgagccagtccttcgtagtgttcgatttggagactacgggcctttcaccggccgactgcgccatcacggaaatcggcgcagtggtggtcgagaacggcgagatcaccgaaagctacaacagttttgtaaatccgggctaccatattcccgaggaaataacgaagatcaccaatatcaccgacgaaatggtggccgatgcaccggggcaggaggaggcgctgcgggcgtttctggaatttgtggacggccgtgtgctcatcgcgcacaatgcccatggctttgacattcgcttcttaaaggcgtgtgcggagcggtacggcgtgccgttcggcaacacctacatcgacacattgccgctggcgcaggcactctatcttggactgcgcaattacaagctggataccatcggtaaatatcttgagatcccgccgtttcagcaccatcgcgcctgtgacgacgcgaaggcgctggcgcagatctacgtgaagatgatcgaggatcttgctctgcgcggcgtaacggcgctggagaatgtgaacacaggtcttggcggcacgcgtgagctggcaaagaagaattttcacctcatcattctggtacgcaatgcggcgggtttgaaaaatctgtaccgtatcatttcggccgcgcatatggattatttcttcaaggttccgcgtgtgccgcgcagccttttgaacaaataccgtgagggccttatcatcggctctgcctgtgaagcgggagaactttacagggcgatcgtggaggggcgaagctttgatgagctgaaaaatatcgccgcttattacgattttcttgaggtgcagccgctgggcaacaacgaatacatgctgcgggagcacatggtggacagcatcgagcagattcaggaattcaacaagacggttatccgtctgggcgaagcgttgggcaaaatggtggtggccacgggcgacgtgcattttatggagccggaggacgccatctaccgcgcggtgctgcaggcgggcaacggcttcaaggacgccgataatcaggcgccgctgtacttccgtaccacagatgatatgctcaagcagttcagctacctttctccggagaaggcgcgggagatcgtcatcacgaacccaaaccgtatcgcggatatggtggacggtgacgtgcgcgccatccccaaaggactgtatacgcccaccatcgagggcgcggatgaatccctgcgggaggataccatgcgcaacgcgcgggaacgctacggcgacccactgcccgagcttgtggaaaagcgtcttacgcgcgagctggattccatcatcaagcacggcttcgcagtgctgtatgtcatcgcccagaagctggtgctgaaaagcgaagagtatggttatctggtcggttcccgcggctccgtcggttcctcggccgtggcgcacttttcgggcatctccgaggtgaacagcctgccgccccactacctgtgtcccaaatgcaaatggagcgagttttacaccgacggctcggtggcggacggcttcgacctgccggaccgtgtttgtccccagtgcggcgaaaagctcatcgtggacggccatgacatcccgtttgagaccttcctgggctttgacggcgataaggaaccggatatcgacctgaacttttccggcgaggtgcagggccggattcaccgctatacggaggacctgttcggccacgaccatgtgttcaaggcgggcacgatctccggcctgcaggataaaacggcctacggctatgtgaaaaagtacctggaggagcgcgggcgcatcgtaaaccatgcggaggagaaccggctggtacagggatgcgtaggcgtcaagcgcaccaccggccagcatccgggcggcatggtcgttgtgcccagcaattatgacgtgtttgatttctgccccatccagcatccggcagacgacaaggaaaagggcatgatcactacgcatttcgagttcaaatacctgcacgataccatactcaagctggacgagctggggcacgatgtgcccacgatgtacaagcacctggaggatatgaccggtatcaagatggattcggtgcccatgaatgaccctaaggtcatctcgctgctggtctccacagaggcgctgggtgtgaagccggaggatatcgacagcctgacgggaaccttcggcatcccggagcttggcacgaattttgtgcgcaacatgctcatcgaagcacagcccaagagctttggcgacctgattcagatatccggcctgtcccacggcaccgacgtgtggaacggcaacgcgcaggacctgatcaaggacggcgtgtgtaccatttccgaggtgatcggtacccgcgacagtatcatgacatacctgcttcataagggtgtggagccgaagcaggcgtttaccatcatggagctgacgcgaaagggcaaggtggcgaagggcggtttcccggagggcgtggaggatatgctgcgcgcccacgatgtgcctgaatggtatttggacagctgtaagaaaatcaagtacatgttcccgaaggcgcatgccgtggcgtatctgatcgcggctatccgcctgatgtggttcaaggtgtatcatccgctggaattttacgccacacacttcacagtgcgcggcgacgatatcgactatgatgccgcggtgggcggtataaaagtagcgaaacagcatttgaaagaagtaaatgcccgcctgaaagaagaaaagaaagccaaggacgaggacatccttgcttcacttcagatggtgaacgagatgctgcagcgcggctacgaatttctgcccatccgcatcgggaaaagccgcgccaagacctatacggtggaggatggtaagatccgcctgccttttatggcgctgaaggggctgggagacgcggcggcgaacacgctggaaaaggctaccctggaaggccaacagtatatttccgccgaggatctgcaaagtgcgtgcaatgctatttgcgctacggccaagaacgaagggcatatggaatacggtatcgtttccaataccatcatggatacgttggcggacatcggcgcgctgggagacttgccaaaatccagccaggtgacatttttttga

SEQ ID NO: 452 - DNA, 3708 bp, Subdoligranulum sp. 4_3_54A2FAA
gtgaaaaaaacataccggaaagttgtgctgcgcaccatgaagggcaccttcagccgcttcatcgccatcgccgccatcgtggcgctgggcgttgggctcctgtcggggctgatggccatgcccatcgatatgcgtaccaccatcgacgaatactttgaccggcagaacatgcacgacctgcgcatcgtcagcccgctgggcctgacggacgatgacgtggcagccatcgccgccgtggacggcgtagacgaggtgatgcccgcctatatgacggacatgttcgtggacgcaggcgaaaaaaagaacatcgtcacacgcattcacagcctgcccacgggccaaatcgaggaaaaagagccggaaaattatctgaaccgcctggacgtggtggagggccgcctgcccattcagcgcaacgaatgtgtgctggtggaaggaaacgtcatcgacggaaccggaccgctgagcgtgggcaatacgctgaccatcgccgccaccaacggcgacgtgagcggcacgctggcagataccgagttcaagatcgtgggcatcgtgcgcaccagctattatttctcggtggaccgggaaagcgccaccatcggcgacggcatcgtcgccctgaaaatgtacgtgggcgaagagagcttttcccaggaggcttacagcgagatcttcgccactgtggccggcgcgcaggcgctggacagcgcctcggacgaataccaggccgctgtggacgccgtggcggaccgggtggaggcggtcagcggcgcgcgctgcaccgcccgttacaacgaagtcaaaacagataccgagcaaaagctggccgacgcccggcaggagctggaagacgccaaggcagaggctgcggaaaagctgagcgatgcagaagagcagctggacgaagggcgcgcggagctggaggacgcccaagcgcagctggacagcgcgaaaaaccagatcgccagcggcgaaaaagagctgcaggccaataaggaaagtctgcccggcactctgacacagaagcagcaggagcttgcggcaggccaggccgcgctgatcgacgccaaagcgcagatcgaggaaaacgaggccctgctgaacgacaaaaagcaagagctggccgacgcgaaggcccagcttgccgcggccaaacagcttgtggaaacactggagcccactgttgccgagggagaagcacgcctgccggaactggcggccgcgctgcccgcactgcgggaggccgcagccgcagcccaggaaacgtatgacgccgcagcggcggcggcggacctctccggcaagcaggccgcctatgaggcggcgcagtcccgggcaaacacagcccaatccgaacgcgacgcggcgcaggcacaggtggacgcgggcatgagcgccgcaggctgcgccacggaggacgagtggctggccacggagccggttgccgccaaggccgccattgatgcacgggacgcggcgcaggtggagctggataccgcaaacacggcactgaacgcggcacaggccgaatattcggcggcacagactgctgtggcccccgcgaaggcggcgctggacgccgccaacgcgcagctggcgtcggcgcaggctgcctacgacacgtccagcgcggcgctcgccgcagcgcgcacgcagttggacaccgcaaaagcacagatcaccgaggcagagccgcagatcgcagagggagaaaagcaattggccgacggtcagcagcagctgtcggccgccaaaaaacaggtcctggaggcggaaaagcagattgcctccggcgaaacggcactgaacctggcccccggcctggcccagctccagctggagctggcacagtcaaagctggattccgccaaggcgcagtatgaggacggcctggcccagctggaggacggcaaagccgagctggaagacggcgaggcggaatacgaaaaacagaaaaaagatgtagagcagcagctggccgacgccgaggctgagatcgcggacggggagcagaagctggcggagctggaagttccggaatggatgattctggaccgcacctcccacgtgagcgcgtcctcttacctttccaatgtggataagctggaggccatcaccacggtgttccccattttctttttcctggtggccgcgctggtggcccttaccaccatgacgcgcatggtggaggaagaacgcctgcagatcggcacactgaaggcattgggctacaagcggggacagatcatgttcaaatatctgttctatgcctgggtggccacactggtgggcggcgccgccggccttgccttcggctttacggtcattcccatcgtcatctggaacgcctacggcaccatgtataccatccccgggttccgctgtctgttccacgcttcgctggccgtgctgggcgtgggcgcggcgctcctgtgcaccagcgccgccacactgaacgcctgcggccagacgctgaaagagtgggccgcacagctccttttgcccaaagcgcccaaggcaggcaagcgcatcttcctggagcgcatcacaccggtatggaagcgcatgaagttcacccacaaggtgacggcgcgcaacctgttccgatacaaaaagcgctttttcatgacggtcatcggcgtggctggctgtacggcgctgctggtgacgggctttggcctgaaggactccatcagcgacatcgtatccaaacagttcggcaaggtgttcacctatgatttcctcgtgacactgagcaaagagagcgccttgaaggatgccggattccaggcgctgatggatgctcccgaacaggtcacgagctacctgcccgtacagcaggagcgcatttcgctggatgtggacggccagagctatgacgtatacctctttgtacccgaggatgaagcacggctggacaattttatcgacctgcatgaacgcaaaagcggcgcagccgtaccgctgacagacgacggcgtggtcatcacggaaaagttcagcgacgaagcgggcctttcgcccggggacacgctcacgctggaaaacggcgaaggccgggagggcacattcaccgtcacgggcgtagcggaaaattatgtggaaaattatgtgtatatgacaccctccgtttatgaggacgcctacggcagcgcgctggaatacaactctgtgctgggcatcctgcccgacgatgcgcaggatgtggacgaagccttctccacatccctgctggaggtggacggggtagcgggcctcacgcagatgagcagcatgcgctcgagtctggacgacaccatcgcgagcatcaactatgtcgtgtacgtgatcatcctgtgtgccggcatgctggcttttgtggtactgtacaacctgatgaacatcaatatcaccgagcgcacaaaggaaatcgccaccatcaaggtgctgggcttctttgagcgcgaggtggaggcctacgtctaccgcgaatccaacgttctcacagtgatcggcatgctgctgggccttgtgggcggtatcttcctgcacatgttcatcatgcgcacggtagaggtggatatggtcatgttcgggcgggacatcaagcccctcagctttgtgctctctgccgtgctcaccgttgtcttttccctgctggtgaacctcggcatgaagcgcaagctgcggaacatcagcatggtggaaagcatgaaagcgccggaatga

SEQ ID NO: 453 - DNA, 3624 bp, Subdoligranulum sp. 4_3_54A2FAA
ggggcggcgtcctcttcaggcgcttcgtcttcctccgagacggtgtcttcggatgtctcatcttcttccggttctgcggatacagccagcgccgcaacggcggcagatactgtaaacctggcgcagggaaagggcaatgatgccttcacactggaaatggaaggcgccggtacggaccttgaccctgccaccaaggatacaacgatccgcgaaaaagaggagagcatcctcaaccgcctgacagacggctattacggcagcggcgagatattggacggcaattggaatggcagcggcatgcgctctcattattatgaggcataccggcagatcgaccgcgccatcacgctggatctggggcagctgagccatattgaatcgctttccttccacatgcaggagggcctgggatgggggatttctgcgccgtcgatggtcacctacttcctgtcggaggacggcgtaacgttccaccgcgtgggccgtgtttcccgcttcgacgccgtgaaggacgaggacccggaccattattattccgtggtggaaaacggcaaagaggtgaattgccagagctactattttacgctggacggcctgaactacaatgcgcgttatgtaaaggtcgcgtttgagctgacaggcacctgggcctttgccgacgagctggaggtacggggcacagcggcgccttcggacaccgccgaaacgctgccggatactccgggcacggattatgaagttgtgaacaaatatgcctggacagaccaggcacgcggcatccagcacgaggcgctggcctatgccggacactggttctcttccgcgggcggcgcgctgcagaccagccagaaaaccgtggaggagcttcttcccgtggtgggctatgtggacgaggagggcaatattacggataagttttttgaatccgttaccttcctgtcccacggctatacaccaaatctggatacgccggatgacgatacggattaccataacctcatctatgtgagcagtacgatgacctccaaccccaatgcggcacagatgtgtgccaccgcggaggactggcagacctatcttgattttctgttccactacggcgagggtacaggcacggcttataacctggacgcgctgaacgaggctgtggccctggtgaaagaggccacaggcgacgcggattacaaagtgggcgtgaagattgcgttttatccgcccattctgtgccaggatgccttcggcacgctgcccggcggcacccattcgctgaatttcgcggtctcggataccaatccggcgcagcaggctctggcggaccgcatggaggcctccaggtggtatctggacaccgtgattcgggaattcaaggccaagggttacgagaacctgcgtctggacggcttctattggtacgatgaagtgatgcactacgacgtggacccgttggttctggaaacggtgcagggtgtaacggattacgtccacagcctggagaacggcgcgtatcaaatttactggatccccttctaccagtcctccgggttccgcgcctggaagaccttcggctttgactacgccatcatgcagcccaactatgcgttcgacgccaatgcctccgaacagcgcattgcggataccgctgcgctgtgcaaaaagtacggcctgggcatcgagatggaattcggcggcatcaacgacaaatacatcagccagttccgctcttacctcacgcaaggggcggacgacaagcttgcctatcagaacaacagcctgattgcctggtacacgggcacatggggcattgcagagacgagccagaacgtctcgggcacgcggtatatctacgacgcgatgcatgatttcttcagcggcatccccacggagatggagaagcctgtcaagaatcttgcggcggcgggcacgcttacactggaagcggaaaatgtaaaaaataccgaagaattcaacaagctgctgcaggcgcttccgaaactggtggacggcaatgaaaaggccggcgcctggaacgacagctatgtgaagatcaatgccaatcacgcgcaggggccgtttacgctgacagcggatctgggcggtatcgggcaggtggagcgtgtggcactgggctccgtttccaatccgggatggggcatcggcgcgccggacagtgtttcatacagtgtttcacaggacggccagacatggaaagagctgggtactgtaacctatgcgcaggcggagataagcccgggagcggccaacggcttcgagacggtcgagtatgtgctcaagctggatgccgccgaaaaggcccgttatatccgcgcggagttcggccacggcctggacgcctccaaagacccggctgcgccctatacatggctgggcgtggacgaattcacggtaaacggcacggcgccgctggcttcgggcgagggcatcgcatctatgggtaccataacgttggaaagcggaaatgtcctgaacagtgaaagctttgcaaaccttcagaatgtggcttctgtgctgctgaacaacggcgtccttcaaacaggaagctgggcgaaccagaatacgctgaacggtgattatatcggcgtcctgcagaccgtggctacggagccttttacgctgcagatctcctttgacactgtcgctgaggtgcaggctttgggggtagactatcttgcctgggtatccgcgggcatcggcgcgccggataaggtgacatattccgcgtcgctggacggcaagagctggacggagctcggcaccgtggcgcaggaggacgctcgccgctatgaagccatcgccacgggtatggacgcctaccactttgtactggagactggtgctccggtgcgtgtgaaatacctgaaggccgagtttgagcgcggcttcaacacggacaaaaataccaaattcggctgggtggcttttgatgaattcaccgtggagggcgcgctcacttcggaacagcccgctcccgtgttcaacgaggtggacagtgcaacagggatccgtgttgcggcagggctggacacagtgccggccggcgcgcatctcaaggtgaagccggtggatgcgggcgacgcggcatatgcttctgtggcgcgcgctttccgcaatgaaaatgttgaccttgcggcatttgatatttctttgctgctggatggcggcacggtgcagccgcgcggcgtgctgaatgtggcgttcccgcttccccagggctttgacgcagccaaaacgcagctgtatcacgtaagccctgagggcgaaaaagaactgctgacggcaaaaacagcagacggcctgctgaatgcggagctgacacatctgagcctgtatgtattggcacagccgaaggcgggcgccgaaagcggcggctcctcttcttccgctccttcgggcgggacgagcagttcttctgcagacacatcttcctcttccggcacgccttccggcggcgcggggggcgcgtcttccggtacggccgcacctgcgccgggaatgccccggacaggggatgcgttcccgctggtctgggtcaccgtagccgcggcggcttgtgtgctcctgctggctgtgctggcttggaaaaagcaccgggagacacgcgcataa

SEQ ID NO: 454 - DNA, 3597 bp, Subdoligranulum sp. 4_3_54A2FAA
cgccgcgcaccgcgcggggcggcggggcacgcttcaaaaattgagaaagaaagggttcgtttcatggagtttaacgcttttgattcaatcaagatcggtcttgcctccccggatcagatccgtgcctggagctacggcgaggtgaaaaagcccgagaccatcaactaccgcaccctgaaaccggagcgcgacggcctgttctgtgagcgcatttttgggccgacgaaggactgggaatgccactgcggcaagtacaagcgcatccgctacaagggtaagatctgcgaccgctgcggcgttgaagtgacgcgcgccaaggtgcgccgcgagcgtatgggccatatcgagctggccgcgcccgtttcgcatatctggtatttcaaggggatcccgtcccgcatcggcctgatgctggatatcagccctcgcctgctggaaaaggtgctgtactttgccgcatatatcgtgaccgatcccggcttcacacctctggaggaaaagcagctgctcagcgaaaaagagtaccgcgacatgcgtgagcggtacgaggacgagttcaaggcagcaatgggcgcagaggccgtgaaggagctgctggagaagatcgatttggaaaagctcagcgaagagctgcatcaggaactggaggaagcaggcggccaaaagcgcgtgcgcctgctcaagcggctggaagtcgtggaggcgttccgcatctccggcaaccgtccggagtggatgatcatggacgtcatcccggtcattccgcccgatatccgcccgatggtccagctggacggcggacgttttgccacgtccgacctgaacgacctgtaccgccgcgtcatcaaccgcaacaaccgtctgaagcgtttgctggagctgggcgctccggatatcattgtgcgcaacgaaaagcgtatgctgcaggaggcggtggacgccctcatcgacaacggccgccgcggccgtccggtgaccggccccaacaaccgcccgctcaagagcctgtccgacatgctcaagggcaagcaggggcgtttccgccagaacctgctgggcaagcgcgtggactactccggccgttcggttatcgtcgtcggcccggagctgaagatgtaccagtgcggtctgcccaaggaaatggcgctggagctgttcaaacccttcgttatgaaggacctggtggaaaagggcattgccaacaacatcaagtcggcccgcaagatggtggagcgcacccgcaccgaggtgtgggactctctggaagccgtcatcaagggccatcccgttatgctcaaccgtgcgccgacactgcaccgccttggcatccaggcgtttgagccggtgctggtggaaggccgcgccatcaagctgcatccgctggtctgcactgcgttcaacgcggactttgacggcgaccagatggctgtgcacgtgcccctttccgaagaagcgcagcgtgaggccaaacgcctgatgctggcttccggcaacctgctcaagccggctgacggcaagcccgtcacagtgcctacccaggatatggtactgggcagctattacctcaccatggtcaacgacggagacaagggcgaaggtaaggtgttccgcgacgaaaacgaggccgtcatggcctatcaggaaggcgttatcacgctgcaggccaagatcagggtgcgccgtaccatggagatcgacggcacagagcgcagccgaatcatcgacaccacagtgggccgcatcattttcaaccagcccatcccccaggaccttggttatgtggaccgctccattccggagaaccgtttcctgttcgaggtggatttcctcgtcaacaaaaagaaactgggccagatcatcgaccgctgcatccaggtacacggcacgtccgtcactgccgagatgctggaccgtgtgaaggcgcagggctacaaatattccacgaagggcgcggtcaccgtagccgtttcggacgctgtgatcccgccccagaaggctgaattgctggcatctgccgaggagcagatcggcaagatcaccaagcagtacaacaagggcctgatctccaacgaggagcgctataacggcgtgatcaaggtctggagcaagaccaccgaggacgtggcaagcgccctgcaggaaaacctggatgcccgcaaccccatcttcatgatggcagactccggcgcccgcggctccatggctcagatccgccagctggccggtatgcgcggcctgattgcaaacacgtccggtaagaccattgagatccccatccgcgcgaactatcgcgagggcctgaatattctggaatacttcatcgccggcaagggcgcccgaaagggtctggcagataccgctctgcgtactgcggactccggttatctgacccgccgtctggtagacgtctctcaggacgtgatcatccgcgaggaggactgcggcgcggcacagggcatcatggtttccgacatccgcgaaggcaacgagatgatcgaaaagctggaggaacgtctccagggccgttttgcggtgaacgacatccttgatccggccacgggcgaagtgctcgtctccaaggacaagatgatgagcgaagacgacgcgaaagccgttgttgccgcaggcatcaaggaagtggagatccgcagcgtgctgtgctgcgattccaagcacggcgtatgctccaagtgctacggcgcgaacctggccaacggccgcttggtcggtatgggcgaggctgtgggcattatcgctgcccagtctatcggcgaaccgggcacccagctcaccatgcgtacgttccatacgggcggcattgcgtcggcggaggatatcacgcagggcttgccgcgtgttgaagagctgttcgaggcgcgccgtcccaagaatctggctatcatgacagaaatcgcgggtactgcgcacatcgacgactccaagaaaaaccggcacgttgtggtggagggcgtggacgaaaacggcgcgcccgctgaaaagagctacctgattcccttcggtcagcgcatccgtattgcggacggtgcgcagctggagccgggcgatatcctcaccgaaggttttgcctatcctcaggatatcctggccatcaaggggcccattgccgtgcagaactacctcatcagcgaggtgcagaaggtctaccgcctgcagggcgtggatatctgcgataagcacattgaggtcatcgtcctgcagatgatgcgtaaggtgcgcattgaggacgcgggcagcacgaagctgatcgtcggttcgtccatggacaaatccgagttccgcgacgccaatgaggagatcgcggcgcgtgttgccgccggtgagacggacctgaagcccgcccgtgcgaccagtatcctgctgggcatcaccaaggcgtccctggccacggattccttcctctcggccgcttctttccaggagaccacccgcgtgcttaccgatgcagccatcaaaggcaaagtggacccgctcatgggtcttaaggaaaatgtcatcatcggcaagcttatcccggccggcaccggtattcccgaagtggaagccgagctggcggcaggggacgaggtggacctgtaa

SEQ ID NO: 455 - DNA, 3483 bp, Subdoligranulum sp. 4_3_54A2FAA
atggctgaaaaggcaagaaactttacacatctgcatctgcataccgaatacagccttttggacggtgcatgccgcattgaggggctgatgcagcgcgtgaaagcgctgggccagaccgctgttgccatcaccgaccacggcgtcatgtacggctgcgtggatttttacaaagccgccaaaaaggcgggggtcaaacccatcatcggctgtgaggtgtatgtcgccacacgcacacggttcgacaaggtgaaccgcatcgacggctccaaccatctggtgctgctgtgcaaaaacgagacgggctataaaaatcttatcaagatggtgtcggcgggctttacggaaggcttttacaacaagccgcgtgtggaccacgagctgctggaagagtaccatgaggggctgatatgtctctccgcctgccttgcgggcgaaatccctcaggctttattggcaggggattatgaaaaagccaagaatcttgcgcggtactatgaagatctgttcggcaaaggaaactattatattgagatacaggaccatgggctggacgagcagcgcacggtgctgcctctgcttgtgcggctttcccgggaaacaggcattcctctggtcgccaccaacgacgcccactatcttgaaaaagaagattccaggatgcagcacattctcatttgcatccagacaaacaagacggtgaatgacgatgacgtactggaattcggcacggatgagttctacgtcaaaagcaccgacgagatgtacgagctgttcagcgcatggcccgaaacctgtgagaacacgaaccgaatcgcagagatgtgcagctttgattttgaattcggcgtgacaaagctgccgtattttgtggcgccggacggcatggacaacaaagagtattttgtaaagctgtgccgggacggtctgctgcggcggtacggtgcggacgtgccggaggatatacgcgcccggttggactacgagatatccattattgaccgcatggggtatatcaactattatctgattgtgttcgatttcatcaactatgcgaaaagccaggggatccccgtgggcccgggacgcggctccggtgcgggaagccttgcggcctactgtgtaggtatcaccaatatcgaccccatcaagtacaatctgctgtttgaacgcttcctgaacccggagcgcgtctcgatgccggactttgacatcgatttctgttacgagcgccgtcaggaggtcatcgactatgtgatccgcaagtacggcgccgaccatgtggcgcagatcgtgactttcggtacgatggcggcgcgtgctgccatccgcgacgtaggccgcgttttggacatgccctacggcacggtggacggtattgccaagctggtgccgatggagccgaaaatgacgttgacccgggcgctttccatctccagggagctgaaggcgcgctacgatgcggacccgcaggtgaaagagctcatcgatatgtccctcaagcttgaaggcatgccgcgccatgcgtccacgcatgcggcgggcgtagtcatcacccgtgaggcagcggatgaatacgtacctctcgcaaccaacgacggcaaccctgtcactcaatttacgatgaccacaattgaggagctgggcctgctgaaaatggactttcttggcctgcgtacgcttactgtcattgacgatgcggagaaaatgatccgaaagcgcgagccgggcttttccatggacgcggttccttatgatgaccagcgcgtttatgccatgctcaacgcgggcgagacagagggcgtgtttcagatggaatccggcggcatgacgcaggcggtgatgggcctgcagtccaaaagcctggaggacatcatcgccattatctcactgtaccgtccgggtccgatggagtctattccaacgtatattgcgaaccggcacaatccgggcaatgtaaaatataaaacgccgcagctggagcatattctggacgttaccaacggatgcatcgtttatcaggagcaggtgatgcagatctgccgtgaactggcgggcttttcttacgggcaggccgaccttgtgcgccgcgccatgagcaaaaaaaagcacgatgtcatggaaaaggagcgccagcatttcgtgcacggcaacaccgagccggggcacgaatgcgccggttgtgtggcaaacgggatctccgaaacagtggccaatgccatttttgacgatatgtccagctttgcatcctatgctttcaataaagcgcatgcggcggcctatgcggtggtggcataccaaaccgcttatctgaaaaggcattatccacgtgaattcatggcagccctgctgacgagcgtgctggacaacacgggaaaggtgatcgagtataccgctgaatgccagcgtatgggcatccgcgtgctgccgccggacatcaacgccagcgatgcgggctttacggtggagggaaaggatatccgtttcggcctgctggcgctgaaaaatgtggggaggaacctgatcgctaccgttgtgcgtgagcgcagcggcacgccgtaccgcagcctgtatgatttctgcaagcgtctgcatggcaccgagatcaaccgccgcgcggtggaaagtatgatcaaaagcggggcgttcgacaatctggaggccaagcggcgttccatgatggacggcgtggagggcatcctcaaaagtgtggagagtgaagcgaggcggaatctggacgggcagatcgatctgttcggcgctctggacggtgaacaggagtctggacggaacgtctataaattgccggacagcggggaagaatatccttatgacatcctgctccagatggagaaagaagtgagcggcctgtacttgtccgggcatcccctggaccattaccgtccggtgatcgaaaaggtgtccacatgccgcatcagcgagcttgtgggagagaatgcgcatgcctatgatgagcagaatgtgacgcttgtctgcacggtggtgcgcaccaagacgatcaataccaaagcgggcggcatgatggcgttcatcacggtggaggacctgagcggctccatggaagtgcttgcgtttccgaaggtccttctggctgcttctgaagctgtgcatgacaacgccgtagtggtgatcaaagggcgcgtgtcttataaagaagatgaacccagcaagctgattgcggattccattgtggacgtagagcgatatgagcccgataagataaaaactgacatcaaaagtacaaaaaacggactatggctgaaactttcgtccatgcgcagcgagagctttgaggagacgaagaacctgctccagatattcgagggcaatttccctgtttatatgtacttcgaggatacaaaacagcgcatgcttgcgcctaaaagcctttggtgcacacagagcgacctgttggtctccgagttggagcgggtactgggagccggtaatgtaaaagtaaaataa

SEQ ID NO: 456 - DNA, 3714 bp, Subdoligranulum sp. 4_3_54A2FAA
atggtgaaagtcaagcccgtacaacttggcaaaaccgaacgcatgagcttctcgcgcatcgacgaagtcatcgacatgccgaacctgatcgaggtgcagaagaactcataccagtggtttctcaaagagggcctgaaagaggtcttccgggacatttcgacgatcgaagactacaccggcaacctggtgctcgactttatcgactaccggctggattccgagcccaagtactccatcaaggagtgcaaggagcgcgacgtcacctatgcggccccgcttcgcgtgaaagcgcgtctgctgaacaaggagaccggcgaagtgaaggagcaggagatcttcatgggcgattttccgctcatgacggattccggcaccttcatcatcaacggcgccgagcgtgttatcgtctctcagctcgtccgttccccgggcgtgtatttcggcaagagctacgacaagacgggcaaggaactgttcaccgccacgctgaaccccaaccgcggcgcgtggctggaatacgaaacggatgccaacgacgttttctatgtgcgcatcgataagaaccgcaagatccctgtgacggtgttcatccgtgcgctgggcctgggtgacgacgcgaagatccgtgatttcttcggcgaggacgagcgcattgaggccaccatcgcaaaagattccaccaagagcgaggaagaaggcctgctggagacgtaccgcaagctgcgtccgggcgagcctcccacggtggagagcgcgtccagccacatcaacggtttgttttttgacccgcgccggtatgacctttcccgcttcggccgctataagatgaacaagaagctggccatcggccgccgcattcagggctttgtggccgcccgtgatatcgtggcccccctgacgggcgagctgctgtgcgctgccggcgaaaagatcagtgcggaaactgccatggccgccgaaaaatcgggcgtgagcctggtgtatctggcgctggacgacaaggagatcaaggtcatctccaacggcacggttgccgccaacgatttcctctcctttgacgcaaccgaatgcggcatcaacgagcgcgtcaatttcagcgaactgcgcgccatcctggacgagaccagcgatgtggacgagcagagggagctgctggagaaaaaccgtgaccgtctcatcagcaaaacagtcaccgtggatgatattttcgcatccatcaactacttgaacggcctgggccacggcgtgggcacggtggacgacatcgaccatctgggcaaccgccggatccgcagtgtgggcgagctgctgcagaaccagttccgcatcggcttttcccgcatggagcgcgtcatccgtgagcgcatgacgctgcaggcccaggacatggaagtggtgacgccgcaggcgctcatcaacatccgtccggtggtggcatccatcaaggagttctttggctcctcgccgctgtcccagttcatggatcagaacaacccgctggcagagctgacgcacaaacgccgtctgtcggctctcggccccggcggcctgtcccgtgaccgcgcaggcttcgaggtccgcgacgtacactattcccattacggccgcatgtgccccatcgagacgccggaaggtccgaacatcggcctgatttcctatctggccacgttcgccaagatcaatgagtacggctttatcgaagcgccgtaccgcaaggtggacaaggccactggcgttgttaccgatgaagtggtctatatgaccgccgatgtggaggatgagttcatcgtagcgcaggccaacgagcagttggacagcgagggacgttttgtccgtccccgtgtttccagccgctggcgcgatgagatccttgaggtcgacaaagagcgcgtggactacatggacgtcagcccgaagatggttgtgtccgtagctacggctatgatcccgttcctggagaacgacgacgcaaaccgcgccctcatgggctcgaacatgcagcgtcaggcggtaccgctgctcgtcaccgagcagcccatcgtcgccaccggcatggagtacaaggccgcgtgcgactccggcgtgtgcgtgctggcgaaaaacgacggcattgtggagcgtgtgactgccgataagatcacggtgcgcacgtccaagacgacgacggacgaatacgagctcatcaaattcatgcgctcgaaccagggcacctgcatcaaccagcgccccatcgtcagcaagggcgataagatcatcaagggccaggttctggccgacggccccgccacgaagaacggcgagatcagcctgggcaagaacgccttgatcggcttcatgacctgggagggctacaactacgaggacgccgtccttatcaatgagaagatcgtccgcgaggacgtgtacacttccatccacatcgaggaatacgagatcgaaagccgcgagacgaagctcgggcccgaggagatcacgcgcgacatccccaacgtgggcgaggacgcgctgaaggacctggacgagcgcggcatcatccgcatcggcgccgaggtaggcgcgggtgatatcctcgtcggcaaggtcacgcccaagggcgagacggagctgacggccgaggagcgcctgctgcgcgccattttcggagagaaagcgcgcgaggtgcgcgacacttccctgcgtgtgccgcacggtgagtacggaatcatcgtggatgtgaaagtgttcacacccgagaactgcgacgagctgcagcccggcgtgcgccaggtggtgcgctgctacatcgctcagaagcgcaagatcagcgtgggcgacaagatggccggccgccacggcaacaagggcgttgtatcccgcattctgccgcaggaagatatgccgttcctggaggacggcacgccgctggacattgtgctgaacccgctgggcgttccctcccgtatgaacatcggccaggtgctggaggtccatttgggctacgccgccaaggcgctgggctggaaggtcatgacgccggtgttcgacggcgcccacgaggaggacatccgggcgatgttccgtgagaccggtaagcgcgaggacggcaagagctatgtttatgacggacgcaccggcgagcgttttgacaaccccgttaccgtgggctatatgtattacctcaagctgcaccatctggtggacgataagatccacgcccgctccaccggcccgtacagccttgtaacgcagcagcctctgggcggcaaggcccagttcggcggccagcgctttggcgaaatggaggtgtgggcgctggaagcttacggcgccgcctataccctgcaggagatcctgacggtgaagtccgacgacgtggtgggccgtgttaaaacctacgaagccatcgtcaagggtcagcccgtgccgaagcccggcattcccgaggcgttccgcgtgctgatgaaggagctgcagagcctcggcctcgatatgcgcgtacaggacgccgacggcaacgaggtggacatcaagcagaattacgatgacgacgatatgggctttgacaattccgacctcgcgctcggcgacgacgtgatggtggagagcgagctcgccggcgactacagcatcgaagacgccgacgcggacgccgaatttgaagaagaagatgaggaacccaatccggaagatctggaatcggatgacctgtttgccgatctgcccgaggatatctga

SEQ ID NO: 457 - DNA, 2757 bp, Subdoligranulum sp. 4_3_54A2FAA
atggataaaaaggatgggccatttttcacaaaccggccccggcaaggaggcatgtatatgccgttttctgaagaaaatgtgctggattttgtaaaatggctcgaaaagtcgtattttgtagaacgggctctgggaaggattgaaaagcttctggcaccggaatttatgatggtgggaaccggacggcgggaggtctgctatgacatgccgcagatgaggttcctgctgcagcaggagcaaagtggatttcatgatacgtttctggtgctaagtgcccattacagcgtccgaacgctcacaccggaggtgttttccgtgtgcggtgagcttgtcgtgcgcgaaaacaatgaatcctgtgaaatgctggatcttcctgtccgcgttacgatcattttgcgcgcggagcagggatgtctgctgctttcgcagctgcatttgtcgctgcccagtcccgaccaggatgacgcggaattttttccgcggctgttggtgggggagaacatctccacactgcgcaggcttgcagacgagcgctccgcagagctgcgggagcgcaaccgtgacctcgatgccctgatgaacaatatccccggcggcgtcatgtgctgcgacgccacggacgaactgaaccttctgcagttcagcgacggacttctgtcaatgttgggttatacacgcgaggagctggggactgttttccataaccgattctccgagatgatttacgagccggatattgcacctacatgggaggctgtgcatgcgcagctggaaaaaggcaatacgaagctcattgagtaccggatggcccgcaaggatggtggtttgatttgggtgcaggacagaggccagctcatgcgccgggaggatgggcgagaggtattctactgcattctgttggatattactgaaacaaaaaaggcgcaggaggatctgcgcctttcgctggaacgccaccaaatcattatggatcagaccaacgacattatttttgagtggcaggtcaaacaggatacactgactttctcgcccaactgggaaaagaaatttggctatgagccggtgcgggaaaatgttcatgcgcacctgctggacaacccgcatctgcatcctgatgatgtaccactgctgcggcgcaagctgtcggatattctggaaagagaaccctatcaggaggcggaacttcgcattcagaagcgggacgggggctatttgtggtgccgtgtgcgtgcgacgctgcagaaagaccgcgcgggtgaaccggccaaagcggtgggcgtgattttggacatcgacgcggaaaagcgggaggcccagcgcatgcgggagcgtgcagagcgcgacaccttgacggggctgtataacaaagggaccatggaagccaaggcagaccacgcgttgggtgcactgatgcccggggaaaacgccgtgcttttgatgatcgacattgacaatttcaagcaggtaaatgatttttacgggcatctgagcggtgacgtgatgttgacggaggccgcacgtatgctgcaggatatgttccgcgcaagcgatattctgggacgcatcggcggggacgaattcaccgtactgctgcgtggttccggggcgcaggccatagcgggccgcaaggcgcaggaggtgttggacgcttttgcgcggctcctgccggcacagggcggcgggccagttttttcctgcagtgttggcatcgctcaagcgccgcaggatggtaccgattatctcacgctttataagaaggcagacgcggcgttgtaccgagccaaaatgcaggggaaaaatacctatgcgttttatacccagttgccgttggaagggctgggagcgcctacacagagcaccgtgggacagacgattgattccgagctgggcacaggcgtgatgcgcagctcgctggcggagtatgtatttcacattctctaccagtccgacgatgtggagaaagcgattcccagcgtgctggagatcgtagggcggcatgtaggtgtgagccgcgtttatatttttgaagattccgaggacggaacatactgcgataacacctttgaatggtgcaacgacggcattgtgccgcagatagaccagcttcagcatatgctggagggcgaactggcggattattataagaattttaacgaggacggtattttttactgccgcgacatccatgcactgcccccgaatcaggtgcaggttctggaggcgcaaggcatcaagtccatgctgcagtgtgtgatccgcgacgacggcaagcccaggggctacatcggctttgatgaatgccgggaaagccgattctggacgcaggagcagacggacctgctgtgcattgtagcggaaatcgtgagcgtatacctgctgaaggcgcgggcacgcacaaggctcacccatgcgctgcagggcgcgcaggcgattttggactcgcaggacgcatggctgtatgtcatccgaaaaggaacgtatgagctgctttacgccaataaaaaaacaatgcaggatgtacccggcgcaatgcccggcgagccttgttaccgtgtgttttaccgggcggacaagccgtgcgtgcattgcccgctggtaaagctggcccccgaaggcccggaccgcgtcaccgcgaggctgtacagcgaggttctggacatggaagtaacggctgtgggcatggaaatcccctgggcgggcggagaggatgcctatctgatggcctgtgaaaaagtaaaaactcagaagaaaaagtga

SEQ ID NO: 458 - DNA, 3072 bp, Subdoligranulum sp. 4_3_54A2FAA
atgggccagcaggaagaaacaagaagcatcgcggcacatgattccctgaccaagatttataattttaccgcattttgcgagtcgtcccgcaagtatcttctgagcgcaggtgcgggccgcagcatgggcgtgatctatgcaaacattattgatttcaagtctgtaaatgaactgtatggtctgccggagggagaccgtatgctgggcgcctttgcagattttttgaagcatctgccgcggacccgtgtctgcggccgtattttttcggataatttcctgtgcctgtttgagcggacgcccggcgtggacctgtacgatgaagcgttgggcttcgcaggagcggtagagcggtttcttgtgggccagcagccgttccatccgcgttcaaagccgcagatcgtcagtggcatcagtgcgctggagggcggcggagaggggctttccgcggccattgacggtgcgaatatcgcgcacaaggaggcaaaaaagaagtatcgcactgcctgcgctgtgtttgatgaagcactcaaagacgagatggcgcgcgccatccgtttgcaggcggacctgcaggcggcgctggaacgggagcagttcactttttatttgcagcccaaggtaaacctgcgtacggggcgtgtagcgggggcggaggctctggcccgctggaaaaaaccggacggcactgtagcaggcccagcggagtttgtgccgcttttggagcgcacgggaaatgtggaacagctggatttcatgatttacgagcaggtatgccgttatctgtgcgggaggcaggcgggagacagcatcgttgtccccgtgtctgtaaatgtgtcccgcgcccatctgaaggacacggatttcgtccaaaaggtaaaacagctgctgatacggtatggcgtgcatccgtccttaatggaattcgagctgacagagaccatgctggcggaatccatggaagaggcggcggctgtaatccgcggcctgcgcgcactgggctgcaaggtatccattgacgatttcggcacaggctattccgcgctcaacctgctcaaggaactggagtttgatatcctgaagctggacggcagctttgtttcgggcgctgcagcggaaggctataaaagcgatgtaatcctgcgcaatatcatccgcatggcggatgagctgtacatgacggtgctctgcgaagggctggagacggccgggcaggtggaacggctgaatacgttcggctgtacgctggcacagggctactattttgcacagccgatgcctgcggaagcgttcgaagcgttcgtacagcaggcgggcggctattgtgcgctgccgtggggcggcgcagatggcgcgcagcggctgcctgactactgtgaagcgtccgccctgacggacagcgccgtgcgttccatcactcattcgctgtttgacacagtgccctgtgccgtggccggagtggacccttccagcaggcagctgctgtttgcaaacgagcagctgttctcgctgtgcgggtatccgcgcggacagatggcggaaatggagaaagcattttttgcccatattgccacagagccggagaaggcccgcctttatgcggaaatgcgccgtcagttcggtacggcgggccggtgcgacaccaagctccctgttcgccgggcagatggcagcgtgatatgggtacgcatgacggcaacatatgcgggcagtccggaatggggccgctatctgctgtgctttttctacgatatcacccgggagcagacgggaacggccgcaaagtcacgcgagatcaagcaactttctgaggagcgggatttttatgcggggatgctcagcagcatcccgtgtgccgtcgcacagttccgggccgaggcggacggacggtaccatgccattcatacgaatctggccggggcacggatactgggatacgaaagcctggaggacttctggagccagccggacccgaatgtcctctcgtgcgttcatccggacgacaggcgcggtgcgttgggtaatctgtcccggctgcgccgcccgggcgacgcgcgcagcttcgagtgccggctggtgcgccgcgatggttcggtgtgctgggtatccgggacacttcagatgctgtccggcccggaggggtccgttattcaagtcgtgtttttggattttaccaacagacatgcgcttcaaacacggttcgtgcatcactacaagcgcttggcgcgtgtgcaggggcaggtcctgtttgaatatgaatacggtacggacatgcttacctttgccggcgcttcagaatcgggcttggaactgccggagcgcgcgccggctttcctcgccgaggtccatgccgggcgcttttcccagccgttcgcatcttatgcggcctgtatcgcacaggcgctggaggaggacggcgatgatgtgtgcggtgcggaacgccggattgaactgcccggcggcgggatatgggtgcgcgtttcactggtggcagtgcgcggcagcagcggcgcaagagagagtgctgtgggctgtatcatggatgtcacgcctcagcacgaggatcgggcacgcctgctgcgcctgacgcagacggacagcctgacgggcgttttgaacaagcgcacgacagaacagcgctgccgtacgcttttggagaacacccccggtgaaaaaccatttgcactgcttttgctggatgtggacaactttaagcagacgaacgaccgttacggccatccaaagggagacgtggtgctgcgctgtctgggcgaaaatctgtccgggctgtttcgccgggatgatgtggtgggccgcgtcggcggggatgaatttttgatgatgatgccgggcgcgggcggcgaacaggcagtgggacgcgcgcagaagatcgcgcaggaaatgtgccgctccgtaagcgtgcaatgcggcgtggacgtctccggcagcatcggtgttgttttgtcgaagccgggagcctgcgcttatgaagaactgctgcgaagagcagattccgcgctgtatgccgcaaaggcggcgggcaagggatgctaccgcgtatacggcggcgcgtga

SEQ ID NO: 459 - DNA, 2634 bp, Subdoligranulum sp. 4_3_54A2FAA
atggcagagaaaaagacgaccgccaaaaccgccccggcccccgctgtggagaccgtggagaaccccgtgaacaaaatgatcgacggcctggtggaaaaagcccaggcagctttgaaggaattcctgacgctggatcaggaacagatcgaccacatcgtgcacgagatggcgctggccggccttgacaagcaccaggagctggcccgcatggccgtggaggaaaccggccgcggcgtgtacgaggacaaggtcatcaaaaatatgtttgccaccgagtatatctggcacgacatcaaaaaggaaaagaccgtgggcgtgctggacgagaacgagatggagggctatgtggaagtggccgagcctgtaggcgttatcgcaggcgtcacccccaccaccaaccccacctccaccacgctgttcaaaagcctgatcgccgtgaaaacgcgcaaccccatcatcttcggtttccacccgtccgcgcagaagtgctcggccgaggctgcgcgcatcgtatatgaggccgctgtgaaggccggcgcaccggagaactgcatccagtggatcgacacgccgtccatcgaagcgacgggggcgctgatgaaccaccccggcgtggccaccatcctggccacgggcggccccggcatggtaaaggccgcttacagctgcggcaagccggcgctgggcgtcggcccgggcaacgtgccgtgctatattgaaaaatccgcggacctgcaccgcgcctgcaccgacctgatgatgtccaagaccttcgacaacggcatgatctgcgcttccgagcaggccgtcatcgtggacaaagaaatcgccaaagcgttcgaagactatatgaaggccaacaactgctacttcctcaacaaggaagaaacggaaaagctgacgaaattcatgttcccggaccccagcaagggcgtttacggcccgctggtgggcaaatctgcaaactggatcgccgagcaggccggcctgaaggtgcccgaaaaaacgaagatcctcatcgcgcccatctcctcgccggacgaaaaccatccgctggcgaaggaaaagctttccccggtgctggcctactttgttgtaaacaacaagcagcagggctttgattacgccaacaagatgctggagctgggcggcctgggccactccgccgtcattcataccggcgacatgaagatcgccgatgaatacggcgtggccatgcgcgtgggccgaatcattgtgaacagcccgtcctcccagggcgccatcggcgacatctataataccaacacgccttccctgacgctgggctgcggctcctatggcaagaacagcgtgtcccagaacgtcacgacggtgaacctcatcaacaaaaagcgcatcgccaagaggagggtgaacatgcagtggttcaaggtgccgccccgcatctattttgaggaggattccatccagtacctggaaaagatggagggcatctcccgcgccttcatcgtcaccgacccgatgatggtgaagctgggcaatgtggacaaagtcctgtactacctgcgcaagcgcgaggaatactgccacagcgagatctactccgacgtggaaagcgacccgtccgttgagtgcatcatgcgcggcgtcaaggccatgaacgccttccagccggacgtcatcatcgccatcggcggcggctcggccatcgacgcggccaagggcatgtggctgttctacgagcatccggacaccagcttcgacggcctgcgccagcgcttcctggacatccgcaagcgtgcgttcaagttcccgaagctgggccagaaggccaaactggtcgccatccccaccacctccggcaccggctccgaggtcaccagcttctccgtcattacggataagcaaaacggcaacatcaaatatcccctggccgactaccgcctgacgccggacgtggccatcatcgacccgcagttcacccgctcgatgcccaagagcatcgtggccgacaccggcctggacgtgctgacccacgccattgaggcgtatgtatccgtcatggccagcgattataccgacggccttgcgctgcacgccatcgaaatggtgttcacttatctggagaaatcctacaacggcgacccgctggcccgcgaaaagatgcacaacgcgtcctgcatcgccggcatggccttcaccaacgcgttcctgggcctgaaccactccatggcgcacaagctgggggccgagtgccacattccccatggccgtgccaacgccatcctgctgccgtatgtcatcaaatacaacgctaccaaaccgaccaagttcgcctcattcccgaaatacaaggaatatgtggccgacgagcgctatgcgaagatcgcccgccgcgtgggcctgtgcagcgcggacacgcccatctccgaggcagtggactgccttgtgaaggccatccgggaactgatgaccgtcaccgagcgcccgctctgcatcaaggactgcggcgtcagcgaggccgagttcatgagcaaggtcgacgagctttcctacaaggcgttcgaggaccagtgcaccaccgcaaacccggtatatcccctggtgtccgagattaaggagctgtacagggaagcttactacggcgaataa

SEQ ID NO: 460 - DNA, 3219 bp, Subdoligranulum sp. 4_3_54A2FAA
atgccaaaggacccgtctatcaaaaaggtgctcgtcatcggcagcggccccatcatcatcggccaggccgccgagttcgactactccggcacgcaggcgtgccgcgcgctgaaaagcgagggcatcgaggtggtgctcgtcaactccaaccccgccaccattatgacggacccggacatcgcggaccgcgtgtatgtggagccgatgaccctgacggtgctgaagcgcatcattgaaaaggaaaagccggattccatcctgccgaacctgggcggccagacgggcctgaacctggccatggagctggcccgcagcggttatctggagcaggccggcgtgcgcctgctgggcgcgaagcccgacaccatcgaccgcgccgaggaccgccagctcttcaaggacaccatggagaagctgggcgagccggttatcccctccaaggtggtggagagcctgtccgacgcgcttgcgttcgcgggcgagatcggttacccggtcatcgtgcgcccggcgttcaccatgggcggcacgggcggcggcatctgtgagaccgtggaggagctgcacgagatcggcaccaacggtctgcgcctttcgcccatccatcaggtgctcattgaaaaatgcatctccggctggaaggagattgaatacgaggtcatgcgcgacggaaagggcaacgtcattaccgtctgcaatatggaaaactttgaccccgtgggcgttcacaccggcgattccatcgtcgtggcgcccagccagacgctctccgacaaggaataccagatgctgcgcacctcggcgctgaatatcatcaccgagcttggcattgagggcggctgcaactgtcagtttgccttaaagccagacagcttcgaatacgccgtcatcgaggtgaacccccgcgtgtcccgctcctcggcgctggccagcaaggctacgggctatcccatcgccaaggtggccgcgaagatcgctatcggctattcgctggacgagatcaccaacgacgtcacggggcagacctgcgcctgcttcgagcccgcgctggattactgtgtggtcaagttcccgaaatggccgttcgacaaattcgtatacgccaagaaatccctgggcacgcagatgatggccacgggcgaggtgatggccattgccaacagcttcgaacacgccttcatgaaagcggtgcagagcatcgagctggggctggaaacgcccacgctggaaacgctgtctgcgctgacggacgaagaagtggtggaaaaactgcatgtgtgcgattccgaccgctcttttgttgtgtacgaggccatcaagcgcggcgtgtcgtttgagacgatttacaatatcactaaaattgacccgtggtttttggcaaagctgcaagggttggccgaaacagagcttgcgctggccgggctgcgaggcggcatactgacggaagagctgtaccgcaccgcaaaaatgcagggcttcctggacaagaccgtgctgcgtctgacgggactggatgcgctgccctgtgaaaagctgcgcgcgtcctataagatggtggacacctgcgcggccgagttcagtgcgaaaacgccgtatttctattccacttttgacgaggagaacgaagcggcgcagtttatcgcggaacacccctccgacaggaaaaaggtgctggtgttcggcagcggccccatccgcatcgggcagggcatcgagttcgattattgcagcgtgcactgcacatgggtgctgaaaagccacggatgcgaggctgtcatcgtcaacaacaaccccgagaccgtctccacggacttcgataccggcgaccgtttgtatttcgacccgctcacggaagaaagcgtggagcatatcatcgccacggaaaagccatgggcctgtgtggtgcagttcggcggccagacggccatcaagctgacaaaacacctgacaaagctgggtgtgaagattctgggcaccagtgcggacgccatcgacgaggcggaggaccgggagcgtttcgacgcgctgctggaaaagtgcggcattccgcgcccgcagggccacacggtgttcacctgtgaggaggcgctggccgccggcgcacagctgggctacccggtgctgctgcgtccgtcctacgtgctgggcggacagaatatgatcatcgcctacaatgagaacgatgtgagggaatacatggccatcatcaccagccatgtggatatgtcgaacccggtgctggtggacaaatacctgatgggtaccgagtgcgaggtggacgccatctgcgacggcgaggacttcctcattccgggtatgatggaacacatcgagcgtgcgggcatccattcgggcgactccatctcggtgtatccgccgcagaacctcaagcagaagatcaagggcaccattgtggattatacgggccgtctggcccgcgcgctgaacgtggtgggcctgatgaatatccagttcgtggtatacaacaacgaggtgttcatcattgaggtgaacccccgttccagccgcacggtgccgtacatcagcaaggtgacgggcgtgcccatggtggagctggccgtgcgctgtatgctgggcgaaaagctgcgggacatgggctatggcacgggcctgtatcccacgggcgattactgcgccgtaaaggtaccggtgttcagtttcgaaaagctgcacgatgtggacacccagctggggccggaaatgaaatccaccggcgaggtgctgggcatcgacaaaacctttgaggacgcgctgctcaagggccttgtgggcgcgggctacagcctgcggcagcccacgccgggcaaatgcgttatcctgacggtaaaggacgcggacaagcgcgagctggtggacatcgcctggcagcttaaggatatgggctacaagctgtacggtacatccggcacggcgtactatctgggccagaacatggtggcctgcaacgaagtgcgcaagctcagcgaagcgcggcccaatatcatggatctgttcgagagcgggcttgtggactatgtgatctccacgtcctcaaagggccgcatcccctcccacgacagtgtaaagatgcgccgcaaggcggtggagctttccattccgtgcctgacggccatcgacacggcgcgggtgctggtgaaatgcctgcgcagcggcaaaacgctggcggatgtggacctggtggatatttcgaccatttga

SEQ ID NO: 461 - DNA, 2922 bp, Subdoligranulum sp. 4_3_54A2FAA
ttgaagatcgggcttgacatcgggtccaccaccatcaaatgcgtggtgctggacgacgcgctgaatattacatacaaaacctatgagcgtcatttttcccacatcgtggaaaaagcggcggagctggtgcagcgcatgcacactgaggtgctgcacggcgcgcccgcgcagctttccatctccggttcggccggcatgggcctggccgacgcctgcggcgtgcccttcgtacaggaggtgtttgccacacgggtggcggcaaagcgttacgcgccggatgcggacgtggtgatcgagctgggcggcgaagatgcgaagatcctgtttttgacgggcggtaccgaggtgcgcatgaacggaagctgcgcgggcggcaccggcgcgttcattgaccagatggcaacgctgctgaagatgacgcccgacgaaatgaacgaagccgcgcggcatgcggaaaaaacatataccattgccagccgctgcggcgtgtttgccaaaagcgatatccagcccctcatcaaccagggcgcaaaggccggggatgtggcggccagcattttctatgccgtggtgaaccagaccatcgcgggccttgctcagggccggaagatcggcggcaacgtgctgtatctgggcgggccgctcacatttttgccccagctgaaaaagagcttcgacaagacgctgggcgtgacggggacctgcccggaaaacagcctttattttgtggcgctgggcgcggcgctgtattccgacaaggaactggacctggcgggtgtggtggaaaagctgcacgcatacagcgccacggccacctatgcgttcaacccgccgctgttccgggacgaagcggaatacgaggcgttccgcgcacggcatgcaaaggcgagcgtgccgcgccgtccctttgcggacagcaccggccctgtgcatatcggcatcgacgcgggcagcaccacggtaaaagccgccgtcatcgacggagacgacaatttgcttttcaccagctatcagccaaacagcggcaatcccatccccatcatccggcagatgctcatcgacatttacaaggcgcgtccgggcctgcgggtggccagcgtcacagccacgggctacggcgaggacattgtgaaaagcgccttcggcgtggattttggcgtggtggagacagtggcccactttacggcggccaggcactttatgccggacgtggatttcgtcatcgacatcggcgggcaggatatgaagtgcttcaagatcgaggacggagccatcagcaacatctttttgaacgaggcatgcagctccggctgcggcagctttttgcagacgtttgcgggcgcgctgggctacggcgtgccggagtttgcgaagctggctctgtttgcggataagcccgtggacctgggcagccgctgcacggtgttcatgaattccagcgtcaagcaggcccagaaggacggcgcgtccatcgagaacatttcggccgggcttgccatcagcgtggtgaaaaacgcgctgtacaaggtcatccgtgcctccggcccggaggagttgggccgcaagatcgtggtgcagggcggtacgttctacaacgaggctgtactgcgcgcgttcgagatggaaatgggcgtagaggtcatccggccggatatcgcgggcctgatgggcgcgttcggcgcggcactgtacggcaaggcaaagggaaagagccaatcgtctctgcttacgctggaggggctggagggcttcacccagaaggtgcgcagcgtcaactgcggcctgtgcggaaacaactgccagcttacggtcaatatttttccgggcggcaaaaaatacatcagcggcaaccggtgcgaccgtccggtgtcccaccggggcgcggaaaacccactgaatctgtacgaatacaagcagcgccttctggccgaatacaagccccagccgggcatccgcggcactattggcatccccttggggctggggatgtacgaactgctgcctttctggtatgctttcttcacgaagctgggcttttcggtggtgaccagcggtccctccagccgggagctttacctggagggccagagtaccattccttccgacactgtatgctacccggcaaagctgctgcacggccatatccaccggctcagccggatggctgtgaacgccgttttttacccctgcctgacgtataatgtggacgagggcctgggtgacaaccactacaactgccctgtggtggcctattacccggaggtcattgcggccaactgccacgagctggagaatatccgttttatttacgattatatcggcattcaccgccgaagggatttccccaggaagatgacggccatccttgcaaaatacttcgcgggcatcagcctgggcgaggtgaagggcgctgcagacgcggcctatgccgaatatgcggagcatatgtcccgcgtgcgtgtccggggcggggagatcatcgcccaggcgcgggccgagggccggcagatcatcgttctggcgggccgtccgtaccatgcggatgaggagatcaaccacggcatcgacaagctgatctgcagctatggagcggcggtgatcacagaggacagcatttcacacctggtggaaaaattccccaccagcatcctcaaccagtggacctatcattcccgcctgtacgcggcggcgaaatacattgcggaccagccggatatgaacctcgtccagttggtgagcttcggctgcggcgtggacgccatcaccaccgacgaaacgagagaaattttgcagcgggaaggcaagctgtacacacagatcaaaatcgatgagatcgcgaatctgggcgcggtgaatatccggctgcgcagtctgttcgcagccatagagccggcctccggcgaaacgccggacgcggagtaa

SEQ ID NO: 462 - DNA, 2568 bp, Subdoligranulum sp. 4_3_54A2FAA
atgattgataacacgataaccgaagggacgaggctcatcgtccgggacatcaaggaggaaatggagtccgccttcatcgactattcgatgtccgtcatcacggcccgcgcgctgcctgacgtgcgcgacggcctgaagcccgtgcaccggcgtattctgtacacgatgcacgagcgcggcaacgacccgtctcatcccaccaaaaagtccgccgatacggtcggcgcggtgctgggctcgtaccatccccacggcgacgcatccgtatatgacgcgatggtgcgtctggcgcaggatttctccatgcggtacccgcttgtggagggacagggaaacttcggttctgtggacggcgacccccctgccgcctaccgttacactgaggcccgcatgagcaagatgagcgtggacctcatgcgcgatatcgaaaaggataccgtggatttcgtgccgaactttgacgagtccaagcaggaacccagcgtgctgccctgccgcgtgccgaacctgctcatcaacggctccagcggcattgccgtgggtatggccaccaatattccgccccacaacatgcgggaggtcatcgacggcatcgtcgcgctgatccatgacccggacatcgacctggccggcctgatggagcacatcaaggggccggacttccccaccggcggcgtcattatgggccgcagcggcatccgtgccgcatatgccacgggccgcggcaaaatcacgctgcgcggccgtgctgccatcgaagaaaaatccaacgggcgttttcagatcatcatcaccgagatcccctatatggtgaacaaagcgcgcatgatcgaaaacatcgcggaccttgtgaaagaaaagcggatcgacggcatttccgacctgaacgacgaatccaaccgcgaaggcatgcgcgtggtggtggaactcaagcgcgaggcgaacccccaggtggtgctcaaccaattgtaccgctttactcaattgcaggacaccgttggcgttatcatgctggcgctggacaagggcgtgcccaaggtaatgacgctcaaagagatgcttcagaaatatctggcgtttcaggatgaggtcatccgcaggcgcacccagttcgacctgaagaaggccgaggagcgcgctcatattctggagggcctgcgccgcgccgtggacatcgtggatgagatcatcgccgcgattcgcgcgtgcaagggcggcaagcccgaggcaaaagccgccatcatggaaaaattcggttttgacgacccgcaggcaacagccatcgtcaatttccagctgggccagttggcgggccttgagattttgaaaatagagaacgaattgggtgacctgcatacgaagatcgacgactggcgcggcattctggccgacgatgcaaaggtgctgcaggtggtggaggatgagctgaacgccatgcgtgaaaagtacggcgatgaccgccgtaccgagattgcccatgtctccggcgaagtggatattgaggatctcatccccgaggaggaaagcgtgttcacgttgacgcacgcaggctacatcaagcggcagccgtcggatacgtatcaggcgcagcgccgcggcggccgcggcatcacagccttgtcccgcaaggatgaagattttgtggaagagctgttccttgcctctacgcatgactatatcctgtttgtaacggatatgggccgcgtgtaccggctgaaaggataccaggtgtacgagggcagccgtaccagccgcggcgtgaacattgtgaacctgctgcctctgcaggacggcgaacaggtgacaagcatgctgcgcgtgcccggcggcgacaacgccgaaggctatttgacgatggtcacaaaagcgggcgtcatcaagcgcacggctctggcaaattacagcaacatccgcaaaaacggacttatcgccatcaacctgaacgagggagactcccttgcgtggactcgtatcaccagcggcgaagacgagctgatcgttgcgacgcggaacggcatggccatccgcatcagtgagaacgatgcccgtccgctgggccgcacggccacaggcgtccgcgccatccgcctgaaagagggcgacagcgttgtgggcgtgggtgttgtacgcgagggcgcaacggtactcaccgttacggaagaaggcaaagggcggcgcacggacgtgcgggattaccgaacccagtaccgcggcggcctgggaatccggaactacggcagcaaaggccacgtcgcggggcttaaggtcatcgacgacaccgacgatatcattctcatcagcctggagggcatcatcatccgcatgcatgtggaggatatcaacgtgcagagccgctatggttcgggtgtgcgcgtgatgcgcctgggcgagggcgaccgcgtggtgacggttgcccgcaccgagcattccgacgaggaggagaccgcaaagcccgaggacgacggcgccgaggaggagctttccgccgaagagctggcggctctggaggctgaggaagcgcagaatgccgccggcgaagaggacgcggcgccggaggacggcgagtaa

SEQ ID NO: 463 - DNA, 3654 bp, Subdoligranulum sp. 4_3_54A2FAA
atggacggcaacaccgctgcggctcatgtagcctatgcgtttaccgaagttgccggcatctaccccatcaccccgtcgagccccatggccgaccaggtggaccagtggtccgccctgcaccagaagaacatcttcggcaccgaagtgaaagttgttgagatgcagtccgaggcgggcgcggccggcaccgtgcacggctccctggctgccggcgcgctgaccaccacgttcaccgcgtcccagggcctgctgctgatgatccccaacatgtataagatcgccggtgagctgctgcccgccgtgttccatgtttccgcccgtaccgtggccagccatgcgctgaacatcttcggcgatcattccgacgtatatgcctgccgccagacgggctttgccatgctggccgagtccaacccgcaggaggtcatggacctggctgctgtggcgcacctggccacgctggagagccgtgtgccgttcatcaacttcttcgacggcttccgtaccagccacgagatccagaagatcgaggtctgggattacgacgacctgaaggaaatgacggacatggaagcggtgaaggcgttccgcgcccatgcgctgaaccccgagaaccccgctatgcgcggctcccacgagaacggcgatatcttcttccagcaccgtgaggcctgcaataagttctacgaggccgtgcccggcattgtggaaaaatacatgggcaaggtgaacgcgaagctgggtaccaactaccagctgttcgagtactacggtgctcccgacgcagaccgcgtcatcatcgccatgggttccatctgcgacgtggccgaggaagtcattgattacctcaccgccaagggcgagaaggtcggtctggtgaaggtccgcctgtaccgtccgttcgcggccgacaagctgctggccgccattccggacaccgcgaagaaaattgccgtgctggaccgcaccaaggagccgggcgctctggccgagccgctccatctggacgttatggccgcgttccgcgaagcgggccgcgagggcaccatcatcggcggccgctatggcctgggcagcaaggataccccgccgtccagcgtgtttgccgtatatgaagaactggcgaaggacgctccgaaggagcgcttcacactgggcatcaacgatgacgtcacctacctctctctggaggagaagcccgcgcccaacacggctgccgaaggcaccgtcgagtgcaagttctggggcctgggcggcgacggcacggtcggcgccaacaagaactccaccaagatcatcggcgaccataccgacaaatatatccaggcctacttccagtatgactcgaagaagaccggcggcgtgacgatcagccacctgcgcttcggcgacaagcccatccgcgcgccgtactatatcaacaaggccgatttcgtggcatgccacaacccgtcctacgtcatcaagggctacaagatggtcaacgacgtaaagccgggcggcgtgttcatgatcaactgccaatggacgccggaagagctggatcaccacatgcccgccgaggcgaagcgctatatcgccaagaacaacatccagctgtataccatcaacgccatcgacaaggccatcgaaattggcctgggcaagcgcaccaacaccatcctgcagtccgccttctttgctttggcaggcgtgctgccgaaggaagacgcgctgaagttcatgaaggaagcggcctacaagtcctttgccaagaagggcgacgccatcgtcgagatgaactacaaggccattgacgcgggctttgacgctttcgtcaagatcgacgtgccggcttcctgggccgacgcgaaggacgccgagggcgaccacgagctggccggcaaccccgccaccgtcaagatggtcaaggagatcctgttcccggtcgacaagatggacggcgacagcctgccggtttccgctttcgtggaccatgtggacggccagttcgagcagggtgcttccgcatatgagaagcgcggcgttgccgtgagcgtgcccgagtgggatgttacaaagtgcattcagtgcaaccagtgtgcctatgtctgcccgcatgccaccatccgtccgtttgctttctccgccgaggaagttgccgccgcccccgccgcgctgaaggtgaagccgatgaccggcaagggctgcgagaactaccagttcggcatgacggtctctccgctggactgcatgggctgcggcgtctgcgtcgacgtctgcccggcccccggcaaggcgctgaagatgatgcctcaggagagccagctggcccagcaggaagtgttcgactatgctgtagccaacgtgggcaagaaagagggcatgatggccgagacgaccgtcaagggttctcagttcaaccagccgctgcttgagttctccggcagctgcgcgggctgcgccgagaccagctacgcccgcctgattacccagttgtacggcgagcgtatgtatatttccaacgccaccggctgttcgtccatctggggcggcccggccgcaacgtccccgtacacccgcaaccgtctgtccggcaagggcccggcctgggcaaacagcctgttcgaggacaacgcagagcacggcttcggcatgtatctgggccagaagaccatccgcgagagcctggccgacaagacccgtgcgctgatcgctgttgagtacgcgctgcccgacctgaaggccgctgcgcaggaatggctggacactatggaggacggcaagctgaactctgccgccgccgataagtatattgccgcgctggagaacggcgtgctgaccgtagaggaaggcatcgcgttcctggagagcgccgagggcaaggcgaagttcggcgacaacgccgcgcccatgctggagcatatgaagagcctgaaggctgccggcaaggccacctgcgactgcgaggcctgcacgcttgcggctgaaattctggagcagaagcagtacctggccaagaagtccgtctggatcttcggcggcgacggctgggcctatgatatcggtttcggcggtctggaccacgtgctcgcttccggcgaagacgtgaatgtcatggtctttgacaccgaggtttactccaacaccggcggccaggcatccaaggccagccagatcggtcaggtggctcagttcgccgcggcgggcaaggccatcggcaagaagaatctggccgagatcgccatgagctacggctacgtgtatgtggcgcagatcgccatgggcgcggacaagaaccagaccatcaaggccatcacggaggccgagagctatcacggcccgtccctcatcattggctatgctccctgcgagatgcacggcgtcaagggcggtatgaccaactgccagaacgagatgaagcgcgctgtggacgcgggctattggaatatgttccgcttcgacccgcgcaaaaaggccgagggcaagaacccgttcaccatcgacagcaaagcgccgacggcggactacaaggaattcattgagagcgagacgcgttacagccgcctgcagcgcgccttccccgagcgtgcgcaggtgctgttcgacaaggcagccgacgccgcgaaggaccgctacgagtacctgggcaagcttgccaagctgtacgaataa

SEQ ID NO: 464 - DNA, 4074 bp, Subdoligranulum sp. 4_3_54A2FAA
atgcttccgcaattcagtgtaagaaaaccctataccgtgctggtggcggtagtgctggtgcttgtgctgggcgttatctcgtttacgggcatgacgacagaccttttgccggccatggagctgccgtatgtcgtggtaatgacaacgtatcccggcgcaagcccggagaaaatcgaaacaacggtgacaaagccgttggaagcggtgctggggacgacgggcggcattaagaacgtcagctcggtttccagcgaaaacgccagcctcgttatcctggaatttgaacagggaacgaacatggattccgctatgatcgagctttcgtccaatgtggacctcgtttcgggccagatggacgatgcagtggggacccccatgttgatgaagatcagccctgatatgctgcccgtgatggtggccagcgtggatatggacggcatggacgtgaaggagatatccgcctttgcggacgaaaccgttatgccggcctttgagcgcatcgatggcgttgcgagcgtagatgccacaggccttgtggagcagcaggtgaccgtaacgctcgaccaggtgaagatcgacgcgctgaacgataaggtccttgccggcgtggattccggtctggcggacgcacagcgcgagctgcgtgagggacaggccaaggtggcggacggcaaggcgaagctggccgagggcgaagccgcgctggaaagccaaaaaggctctgcgctggacaagctggcccagggcagcgcccaggtggacggcgcctccgccacgctttccgcgctgctgagcgaggagaccacgcttacagccaaccagaaggcgttcgaggccgaaagagacggctatacccatgcaaagcaggggtatgaaggcatcaatacggctctggcgggggcgcgggacaccgctcgtcaggctgctgcggctgctgcgaagcagggagtgctggacagcgtgaacgccctgctggcacagatgggccggcccgctgtgggcacttatgaggaagccgccgccgtttacgcgcaactccagcagactcagccgggcctgcctgccctgccggaccctgcggtggtgggagaacaggccgccgccgccgttcccgccaacgtggacgcgcttctggctctggacgacgcgtcttttgaagccttcaaggcgcaggcgggcgcactgcccggcggcgaacagcttgccgcgctgacaaaggaaagcctgacgcagctgcgcgatgcggcgttgagggcggacacgcgtctgcccgaggtggaggcggagctttccaacattaccacgcgcctcgctgtaatttccggcatgaagcctgcgctggaggaaaacctgaaaaaggcacaggatgcctatgccgagctggaaaagggcaagatgacggcggtaaacgagctcaccaggggtgaagtgacgctgagtaccacaaaaacacagctggaagatgcggaacagaagcttgcggacgcgcaggagcagttcgatcaggcgcgggatgcggcctataaaaaggccgatctgtccggcgtgctgacggcggacatgctgggcaacatcctgatggcccagaacttcaacatgcccgcgggctatatcaccgagggtgaggagcagtatcttgtcaaggtgggcgaggagtacgcctctctggaggagctggaaaacacgctactgatgcacatggatgtggacggcgtgggcgatgtgcgcctgtccgatgtggcggatatcgctctgacggacaacgcgggcgaaagctatgccaaggtgaacggcaacgacggcgtggtgctgtcgttccagaagcagagcacggcgtccacggccacggtgagccagcgcatcaacagcgccatcgcacagctgcaggagcagaacccgggcctgcacatcacgccgctgatggatcagggcgactacatcgacatggtggtgggcagcgtcctttccaatctgctgtggggcggcctgctggccatcatcgtgctgatctttttcctcaaggacgcaaagcccacatttattgtggcgtgcagcatcccgttcagcctgatgtgtgccatcacgctgatgtatttcacggatgtgacgctgaacatcatctcgctgtcgggccttgcgctgggcgtgggcatgctggtggacaacagcattgttgtcatcgaaaatatttatcgtctgcgttctctgggcgtgcctgcctccaaggcggccatccagggggcgaagcaggtgtccggcgctatttttgcctccacgctcaccaccatatgtgtgttcctgcccattgtgttcacgcagggcatttcccgcgagctgttcacggatatgggcctgaccattgcctattcgctgctggccagcctggtggtagccctgacgctggtgcccgccatgggtgccgccgtgctgaaaaacaccaaagagaaaagccacaggtggttcgacgcctttgtggagggataccagaggctgctgggttgggcgctgcggcacaaagcgccggtgctgtcgggcgtgacggcgctgctggccatcagcattttcctgacaacgcagatgggcacagccttcatcccggcgatggacagcccgcagatgtcggccacactgacgatgcccaggggcgcggcgcagcaggatgcctatgccatggcggataccgtcatggagcgcatcgcggccgtggatggtgtggagaccgtaggcgcgatgtccggcggcagcggtatgtcctcgatgatgggcggctcgtcctccggcggcagcatcacttattatatcctgctgtctgacgaccgcaccgccaccaatgccgacgtttccgctgccattgaagcgcaggtggcggacctggactgcaccgtggaggtgcaggaatccacgatggatatgtccgctctgggcggcagcggtgtggagcttgtcatcaccgggcgcggcctggacgaaatgaacgccatcgcggatgacctgcgcggtattctgcgcagtacggaaggccttgtggatatctcggaaaattcggtcacgggaaacccggagacacgcatcacagtggacaaatacaaggcgatgcagcacgggctgaccgtggcgcagatatacagtgagcttgccgccgagctgaaggccgagaacacggccaccacgctgacgctggacggcacggatacgcccgtggtcgtggtgaagccggcaggacaggcgcccacgcggggcaacatcatggatcacgcgttcacggtgacgaacgcggagggcgaggaggagaccgtccgtctgtacgacatcgcggcaaagcaggagaccgacagcgtttcctccattaaccgggaaaacggcgcgcgcaccatgagcgtgagcgcgggcgtggacgcccggcacaacatcggcctcgtgagccgcgagctggaaaaaaagcttgcggattacgagctgcccgaaggctataccgttgagatcgcgggcgaaaatgaaaccatcaacagcgccatgacggaccttgtcaaaatgatcgcgctggccgttgtgttcatttatctcatcatggtggctcaattccaaagcctgatgagcccgtttatcgtgatgttcacgatcccgctggcatttacgggcggcctgcttgcgctgtggctcacaggcagcgagctttccatcattgctatgctgggcttccttgttctggcgggcgtggtggtaaacaacggaatcgtgttcgtagacaacatcaaccagctgcggctggcgggcatggaccgcacggaggccattctggaaacgggccgcacgcgcatccgcccggtgctgatgaccgcgctcaccaccattttggccatgtccacgatggcgcttggcattggcgacggcgcggagatgacacagcccatggccatcgttaccatcggcggcctcacgtacgccacgctgctgacgctgctggtcgtgcccgtactgtatgatatcttccgcaaaaagccgctgtatgacccggaactggacgatgcggcggcagacgcggcgaaggaactgccgcagcccgcggcaggctga

SEQ ID NO: 465 - DNA, 3042 bp, Subdoligranulum sp. 4_3_54A2FAA
atggctggaaaggcgggacagcggatgaatggggaaaaaaggcgcaggcatgggcggtcgatccgccgccgcctgctcgtgcccatatgcttgctgctgacggtccaggtggccgtgctcatcggtggagtttatttttcaggcctgctggaacgcatggacgaaaatgcatacgcggtgctggaccagcgcgtacagagccgggcgggctatttggaagacgatatggtgcgccgctggtccaacctcagcctgacgcaggaggtattgggcgaactgtacgagggccttgtgcaggacggctccgtcacgcctggagagctggcgtcggaccccgcccagtacaacgcgtttctggaacaggcagcgccggaactcgtctctctgatgcgtacaaacagcgtgacgggggcttttgtcgtactgaacacgcagacgttcccgcaggaactgagcgagagcctgcaattgccagggctttacctgcgcgacagagacccctccgcccacaccagcgccggcaacggcgatctgctgctggagcgcgcgccgctggaactggtgcgcggcctcggcatcgccatggacagcaactggaagccgatgttcgtgctggagggggacaccgcgcgggccgatgcctgcttgataagaccctacaacgcggcggtggaggacccgtcccttggctgggaaaatgcgggctattgggctgcgccgcacacgctgagcggcgataacatccgtctgatctcttattcggttccgctcatcgcgcccgacggaacggtgtacggtgttttgggtgtggatatcctcgaggactacctgctgcggttgctgccttacgacgagctttcagaggatcacggcagcgcttacatcttgggcgtgtgcggcgcggccgacccggaagcatccgtccggccgcaggtggtgagcggtcctgtctatctggcggcttccgggttcagcaccgtatatctggaaaaggagagcgcaggcctttacacgctggagcggggcggcggcgaggagatgtacgtctgctccgccgtgctgaacctgtacaatacgaacacgccttttgcagatgatcagtgggttctgctgggggcggtgccgggccgcacgctgttcgcgctcaagcacgatacgctgctgattatgctggcgctgctggcatccatcgttctcaccagtctggtgacgatcctgatcaccgtacgttcggtttcgcagcccatcgtcaagctggcggccgaagtgcgcgcgacggacccggcggctcccgcccgcctgcaaaaaacggatatcacagagctggacgcactggccggctccatcgagacgctcagcgacgaagtgctgcgcgcgggcggcaagttcacccagatcctggagatggccagcgtgcgcatgggcggttttgaggtggacggccgggacggcacgctgttcctcaccgaccagtttttcgacgtattcggccgtccggagctggcgagcaccgtgcgcggcccacagtccttcgagagagcgatggatgccctgcacgtctatgtgacggaacgggaaaaaaccgacgacgagcatacggaatacattttccgcatgccggagccggacggcgtgcgctgggtgcgtatgcgcctgctgcgcagcagttcccgctggacgggcctggccgaggacatcaccagtgacaggatgtcgttggaacgcatggaatacgagcgtgaccacgacgtgctcaccgagctttataaccgccgcgcattcaaacgtatggcgctggcgttgctggcccgagggccgcaggcggcgtgcgtgggtgcgctggtgatgctggatctggacaacctgaagtatatcaacgatacctacggccacgatatgggcgacgcctatatccgctgtatggccgcgagccttcccagccccgacggggaacgctgccttgtggcacgcatgtccggcgatgagttcttcgtgctgttccacggttatgacacacaggaagaagtgcgcgggcagatcgccctgctgcgccagcgtatgacgcgggcttcgcttacgctgcccgacggcgtgcgccagccggtgcgggcttccggcggcgtggcttggtatccggcggacagcgaccggttcgacgagctggtgcgctatgcggatttcgccatgtaccaggtgaagaacagcggcaagggcgaatttgcggaattcgacggcgaggcataccggcgtgacgcctatctggtgcagagccgcggcgtgctgcaccgtttgctggagcagcggctggtggattaccacttccagcccatcgtagaggtgagcacgggccgcatttttgcttacgaagcgctgatgcgcccccgcacgccggagctgtcctcgccgctggccgtgctggaactggcgcggcaggagggcaagctgcgcgcggtggagactcttacctggcatacggccatgggcgcattcgcggcgcactgccgtgcagggcacgtcccggagggctgccgcgtattcatcaactccctttccaaccaggccatgctgcccgaggatacggcgcggtttcatcgcgaataccgggactacctgtcccgcgtcgtgctggaactgacggaggtcacgcgcatagacgccgatcttcaggcggtaaaaatgcaggcattgaggcgcagcggcggaaagctggcgctggacgattacggcagcggctataacggcgaggccatgctgctggctgtgcagccggattatgtgaaaatcgatgttgccatcgtgcgcggcgtggaccaagacgacgacaagcgccagctggtagaaaatctggtgtcctacgcccatgtgcgaggcatagcgctggtaggagagggtgtggaaacgcgtgccgagctggaggctctggctgcgttgggcgtggattatgtgcagggctattttctggcccgcccggctctgctgccgcctcccgtcacgccggagggggctgaatgtctgcgtgcgctgcgcggggaaatggattga

SEQ ID NO: 466 - DNA, 2622 bp, Subdoligranulum sp. 4_3_54A2FAA
atgaaagaactggagaaaatttacgacccttcgtccgtggaggacaagcattacaaaaaatgggtggatgcaggctatttccacgcggagcgcgacccggacaaaaggccctataccattgtgatgccgccgcccaatatcacggggcagctgcacatgggccacgccatggacgagacctggcaggatatcctcatccgctacaagcgcatgcagggctatgccgctctgtgggtgccgggcacggaccatgcgtccattgccacagaggcgaagatcgtggcgaagatgaaggaagagggcctcacgaagcaggacctcggccgcgacaggtttttggagcgcgcttgggactggaaaaagcagtacggcgggcgcatcgtggagcagctgaaaaagctgggctgttcctgcgactggcagcgtgagcgtttcaccatggacgagggctgcagcaaggctgttttgaaggttttcaaaaagctgtacgacgacggcctcatctaccggggggagcgcatcatcaactggtgcccccactgcaaaacgtccatctccgacgcggaggtggagtacgaggagcaggacggctttttctggcatctgaaatatccggtggcgggcggcgatgaattcgtggagcttgccactacccgccccgagaccatgctgggagatacggccatcgccgtgcacccggacgacgaacgctacacccatctgcacggcaaaaaggttattttgccgctggtggggaaggagatccccgttgtctgcgacacgtatgtggaccgggaattcggcacgggcgtggtgaagatcactcccgcgcacgaccccaacgacttcgaggtgggcgtgcgccacggcctgcccgtcgtcaaggtgctgacggacgacgcgcacatgacgcaggactgcggaaaatatgcgggcatggaccgttacgaggcgcgcaaggccattgtggcagacctggaagccggcggatatctggcttccatcgagccgcacaagcacaatgtgggcacctgttaccgctgcggcaccaccgtggagcccatggtgagcaagcagtggttcgtgaagatggtgcctctggcgggcccggccatcgaggccgtgcgcgacgggcgtatccggttcgtgcccgagcgtttcgacaagccctattacaactggatggagaacacgcgcgactggtgcatcagccgccagctctggtggggccaccgcatcccggcctattactgcgatgactgcggcgagatcagcgtttcggccacgccgctcaccgtgtgccccaagtgcggcaagcccgtgcgccaggacgaggacacgctggacacctggttttccagcgccctgtggccgttctccacgctgggatggccggaagagaccgaggaccttaaatatttttacccaaccaatacgctggtcacgggatatgacatcatcacgttctgggtcagccgcatgatcttctccgggctgacgtatacggacaaagcccctttcgataccgtgctcatccacggcctggtgcgcgacgcgcagggccgcaagatgtccaaatctttgggcaacggcatcgacccgctggaaatcatcgaccagtacggcgcggacgcgctgcgcctgacgctggtggtgggctccacgccgggcaacgacatgcgcttctcggacgaaaaggtaaaggccagccgcaactttgccaacaagctgtggaacgccgcgcgctttgtgatgatgaacctgccggaggacttccggcccggcctgcccgcctcgctgacgatggcggacaaatgggtgctttcgcagctgaacacgctggtgaagaacgtcacggaaaacctcgacaagttcgaactgggccttgcggcgcagaaagtgcaggacttcatctgggacgtgtactgcgactggtatatcgagattgcaaagctgcgcctgaacagcgaggacgcggccgaggcggacagcgcgcgccagattttggtgagtgtgctggtgcaggcgcttaagttgcttcacccgttcatgccgttcatcacagaggaaatttacacggcgctgcccggcgcgtctgagacactgatgctggaaaaatggcccgggtatgaaccgcagatgaactatgcggaagaagaagcgggctttgaaaaggtgatggacctcatcaaggccgtgcgcacgctgcgcgcggacatgggcgtgcatccggcaaaacggacgtcgctcatcatcgagacggcggacaaaacgccttttgaggacggggctgcgtatcttgccaaattcgcttttgcaaacgaggtatcctttacggaaaaatacaccggcgacaccaagggtgtggcgcaggtggtgacgcacgcggcccgcgcgtttatcccgatgatggagctgatcgaccgggaaaaggagcaggcacggctggccaaggaaaaggcccagtgcgagaaggaaatcgcgtctatggccgcgaagctgtcaaacgagggctttgtgaacaaggcgcccgcgcacatcgtcgaggacatgcgtcaaaagcacgccgcggcggcggagaagctggcgaagatcgaggaatccatccgaaacctgggctga

SEQ ID NO: 467 - DNA, 2790 bp, Subdoligranulum sp. 4_3_54A2FAA
atggaacaaggtactcttttcgtaaagcttgaaagcgcccgcgaagctctgcccgtgcagggccgtgtggtcatttcgcagacagtgaacggcgtccgcgtgctggagatcgagctggtaacggacgaggacggtctgacacagcccgtcacgctggacgcaccggaccgatccatctcgctggacccggccagcacccagcaagcctgggccgcctatgacgtggaggcatatgccgacggctactccgacattcttctggagggcgtacaggtatattccggcgtggaggcgtacgcgcccatcagcatgcttcctattttttcctcccaggcggtttcgcccacagccgtcacggcggacaccggttccacctcccgcaaggcccagcaggacatcctgcacaccaccatccccgcgcccgccatccgcggcggctccgccagcggccccacgccgctctccacctgtgccacgcagcctctggtgctgcaaagcgtattcatcccccagtacatcaccgtgcatctgggcaagccgcagaacagcgccgccaatgagacggtcagtttcccctattacatcaaaaacgtctgcagcagcgagatctaccccacctggcccgaaaatgccatccgtgccaacatctacgcccagatctctctggcgctgaaccgcgtttacaccgaatggtatcccagtaaaggctacaacttcaacattaccaactccacccagtacgaccagtattacgtttccggccgtaacatctttacaaacatcagccgcattgtagatgacatcttcaacacttacctgcgccgcgtgggtgattttgccccctattatgccgaatactgcaacggcaccaccgtcacctgcaaggggatgagccagtggggcaccgtaagcctggcggaaagcggcctttcccccatccagatcctgcgccggtactacggcaacaattttgaactggtgaccaccaacgacatccgcgccattcccagctcgtatcccggcacgccgctgcgtctgggcagtacgggcaacaacgtgagcatcatccagcggcagctcaaccgcatcgccaaaaactatccggccatcggccagcagtcggtggacggcgtattcggcgcaacgacacagtcggccgtgcgcacgttccagaagatattcaatctgacgcaggacggcgtcgtcggaaagtccacctggtataaaatcagctatatctatgtagcggtgaaaaagctggcggagctgggcagcgaatccgaaccgtatcccggcggaagcggcgacgcgcccggcagcggcacaggttctatccagcagggcgccgtgggcgcacaggtggcggccgtgcagtattacctgagctaccttgcgcaaacgttctatcccacaatccccaatatcgtacccgacggtattttcggcgcacagacgcgcagcgccgtcatcgcgttccagaacaccttcggcctgacggcggacggcattgttggtccggccacctgggccgcgctggaaaagcagtttgaaaccgcctatgacgacaacaaccccggcagctatttcggcgcgtatcccggcgtcgtgctgcgggagggcaaccgcggcctgcgcgttcagcagatgcagttttacctgctgtacctgcactactcctattcctccatccccaagatcaacgcggacggcatcttcgggcccgccaccaccgcggccgtacgcgcgttccaggcaaaattcgggcttacacaggacggcgtggtaggccttgccagctggacagagctgtactccatttacagccagaaaaacgcactggtgctctcggatgaacaagtgcctgcttatccgggcttcgtgctgcgcaggggcagccagggccaggccgtgctgggcgtgcagacttacctgaacgtcatttcgcggaaatacgcctccgtcacgccgctgacgcgggacggcaattttgacagccggacggaggtatccgtgcgggcgttccagcggcagttcaaactcaccattaccggctgggtggatgagccgacctggaaccgtatttacagcgagtacaaaaacacacttctttccgagcacctggaatgccgctttatcgacgtgccctatccgggcgagcctgtcgaggtgggccagaccaatatctttgtgcgcacggcgctgtattactacaatctgatcgccgcattcgatcttctgctggagcccacggacatcaccgacactttcactttagaggactccctcgccatcgaggaattccaacgcacgcgcggattgactgttacgggcgtcatcgacgaggatacctggacgctgctttattaccaatacgtggccgcttatcaggacgttttccccaactgcgcggctcagggctccgtcccgcagcctttccaaacgctggtgcccggcagccgcggcgtcgccgtggagcagctgcagatctggatcaacgctctgagtgcctattactgcgacctggtgccccaggacgtgacgggcatctatgacgagacaacggaatcgaacgttttcatcctgcagacgctgctggaccttccgctcaccggcgaagtggaccagaccacctggaacctcatccaggaggcttatgaagaagcgctggccgaaaacaacaatggggaggaagcatacggcgacctgctggatgtcacctacatcaaccgcaccatttccatgacggaaacagtcctatgcgcgggcaactgcggcacgccgctggactga

SEQ ID NO: 468 - DNA, 3168 bp, Subdoligranulum sp. 4_3_54A2FAA
gtgtggtttcataaaaaagcaaacttgctgcaggaggattttgacgtgttgtatgacaaggtatccgcaaatctgaattttatcgagcgggaaaaggctgtggagaagttctgggaggacaaccagatcttcgaaaagagcatcgactcgcgcagaaacggccggacatatacattttatgacggcccgccgacagccaacggaaaaccccatatcggccatgtggaaacacgcgcctttaaggatatgatcccgcgttatcacgcgatgaaaggctgcatggtgccccgtaaggcaggatgggacacgcacggcctgcctgtggagctggaggtggaaaagcttctggggctggacggcaaggaacaaatcgaggaatacggcctggagccgttcatccagaggtgtaaggagagcgtttggaaatacaagggcatgtgggaggatttttctcacacggttggtttttgggcggatatggagcacccttatgtcacttatgataacgcctacattgaatccgagtggtgggcgctgaaaaacatttgggaaaagggcctgctttacaagggctttaaaatcgtgccctattgcccgcgatgcgggacgccgctgtccagccatgaagtggcacaagggtacaaggacgtgaaggagcgctccgccatcgccaaattcaaggtgaaggatgaagacgcttacatccttgcgtggacgaccacgccctggacgctgccttccaatgttgcactgtgcgtacacccggatgagcgttatgtcaaggtgcgcatgaacggggacggcatcgtctattatctggcggaggctctggcggataccgtactgggcgagggcgcttatacggtgctggaggcctatacaggacgcgatctggaatataaagaatacgagccgctgttcgcattcgtacagccgaaggaaaagtgctggtatgtggtatgtgacggttacgtcacgctgacggacggcacgggcatcgtgcatatcgcgccggctttcggtgaggacgatgcgaatgtgggacgtaaatacggcctgccgctggtgcagcttgtggacgcaaagggcgagatgaccaaagaaaccccttgggcgggtatgttctgcaaaaaagcggacaaggaagtgctcagggatctggaaacgcgcggcctgctgttcagcgcgccggtatttgagcatagctatccgcactgctggcgctgcggcacaccgctcatctactatgcccgcgattcctggttcatcaaaatgacggaggtaaagcaggatctcatccgcaacaacaataccgtcaactgggtgccggagagcatcggcaagggtcgctttggagactggctggaaaacgtgcaggattggggtatcagccgcaaccgttattggggcacgccgctgaatatttgggaatgcgagtgcggtcaccgccattctgtcggcagcatcgaagaactgagatccatgtccgataattgcccggacaagatcgagctgcaccggccgtatatcgatgcggtcaccattaagtgcccgcactgcggcaagcagatgaaacgtgttcccgaggtcatcgactgctggttcgattcgggcgccatgccttttgcacagcaccattatccctttgaaaacaaggagttgttcgagcagcagtttccggcggattttatttctgaatccgtggatcagacccgaggctggttctattcgctgctggctatctccacgctgattttcaacaaggcgccctataagaatgtcgttgtcacggggctggtacaggacgaaaacggccagaagatgtctaagtccaagggcaacgcggtcgatccgttcgaggcgctggcgaagtacggcgcggacgccattcgctggtatttttatacgaacggggcgccttggctgcccaaacgcttttcagacaaaggcgtgcaggaaggccagcgcaagctgatgggtacgctgtggaacacctatgcattctatgtgctgtatgccaacatcgatgcattcgacgctacgaaatatgcgctggaatacgacaaattgtctgtgatggacaaatggatcttgtccaaaatgaactctatggtaaaatccgtggatgaaaatctggcagcttacgccattcccgaggcggcgcgcagtttgcaggagtttgtggatgatctgagcaactggtacgtgcgccgcagccgcgaacggttctggggcaaagacatgccgcaggataagatcaacgcctatatgacgctgtacaccgctcttgtgaccacaagcaaggctgccgcgcccatgatccctttcatggcggagagcatctaccaaaatctggtgcgcagcctggataagggcgcgccggagagcgttcacttgtgcggtttccccgaagcggacgagcgccgcatcgacgcgcagctggagcgggatatggaccttgtgctcaaaatcgtggtgctgggccgggcggcgcgcaacggttcaaaccgtaagaaccgccagcctctggcgcagatgtttgtgaaagcggaggaggagctgggggatttctacaaagagatcatcgaggatgagctgaacgtcaaggccgtgaccttcacgcaggacgtttccgcgtttacctcgtacagcttcaagccccagctcaagacgctgggccccaaatacggcaagcgcctgggcgagatccgcaccgcgctgatggagcttgacggcagtgcagcaaaaaaagaactggatgcaaacggtgtgctccgtctggaactgcaggggggagccgttgaactggcgccggaggacctgctcatcgagatgacgcagtctgaccggtacttcaccgttgaggacggcggcgtgacggtggccattgatacggagctgacggaagcgctcatcgaagagggctttgtgcgtgagcttgtgagcaaattccaaaccatgcgcaaggaagcgggcttttatgtggaagaccatatccgggcctatgcctccggcaaccgaaagatcgaggcgctgctcgcagcaaacagcgcgcaggtaggcggcgatattctggcggatgcggtgtgcacaggaagcctcgcaggctacaccaaggagtgggacgtcaacggagaagcggtcacactcggagtggagcgcatctga

SEQ ID NO: 469 - DNA, 2598 bp, Subdoligranulum sp. 4_3_54A2FAA
gatatgaatgcacagaaaatgacacaaaaatccctcgaggcattacaggctgcacagtcgctggccgtcgagtatgaaaaccaggccctgtgcccggagcatctgttctgcgctttgctgagccagcaggacgggctcatcccccagctgtttcagaagatgggggccgagccgggcaaccttgccgccgcctttgccaaaaaggtgggtgagctgccccatgtaacaggcaccgggcgggaccccgaaaaggtgtatatcacgccggagctggaccgtgcgctgacggccgccgaaaaatccgctgccgccatgaaggacgaatacgtttccgtggagcatcttgtgctgggcatgatggatgcgcccaacgccgccgtcaaggaggtgctgcgccagttcagccttgataagacccgctttctggaggtgctggcgcaggtgcgcggcaaccagcgcgtcaccagcgacaaccccgaaagcacctatgacgtgctggccaaatacggccaggaccttgtggagctggcccgtcagcagaagctggaccccgtcatcggccgcgacgccgagatccgcaacgtcattcgtatcctttcgcgcaagacaaaaaacaaccctgtgctcatcggcgagccgggcgtgggcaaaacagctatcgccgagggcctggccctgcgtatcgtgcgcggcgacgtacccgaaaacctgaaggaccgcaaggtgttcagccttgacatgggcgcgctggtggccggcgcaaaataccgcggcgagtttgaagaacgcctcaagagcgttctgcaggaagtgaaaaagagcgagggacagatcatcctgttcatcgacgagctgcacaccattgtgggcgcgggcaaaacggacggcgccatggacgcgggcaatatcctcaagcccatgctggcgcggggcgagctgcactgcatcggcgccacgacgctgaacgagtaccggcagtacattgaaaaggacgcggcgctggagcgccggttccagccggtgatggtggatgaacccacggtagaggacaccatctccattctgcgcggcctgaaagagcggtacgaggtgtttcacggcgtgaagatccaggacaacgcgctcatcgcagcggcagtgctctcgggccggtatattactgaccgctttctgccggataaagccatcgacctggtggatgaagcctgcgccatgatccgcacggaaatggattccgccccggcggagatggatgacctgcgccggaagatcatgcagcacgagatcgaggaggcggccctgaaaaaggagaccgacaagctttccgccgagcgccttgcggacattcaaaaagagctggccgccatgcgcgaggaattcagcgccatgagcgcccgctgggagaacgagaaatcggccatcggcaaggtgcagcacctgcgcgaggagatcgagcaggtaaacggcgagatcgccagggccgagcgtgaatatgacctgaaccgcgctgccgagctgaaatacggccgtctgcccgcgctgcaaaaggagctggagcaggaggaggcccgcgcggcggcggcggaaaaggattccactctgctgcacgaccgtgtgacggaggaggagatcgcccgcatcgtgggccgctggacaggcatccccgtggcgaagctcatggaaggggagcgcgaaaagctgctgcatctggacggcatcctgcacaagcgggtcatcggccaggacgaagccgtacagcgcgtgacggaggccatcctgcgcagccgcgccggcatcgcggacgaaaaccgccccattggcagctttttgttcctgggcccgacgggcgtgggcaaaacggagcttgccaaagcactggcggaagcgctgttcgatgacgaaaagaacatcgtgcgcatcgacatgagcgaatatatggagaaatattccgtcagccgcctgatcggcgcgcctccgggatatgtgggttatgaggaaggcggccagctcaccgaggctgtgcgccgcaagccctacagcgtggtgctgttcgatgaaatcgaaaaagcccatccggatgtgttcaatgtattactgcaagtattggatgatggacgtattacggacagtcaaggccggacggtggactttaaaaataccatcatcatcctgacgtcgaatctgggctccaactatatcctggacggcatcgaaaacggagagatcagccccgaggcccgcgcccaggtggacgctctgctgaaaacgtccttccgccccgagttcctgaaccgtctggacgagatcgtctattacaagccgctttccaagacggaaatcgcaggcgtggtggacctgatgctggaaagcctggtgcagcgcctggctgccaagcagctcaggctggcggtcacggacgccgcgaagcagatgatcgtggacggcgggtacgacccggtgtacggcgcccgcccgctgaagcgttacattcagcagaaggtggagacgctggtggcgcgggatatcatacaaaacgatccggcgcccggagataccatcacggtggacgtgaaggacggcgctctggcgttggtgtaa

SEQ ID NO: 470 - DNA, 3282 bp, Subdoligranulum sp. 4_3_54A2FAA
atgcaaagccgcatggtatataaaggaaattcaaagcaagcaggtgatacaatgttgattgcagaccttcacatccattccaaatattcccgcgctaccagccatgactgtgaaccggagatgctggacctttgggcacgccgcaagggcatcgggctggtgggcactggagattttacgcatcctgcctggcgtgctgaactactggacaagctgcagcctgctgaggacggcctgtacacattacgggaaagccttcgcctggcggacaagaccgcgggcaaatacgatgcaccccgttttgtagtgaccggagaaatcagctccatctacaaaaagaacggcaaaacgcgtaaggtgcacaatctgatcctgctgccggggctcgaggctgccgaaaggctttcccagaagctggaggctatcggcaacatccactcggacggacggccaatcctgggtctggacagccgtgacctgctggaaatcactctggacacctgcccagaggcagtgtttatccccgcacatatctggacgccgcatttctctctgttcggcgctttctcaggttttgacgccatcgaggaatgctttgaggacttgacgccctatatccacgcgcttgaaaccggcctttcttccgatccgcccatgaactggcgcatttccgcactggatggatatgcgctgatctcgaattcagatgcccattctcccgccaaacttgggcgcgaggccaacctgttggacattgaaccgtcttacgcgggcttatccgatgcgctgcaagggcgcagtcccgccgcgctgacgggaacgctggaatttttccccgaggagggcaagtaccattgggacggccaccgtgcctgcggtctgtgcctggagccgggtgaaaccgaagcctgcggaggacgatgccctgtctgcggcaaaaaaatcaccattggcgtgcagcatcgggtggagcagctcgccgacagacctgaaggcttttccctgcccggcgcgcgtccgtttgaaagccttgtgccgctgccggatgtgattgctgcgtccactggactttccgcctcaggcctcaaggtcgccgcgcggtatcaagcgcttctggaggagcttgggccggagttttatattctgcgccaagcgccgctggaggacatccgccgtgcggccggcccttgtgtggaagaaggcatccgccgcctgcggtgcgggcaggtgtcccgcacgccgggcttcgatgggcaatacggaaccgtccaacttctttcccccgatgaaatcgaatctcttaacggacagatcagttttttcagctccgacgcgccgcatcccgaagcttctgcacgcaggccccgaaaaacagacgcaccccaaaagtcatccggcgcaaagtcttccgcgccggtacaaaccgctcacagcaagctgaatccggagcagcagaaagccgtctgcgccgtcgaacccgctgtggctgttatcgccggccccggcaccggaaaaacgaaaacgctggtttcccgcgccgttcatctgctgtgtgaaaagcaggtatccccgcggcagctcacggccgtcacctttaccaataaagcagcccgtgaaatgcgcgaacggctcaccgctgagctggacaaagaccgcacaatcggcgacctgaccatcggcacgttccattccatctgcctttcactgctgcgggagacaggcaaagccgtgacgcttctctcacaggaggatgcacaggccgttgccgccgacgtgctccgtcaggccggggcaaagctgccgcctgcaaagctggtgcaggctgtttcccggcaaaaaaacggactgccggtgccggaaaatgtgaatgccgcgttctgtgaatcttatgtcgcccgctgccgcgagctggatgtgctggattttgatgacctgctcctggaaacgctggcgctttttgaagcgggtgagctcccggaagagataacgcagcgttttacttatcttctggtggatgagtttcaggacattgacgcgctgcaataccgtcttgtgcgggcatggacaaaaggctgcaaaagtctttttgccatcggagacccggaccagtctatttatggctttcgcggcgcggatgcagcatgcttcgaccgcttggcagaagatatccccgggctgcgtgtcgttcgccttacccaaaattatcgctccacgccggaggtgcttggctgcgcgctgcctgtgatcgggcacaatcccggcggcgcgcgcagtttgctgcccaaccgcggcagcggagcgccggtgcgtttggcacaggcggccagttcccttgcggaggggatctttattgcaaaagagatcaaccgtatggttggcggtatggatatgctggacgcgggcggagtcacaggtgatgaacgcacccagccccgcagcttttccgatattgcaatcttgtatcgcacccaccgccaggcagacattctggaatattgtctgcaaaaagaaaacatcccctataccgtagccgggcgcgacagctttttgtctgagcctgcggtacgcgcagccataggcttcttccgctttctgctcgcacccggggacacgcattctctgcagactgccctggaactcggctgggcctgttcaccgcaacaggcggtgcgcctcagcgcttttttctccgggtgcagcgcattgcacgaaaatctttgggacaaagccgaggctgaatttccagagcttccgatgcgtgccgctgtgtgcgcactgcaaaaattttctcagtgtgccgcgcaggagtctcctgcacgtcttttggaacgctggcgggatgacgcgggctttgcgggcagcgaaccgctgcagaagctgattggaacagctctgtttcaccgggatatgcattccttgctgaacgcgcttactctcggagaagaagcggacatcctgcgggccgggggaaagaattacgccgccggagcggttactctgatgacgctgcacggcgcaaagggcctggaattccccgccgtttttctctgtggtgcatgcaaaggcacattgccgttggagatgtccgggcgcgctgcagaccttgcggaggagcgccgcctgttctacgtcggtatcacccgcgcccgggacgaactcatcctcacatacccgggcgagccatctccgttcctcgccgagacaccatccggcgccgttacatccggtggcgcggcgccaaaaaaagctctgcctgaaggagagcagctttctctgttctga

SEQ ID NO: 471 - DNA, 2493 bp, Subdoligranulum sp. 4_3_54A2FAA
gggcgcaacagcggggtgctcccgaagcggctttgcagccgcggcacgggaacgtttcggatgctccggcggcacggccgccgggaaaggaaccaagaggagaatatggacgaaaaatacttagaagcactggaattcgacaagatacgcgcacgcgcggccgacggcatcgtctgtccggaggcacggggcatgctgttggggcagcccgcatgggaaacgcctgacgaggtgcgtgcggcgctggagcagacagacgttatgacgacgctgctgctcaaaaacggttcgccccgtttttcctcggtggagaatgtgcggggtatcgtgcagagagcggaaaagggcggcgtgctctccatggcggagctgcttacggtggcggacacactgcgcaacttccgtgagctggtgaaatggtacggcctgacggagcacgacgtgctgccggtagacgatttgttctatgccatgacgccccagccgacgctggaaaagacgataaaggattcgattttgtccgaaaatgaaatggccgacacggccagcgacacgctgtatgatatccgccgcaagattcacgcggcggaaaattccatccgcgataagctggacgccattacaaaatcacagtcggcgtcaagatatttgcaggacgccgtggtttcgctgcgcaacgggcgctttgtcgtgcccgtgaaagcggagcaccgcggcgaggtgggcggcgtcatccacgacgtttcttccagcggttccacgttgtttgtggagcctacggccgtggtggaggccaatgccaagatcctgcagctgcgcaatttggaacaggctgagatcgaacgcattctggcagcattttccgctcagactgcggcactggagccgatgtttacgtttggctacggagcgatgctggagttggatgtgctgctggccaaggccaggctggcgctggaccaaaaggccatgaaaccgcaggtgaacgacgaccatgcgttcagtcttgtgcgtgcgcgccacccgctcatcgatccggctgtggtcgttccggtagacatcgcattgggcggcgcttacgacaccatggtcatcaccggtcccaacacgggcggcaagacggttacgcttaaaacggctggccttttgtgtgcgatggcgcagcacggctatctgatcccggcacacgaaagcagctctgtctgtgtgttcggcgagatactggtggacatcggtgacgagcagagcatcgaacaaagtttgtccacattttcagggcacatcaaaaacatcacaggaatcctgaaactggcggggcctcagacgctggtgcttatggacgagctgggcgcggggaccgacccggctgaaggcgcggcgctggcggtatccgtcatcgaggcgctgcgcggtcttggagcgaagatcatggccaccacgcactattcagagctgaaaatttttgcgctggatacgccgggcgtgcaaaacgcctcctgcgaattcaatgtggaaacgctgcgcccaacctaccgcctttccgtgggcgtaccgggaaaatccaacgcgttcctcatcagccagaagcttggccttgcgccggagatcattgagaacgcccgggcgcatctgtccaacgaggaccagcagtttgacaatatcctcaaccagcttgaggatctgaaggtggagctgaaggcgcagcaggacgaggtagagcgcctgaagcacacggcctctcatgcactggagcaggccgaggaaaaacgtgctgcgcttatccggcagggcgaggaagaactggccgctgcgcgggagaaggcccacggtatggtgcaggacgtgcagaacacagcctacggcctgatggatgagctgcgcaagctggaaaaagacaagcagctcaacgcgtcccagcgcgcggcccgtgcgcgggagatcgcgaaaaaggaaacggaaaagctgttcggcaaaacggacgtggtgcatgcgcctcagcgtactttcaagccgctggacagcgtaaaactggggcaggaggtgctgatcgccgagctggacaagcccggtatcgtgacggctctgccggaccgtgacggcatggtggaggtgcgcgcgggtattatcaagacaaaagtgccgctcaacggcctgtgcgcgccgcacaagcagcagcccgcgccgcagaaaaagtatcagccgcgccgtgcgccggcctccgcgtcaagcggggataaggtaacacgtacgcccagcatggaaatcaacctgatcggcatgacggtagaagaagctctgcatgaggcggacaaatttatcgacaacggcgtgatgaacggacaaacgacgctgtacctcattcacggcaaagggacgggcgcgctgcgcaaaggcattcatgagcatctgcgccgtcataaaaatgtgcgcagcttccgccttggcgtttacggcgagggcgaagcgggcgttacggtagtagagctgaaatag

SEQ ID NO: 472 - DNA, 2415 bp, Subdoligranulum sp. 4_3_54A2FAA
atgattttgaacaccagatataccaaaaaagaatttgaaaagctgctgactgaaaagctgttcaatgaattcgccatcgacatcgcgtcggcaacggacgaacagatctaccgcgcgcttgcactcattgcacggggcatgctcagcgaaaagcgcaagcgctttatcgcgcgcacctacggcgccaacggcaagcaggtgtattacctgtgcatggaatttctgatgggccgcagcctgaagaccagcctgctcaatctgggcctgtgcggcgtggcggacgaggtgctgcgggattacagcatgaagctggacaatatctacgagcaggagccggacgcgggcctgggcaacggcggcctgggccgtttggccgcgtgctatctggacggtatggccaccgacgatatccccggcacgggctattccatcctgtacgaatacggcatcttcaagcagaagatcgtggacggctggcagcaggaacgcgccgacaactggctgcccggcggcggcgtgtggctgaaaagccatccggaccaggccgtggaggtgcgctttgacggagagatcgaggagagctgggacggcgtataccaccatgtggagcacaaaaactattccagcgtcatcgccgtacccagcgacatgtatgtggccgggtacgattccaacggcgtttcccagctgcgcctgtggcaggccaaggcgcccggcttcgatatggacagcttcaacgcgggcgagtacggcagcgccatcaccaagagcgccaacgccgagctcatcagcaaggtgctgtaccccaacgacaaccacatcgagggcaagatcctccgtctgcgccagcagtatttcctgtctgccgcgtccatcggggatatcgccaagaaccacctgtcccagtacggcacgctggaaaacctgccggataaggtcgccatccacgtcaacgacacccaccccacgctggccattccggagctgatgcgcattcttttggacgaatgcggctatacttgggaaaaggcctttgatatcacccgccgcaccttcgcctacaccaaccacaccgtcatgagcgaagcgctggaaaagtggaacgaggatatttttaaaaagacgctgccgcgcatttaccaaatctgcgtggagctggaccaccgctgccgcgccgacctggagcgcaccttccccggcgacgagggcaagatcaactacatggccgttttgggcgacggccaggtgcgcatggccaacatctgctgctatgtgtgccattccatcaacggcgtgtctcagctgcacagcgagatcatcaagcagagcgtgttccacgactatttcctgtacagccccgaaaaattcaccaacgtgaccaacggcatcgcttaccgccgctggcttctggccgccaatccgggcctgacgggccttctggaggacaccatcggccccggcttcaaaaaggatgcgtccgagctgaaaaagctggagaaattcaaagcggacaaaaaagtgctcagcgctctggaggatgtgaaggacgccaacaaggtgatcttcgcccagcatctgaagaaggtcaccgggcaggagatcgacccgcacacactgttcgacgtgcaagtcaaacgcatgcacgagtataagcgccagcatctgaacgcgctgaacatcgcggcgcagtacctgtatatcaagaacaaccccaacgcggacgtggttcccaaaacgtatatcttcggagcaaaggccgcgccgggctactatatggccaagcagatgatccgcctgatctgcaagctgggcgcgctcatcgacgcggaccccatggtgcgtgaaaagctgcgcgtggtgtatctggaggactacaacgtcaccaccagcgagcgtctgatgcccgccagcgaagtgagtgaacagatcagccttgcgggcaccgaggcctccggcacgggcaacatgaagttcatgctgaacggcgcggtaacgctgggcacgctggacggcgcgaatgtagagatcgcagaggccgccggcagggaaaacgagatcatcttcggcatgctgacgcccgaggtgaacgacctgaagcgcttcggctaccacccctccggcttcatcaacaattgtcccgaggccgccgaagtactggcatttctggagcgcggctggggcggcgagagcttccatgagatcgtgaacaacctgcgcaccagcgacccatatatggtgatggccgattttgccgattaccgccgcgcccagaacgacctgagcgggctgtaccgagaccgcggcgtgtggaaccgcatgagcctgatgaacattgccaacgcaggcattttttcagccgaccgggcggtgaacgattacgcccgcgatatctggcacgtaaagcccatcaaatag

SEQ ID NO: 473 - DNA, 2280 bp, Subdoligranulum sp. 4_3_54A2FAA
atgatcaaaagcatcatcaagcgcgatggacgcgtcgttttgtacgacgaaggaaagatcgcttcggccattttgaaggccatggaggcagcccaggagggcgacgcttcacaggctgcggctgtcgccaatgcagtggaagcggctctggaggagcgttgcggcgcccagccgccccaaatcgagcagatccaggacgaagtggaaagccagctgatgcagatgggcttcgacaacgccgccaaaaaatatattttgtaccgcgcgtcccgcacccgcgtgcgcgagatgaacacccgtttgatgaaagtgttcgacgagctgacccatgccgacgccacggccagcgacatgaagcgcagcaacgccaacatcgacggcgacacgcccatgggcaccatgcttcagtacggcagcgaggcagccaaggactattatgacaaatacctgctgacacccgagcagagccgggcgcaccgggagggctggatccatatccatgactttgatttttacgccctcaccaccacctgctgccaaatcgacctgctcaagctgttcaaaggcggtttctccacgggccacggttttctgcgcgagcccaacgacatccagagttattccgccctggcatgtatcgccatccagtccaatcagaacgaccagcacggcggccagagcatcgtaaactttgactacggcctggcgccgggcgttgccaaaacatacaaaaagcagtatgccgtcaatattttcaagagtctcgagctgctggctcccgaggcgggcgtgacgctgcagcaggtgaaggacatactgcgcgccattgaggctgaacagggcctgcggccccagctcgccactgatatggattacctgcgcgccgagacggaagccctcactccgctcgtgggcggagacattgcaaaaaaagcccaggcattcgcgctgaaagagacggaaaaggagaccgaaaaggctacctatcaggccatggaggcgctcattcacaacctgaataccatgcattcccgcgccggtgcgcagacgccgttctcgtccatcaactacggcacagacatcagccccgagggccgtatggtgatgcgcaacgtactgctggccacggacgcgggcctgggccacggtgaaacgcctatcttccccattcaaatcttccgcgtgaaggaaggcgtcaactacaaccctggcgaccccaactatgatttgttccagctttcctgcaaggtgagcgccaagcggctgttccccaacttcagctttatcgacagcccgttcaacctgaagttttacaagcccggccatcctgagaccgaggtctcgtacatgggctgccgcacccgtgtgatgggcaacgtctacgatccctcacaggagatcgccaacggccgcggcaatctcagcttcacctccatcaaccttccgcgcctggccattgagagccacggcgatgaagcgctgttctatgaaaagctcaaggatatgatggagcttgtcatcggccagctggacgaccgtttcgccatccagagcaaaaagcgcgtatacaacttcccgttcctgatgggtcagggtgtctggctggacagcgaaaagctgggccccagcgacgaggtgggcgaggtactcaagcacggaacattgagcatcggcttcatcggcctggccgagacgctgatctctctgtacggacaccaccacggcgagagcgacgcaatgcaggaaaaaggccttgccatcgtccagtacatgcgccagtatctggatgcgcgcagcgaacgcacccatatgaactacagcttgctggccaccccggcggagggtctttccggccgttttgtacgcatggacaaaaagcgctacgggctgattcccggcgtgacggacaaggattattacaccaattctttccacatccctgtgtactacaatatctcggcctatgagaagatccggaaggaagcgccctatcatgcactgaccaacgcgggccatatcagctatgtggagctggacggcgacaccgccaacaacctggaagcgttcgagagtatcgtgcgttgcatgcacgactgcggcatcggctacggcagcatcaatcacccggtggaccgcgaccccatctgcgggtatgtgggcgtcatcggggaggtatgtccccgctgcggccgccgcgagggcgaggccgtttctcccgaacgcatcaaggagctgcgcaagctgtatcccggcacctttacctactgcggctgcgaatga

SEQ ID NO: 474 - DNA, 2457 bp, Subdoligranulum sp. 4_3_54A2FAA
atgtcggaacgagtaaaaatcattttggataagaacgcggatatcctgcgcctgccggccattgcactgcggggcctagtggtattcccgggaaatatcatccacttcgaggtgggccgcaaaaagtccatcgcggccatcgaatgggccatgagcaataacaacgctgtctttttgactgcccagcaggatatggacgtggaggatcccggctttaaggatctgtatgcgtacggcgttgtggccgaggtaaagcaggtgctgcgtgtctcggacgagcttgtcaaggtgctggtggaaggcaaataccgtgccaagctgctgacgctggattcaagcgggcgttttctgctggcgtctaccaaggccgccgcgctgcgcgggacaaaatcggtcgattccgcacgcatggaggcgctggtgcgcagtgtgaaagaagtctttgaggaatatctttcgctgaacccgcgcctttccaaagacgtggtgtataccatcatcaccaatgaggatgcagcattgctgtgtgattatatcccggcaaacctgctgctgaaatataccgacaaacaggcgctgctcaatgagggcactgtgtccagccgcctggaaaagctgctggagatcctgcgccgggagacgaagatactgcacattgaaaaggacatccagagcaaggtcaacgagcagatggacaaaaaccagcgggattattacctgcgtgagcaaatgcgggcgatttccaacgagctggacgatttcgacgacacccgcgaggaggccgaggaatacaaggcgaagatcgaaaaaacaaagctgcccgaagaggcgcgggagaaactgctcaaggaagcggaccgcatgttcaaaatgcagggcaattcccaggaggcttcggtcatccgcacttatctggacacatgtctggatcttccgtgggatacgcgtaccgaggataatctggacgtcaataaggctgctgcgcttctggataaggagcattacggcctgaaaaaggtgaaggaacgcatccttgagattctggccgtgcgcaagctggcgcccgaagtcaaaggacagatcatttgcctggtcggccctccgggcgtgggtaaaacgtccattgcacggtccatcgctgaatgcctgggccgcaagtacgcgcgaatgtctctgggcggcgtgcgggatgaggccgagatccgcggccatcggcgcacctatatcggggcgatgcccggcaagatcatcagcgccatcctcacggcaaagagcgcgaatccgctgctcctgctggacgaggtggacaaaatggccagcgattttcggggcgacccggccgccgccctgctggaagcgctggacccggagcagaacgtcgcgttcaaggatcactatctggatatcccgtttgacttgagcgatgtgttgtttatcaccacggccaatactacggataccattccgcgtccgctgctggaccgtatggatgttattgagctttccagctatacgcgcgtggaaaagttcgagatcgccaagcgtcacctgctgcccaagcagctcgctgccacgggcctgaaaggccgtgtgaagctgacgaactccgcactgtacggcctgatcgacggatatacgcaggaagcgggtgtgcgcaacctggagcgcgccgtcaccgaactgctgcgcaagtgcgccaagcgcatcgcggcgggagaggtggagacgctttctgtaagtgataaaaacctggaagagattttggggccgaaacgcgtgaaaccggcttttctcagccgtaaggacgccgtgggcgtggccaatggccttgcgtggaccagcgtgggcggcgagatactgcccatcgaggtgcagacagtgcccggcggagcaggacggctggaactgacgggttctttgggcgaggtaatgaaagagagcgccaagcttgccatcacctacgcaaaagcccatgcggaggcttacggctatgatgtttccgtttttaaggatatcgatatccacatacacgcgccggaaggagccattccaaaggacggtccgtctgcgggcgtaacgctgacaacggcgctggtgtcgtgcctgtccggccgcccggtgcgttctgatgtggccatgacgggtgagataacactccacgggcaggtgctgcccataggcggcctcaaagaaaaaagcatggccgcctaccgggaggggatgaagctggtgctgatcccgaaagacaatgctcccgatttgtatgaggtggacgacgccgtgaaaaacggtttgacgttccgtccggtgagcacgttggaggaagttctgcgcacggtgctgctgcccgctaaaaagcctgcaaaggccgcgaaagcgcccaaggcaggcggggaaaagcatacgcgcccggtgccgccggaaaaagcggaaccgcagctcagcatccgccagtaa

SEQ ID NO: 475 - DNA, 2088 bp, Subdoligranulum sp. 4_3_54A2FAA
atggaacattttgcgcgctgggtggtgcggcaccgcaaagcggtgctggcggccgccgtgctgctgctgatcccatccgtgttcggtgccgcaggcacctatatcaattacgatatcctcacctatctgccgccggagttggattccatggtgggcgaaggatatctggaggacgatttcaacatggcctccacctccatgatcaccgtggagaatatgtccaccgcggacacacttgccctcaagagtgagctggaggctgttgcgggtgtaaaaagcgtgctgtggacgagcgacatcctggacgtaactacgccaaaggaaatgctgccggccgacatccagaaattcttttacagcgaaaacggcgccacactgctgctggtccagttcgaaaacccaagcgcccatgccgtgaccatgcaggcgcagcgcaccatcaaggatatcctgcgcaaggactgcttcatcggcggaatgtccgccattctggaagacacaaaatttctggtaaaccaggaaatgcctgtctacatcctgtgtgccgtgggggcgtgtctggtggtgctgttcctcagcatgaaagaaacggttgtacccctcatcttcatgctgggcatggtattccccattgtctacaactttggcaccaatatctttctggggcagatcagctacatcaccgaggctttggccacggtgctccagctgggcgtgacgatggatttctccatctttctgctgcaccggttcgaggaagaaaagcgttcctgcccggatgaggacgaggcaatggtgcgcgccgtgcaaaagacgttctcctccattctggcaagttcgctcaccaccatcgcaggcttcctcgcaatgtgcaccatgcgcctgacactggggcgcgacatcggcatcgtaatggccaagggcgtgttgctgggcgttgtcagcactgtgacgatcctgcccgcgctcatccttacgttccggcgctccatcgcgcggcatacccaccgtaccttcatccctaagctgcgccgtacctcccgtttcgtggtgcgccggtatattcccatcctcgcagtgttcgtgctctgcttcattccattcagcgtggcgcaggcgaaaacgcctgtatactacacactattcgacagcctgccgcaggacctcgcggggattcagggtaccagccgcctgaaagaggacttcggcatgacgacttcccatttcatcatcgtggacgacggcttgccggcccgcgacatggaggcgctcaccgatgagatcgagcaggtggacggcatccgccaggtgctcagctatgaaaagtttttgggcggcggcgttccccgggaggttctgcccaccgaggtgcgtcagatcttctgcgcaggcggccacgagatgctgctggccaattccagctatgagagcggcaccgaagctcaaaacgcccaactggacgctctgaacgccattgtcaagcgttacgaccccaacggcgtgattaccggagagggtgcaatgacaaaagacctgatcgaagtggcggacgtggatttccgcagcgtcagcatcgccagtatcgcagcggttttcctcatcatcgccatttcattccgctcagcgtccattccggtgcttctggtggccgccatcgaaagtgccattatgatcaatatgggcatcccctatttcaccggcacgacgctgccctttgtggccagcatcgtcatcggcaccatccagctcggcgcaacggtggactacgccatcctgatgaccacccgcttccgggaagagctgaatgcggggcgctccaccaaggacgccgtgcagacggccgtggagcagtgcagccagagcatcctcaccagcggactgacgtttttcgcggcaaccttcagcgtttcactggcttcccgcatggaacttatcagcagcctgtgccgtctcatcagccgcggcgcgctcatcagcatgcttgtgattctgctggtgctgcccgcgctgcttatcctgacggcgcctctcatccggaaaaccacctaccattggctcagcaaagaaaaggagacgaaaaccgtatga

SEQ ID NO: 476 - DNA, 2631 bp, Subdoligranulum sp. 4_3_54A2FAA
ttgagtgacaaaaaatacctgtacctgttcagtgaagggaacaaggacatgcgtgagatcctcggcggcaagggcgctaaccttgccgagatgaccaatgccggcatgcctgttccccagggcttcaccatcagcaccgaggcctgcacccagtattacaacgacggccgccagatcaacgaaggcatcatggccgacatctacgagtatatcggcaagatggaggagatcgtcggcaagaagttcggcgaccccgccaaccccctgctggtttccgtccgttcgggcgcgcgcgcttccatgcccggtatgatggataccatcctcaacctgggcctgaacgacgaagttgttgagggtctggccaaaaagacgggcaacccccgcttcgcctatgacagctatcgccgctttgtgcagatgttcagcgacgttgtcatggagatgaacaaaagcgaattcgaaaaaatcatcgatgagatgaaggaagccaagggcgtcacccaggacgtggagctggacgccgacgacatgaaggctcttgttgccaaattcaaatctctctacaaggaaaaaatgggcgcggacttccccaccgacccgaagacgcagctcatcgaggccgttaaggccgtgttccgcagctgggacaacccccgcgccaacacctaccgccgcatgaacgagattccctacgactggggcaccgccgtcaacgtacaggccatggtgttcggcaactccggcgagaactccggcacgggcgtggcgttcacccgcaaccccgccaccggcgagaaggccctgttcggcgaatacctcatcaacgcccagggcgaggacgtggtggccggcatccgtacgccgtcccccatcagccacctgaaagaccagatgcctgaggtctacgaccagttcgtgaccatcgccaccaagcttgagaaccactatcgcgacatgcaggacatggagttcaccatcgaggacggcaagctgtatatgctgcagacgcgcaacggcaagcgcaccgccgccgccgcgctgaagatcgccgtggacctggtggatgagggcatgatcaccgaaaaggaagccgtgctgcgcgtggagcccaagcagctggacagcctgctgcatccgcagtttgacccggccgcgctgaaggccgccgccgtcatcggcaagggcctggccgcctctccgggcgccgcctgcggccaggtggtgttcaccgccgacgaagccaaagaggctgttgaaagcggcaagatgaagaaggtcgttctggtccgtctggagaccagccccgaggacatcgaaggcatggccgtggcgcagggcatcctgacggtgcgcggcggcatgaccagccacgcggccgttgtggcccgcggtatgggtacctgctgcgtgtccggctgcggcgacatcgtcgtagattacgacaaaaaatgcttcacgctttccggcaagacctacaacgagggcgactggatctccatcgacggctccacgggcaacatctacggcgaggccgtgcccacggtggaagcctccatctccggcgattttggccgcttcatgggctgggccgacgccgcgcgcaagctggaagtgtttgccaacgcggacaacccccgcgatgccaagcaggccgtcgagttcggcgcggaaggcatcggcctgtgccgcaccgagcatatgttctttgaagccgaccgcatcaaggctgtgcgcgagatgatcgtagcccgcgacgtagaggcccgcaaggccgctttggccaaggttctgccgtatcagcagagcgatttcgaggccatgtacaaggtcatgggtgagcgcccgatgaccatccgctacctggacccgcccctccacgagttcctgcccaccaaggaagaggacatcgttgagctggcaaaggatctgggcatcaccgtggagcatctgcgcaatgtcatcgacagcctgcatgagttcaacccgatgatgggtcaccgcggctgccgcctggccgtttcttatccggaaattgccgagatgcagacgaccgccgtcatcaacgcggccatcaacgtcatcaaggagtgcggctacaacatcgtgccccacatcatgatcccgctggttggcgaagtgaaagagctgaagttcgtgaaagacgttgttgttgcaaccgcggacaagctgattgctgaggccggtgtggacatgaaatatgaggtcggcaccatgatcgagatcccgcgcgccgccctgacggccgacgagatcgccaaggaagccgaattcttctccttcggcaccaatgacctgacgcagatgactttcggcttcagccgcgacgacgcgggcaaattcctcagctattactacgacaacaaggtctacgagagcgacccgttcgcgcacctggaccaaaacggcgtaggcaagctggtggagatggctgcgaagctgggccgccagacccgtccggagctgggcctcggcatctgcggcgagcacggcggcgacccgacgagcgtcgagttctgccaccgcgtgggcctggactatgtgagctgctcccccttccgcgtgcccatcgcgcgccttgccgccgcacaggctgctattaaaaattaa

SEQ ID NO: 477 - DNA, 2886 bp, Subdoligranulum sp. 4_3_54A2FAA
ttgagtacagacaaaatcgtgataaaaggcgcgcgggagcacaacctcaaaaacgtggacgtgaccatcccccgcgacaaactcatcgtcatgacgggcctttcgggcagcggcaaatcttcgctggcgtttgataccatctacgcagacggacagcgccggtacatggaaagcctgtccagctatgcccgccagtttttgggccagatggagaagcctgatgtggacgagatacagggcttgtcgccggccatatccatcgaccagaaaacgacctcccgcaacccgcgctccacagtgggcacggtgacggaaatctacgattacctgcgcctgatgtatgcgcgtatcgggattccgcactgtccggtgtgcggccgcatcatcagccagcagacggtggaccagatggtggacgaggtgctgcgcctgcccgagggcacgcggttccaggtgctggcccctgttgtgcgcgggcgcaagggcacccagcagaaggagttcgaggccgcgcgccgttccggctttgcccgtgtgcgcgtggatggcaatatgtatgagctggacgaggagatcgcccttgaaaagaacaagaagcacacggtggagatcgtggtggaccgcctcgtcgtcaatgatgaggtgcgcagccgcctggcggattccatcgagacggccatcggtttgacgggcggccttgtgggcatcgacgtcatcggaggcgatgagatgctgttcagccagagctatgcctgcccggagcacggcatttccatcgacgagcttgcgccgcgcatgttctcgttcaacaatcccttcggcgcgtgcgagacatgcacgggcctcggtacctttatgaaggtggacccggcgctcgttattccgaaccgcagcctttccatccgcgagggcgcgatcaaggcaagcggctggtattatgcggacggttctgtgagcgagatgtactacaagggcctgggcaaaaaatacggttttacgctggacaccaaaatcaaggacatgccgcctgaaggcgtgcatgcgcttttgtacggtaccggcggcgaaaagctggagatgacccgcgagacggaccggggcaccgggacatacagcaccgagtttgaaggcatcatcaacaatctggagcgccgcttccgcgaaacaaattccgagtggatgaaagaggagatacaaggcgtgatgacgggtgtggaatgcccggactgccacggagaccgcctgaagccgaccagcctggctgttacggtgggcggcgtcaacatcagtaaatttacacagatgagcgtacgcgaggagctggatttcatcaacggccttcagctcaccgagcgggagcatatgatcgcggatgggattttaaaagagatccgcgagcggctgggctttttgcagaacgtgggcttggactacctgacgctggcgcgcaacgcggccacgctgtccggcggcgaaagccagcgcatccgcctcgctacacagatcggttcggcgctgacgggtgttttgtatgtgctggacgagccgagcatcggtctgcaccagagggacaactcaaagctcatcgccacgctcaagcgcctgcgcgacctgggcaatacgctcatcgtggtggagcacgacgaagagaccatgcgtgaggcggactggatcgtggacatcggcccgggcgcgggcatacacggcggcgagctggtggcggaaggtacggtggaggatatctgcaaggcgccacgcagcattacggggaagtatctctccggccgaaaaaaaatcgaggtgccggaacaccgccgcgagggcaacggccatttcatcgagatcaaaggcgccacgcagaacaatctgcgggatgtggacgtaaaaataccgctgggcgtaatgacatgcatcacgggtatctcgggcagcggaaaatcgtcgctgatcaacgaaattctgtacaaacgcctggcggcggacctgaacggcgcgcgcatcaagccgggcgcgcacaaagacatgcttggccttgaatatgtggataaggtcatcggcatcgaccagtcgcccatcgggcgcacaccgcgctcgaacccggccacctacacaggtgtattcacggatatccgcacggtgttttcacagacgcaggaggcgaagatgcgcggctacgggccgggccgcttcagcttcaatgtcaagggcggccgctgcgaggcctgcgagggcgacggcattatccagatcgccatgcactttctgccggacatctatgtgccctgcgaggtgtgcaagggcgcgcgctacaaccgcgaaacgcttgaggtaaagtataaggggaagaccatcaccgatgttctgaacatgacagtggaggaggcctgcacctttttcgaaaacatccccaagattcaccgtaagatcaagacgcttgtggatgtaggcctgggctacatccagatgggccagagcgcaacgacgctttccggcggtgaggcgcagcgggtgaagctggcgctggaactggccaagcccggcacgggcaagactgtctatattatggacgagcctaccacaggcctgcatgtggatgatgtgcataaactggtaaaggtcatcgaccggttggtggaggcgggcaacactgtcatcatcatcgagcataacctggacgtcatcaaacgggcggaccacatcatcgaccttgggccggagggcggcaatgcgggcggcatgatcgtagcgcagggcacgccggaggaggtggcgctgtgcgagagctcctatacgggccagtatctgcggcccatgctgcctgttctggaaagcggcgcggcggctcctgtggaaaaaaaacggacacggcgcaaaaaggcggaatga

SEQ ID NO: 478 - DNA, 2451 bp, Subdoligranulum sp. 4_3_54A2FAA
atgagtagccttgcaaagcaaaaacaggaaaagcagatgaacgggtatctgctgtcgttcggcgtgtgcgccgcggcggcatttttcatctttctgccgttcctcgtcgtggacaagggcctgttccagtactgcggcgatttcaacagccagcagatcccgttctacacttacatgaacgggttcgtgaaaaacagcgcgggccagtggagctgggagacggacctcggtacctcggcggtgaactcgtattcgttctatctgtacggttcgccgtttttttggctgacgacgctgctgcctcaggcatgggtgccgttttccatggtgcctatgttcatgctcaagttcggcgtggcggggctgggcgcgtatacctatctgaagcggtattccgccggacgcaactatgctgtcatcggcgcatgcctgtatgcgctgtccggttttacggtctacaatacgtttttcaatcattttgtagactgcatcgcgctgttcccgtttttgctgtgggcgctggacagctatgtttacgacggcgtgcggggcgtattcccgctggcggtggccgtcaatctgctcaacaattacttcttttttgccggtcagatcgttttcctgtttttatactttttcatcaagctgctcacgggcgaatacaggatcacgccgggccgctttggacggctggcgtttgaatccctgctgggcgtggcgctgggctgcctgttcctgtggccggctgtgctgtgcctgaaggacaacccgcgcacggtggacctttccagcggcttcggctttttgctgtacggccgcgtgcagcagtatttcgccatcctggcctcgctgttcctcccgccggacccaacgtatctgcccaatatctttaccgacgcggtggtaaagcacaccagcatgacggcgtttctgccggtggtgagctgcgcgggcgtgtgggcgtatatgaaggcacgcaggaaaagcgcgtttacaaaaatcatgtgggcgtgccttatcatggcgctggtgccggtgttgaactcggccttttacgcgctcaattccagctattacgcacgctggtattatatgcccatcctcatcatgtgcgcggccaccatgcaggcgctgcaggacgaggagatcgacctgttggagggcctgcggcccgtggccgtggtaacgctgctgttcgcggtattcgcgcttgtgcccaagcaggaggacggggtatggagcctgggcgtcgtgaaggagcagtcccagttctggctgacctacctgacggctgttttgggcctgctgatcttctacggcgttatccgttggtgccgcgggcacgagagattcacccgtgtgcttttggcaggaattctgggcttttcggtattctattcggtggtgcatattgcactgggcaaatttccgcagtgggagggcgacgcgaactaccgcagcgagtgttatgtggccgcccgtaataacgacctgcccgacgatcatttttaccgaatcgattcctacgactgttacgataacatcggcctgtggatggaaaaaccgtgcattcagttcttcaacagcgtggtcacgccgtccatcatggatttttatccccgtgtgggtgtgaagcgggacgtatcctccaagccggaccagaagctttatgcactgcgcggtctgctgagcgtggagtatgtggtggtgcctcaagacaagatgagcgaattcaccgaaaagtggggcgcgtacggctacgtgtatgaccacgaggacgcgtcgctggcgtatttccgcaatgaaaactatgtgcccatgggctttacgtacgacaaatatatcctgctggaagccccgctccccgagacggaggagggagtggacgccgccgatgcgctcacggaggcgggcgcggcgcaggacgcgctgcgggcgggcgagcccgcgcctgtcacattgatggggctggcggaggattcccgatccaatatgctgatgcgcgccgttgcgctgacgggagagcagatcaccaaatacggttatctgatggaagaagccaccacagccgacactgcgaacctgacttacgaagcctacgtccaggacgcagcggcccgccgcgccacggccagcaccagcttttccgcggacggcacaggctttacggccgaaatcacgctggaaaaggacaatctggtgttcttctctgtgccgtatgacgagggctttaccgccacggtgaacggcgtggaggctgagatcgagcgcgtggatggcggcctgagcgccgtgctgtgccccgcgggcgaaaacaccatcgtattttcctacgaaacgccgggcctgaagctctccacgggcgtcaccctcggggccatcctcgtgtggctgggctactgcggctttatcgtttttgtggaaaagaaaaagaaacaggagaaacattga

SEQ ID NO: 479 - DNA, 2259 bp, Subdoligranulum sp. 4_3_54A2FAA
acggtggtgcctggtgcccgcggcgggcaaaaaggacctggcatccgcgccgattttacgcagactggaggcagcgcagtgatggaagaaaaagcgaaaaatgccgtaaagacttttgaagacctggcgcaggccgtggcggattccggccgcccatacgacgccgggcgcatcgaaaaggcttacgagatggctgcggcggcccatgcggggcagacgcgcctttccggcgaaagctatgtcagccaccccgttgccgtggcgtgccttgtggtggacctgggcttggatacggactccgtggtggccgcgctgctgcatgactccgtggaggacaccgagaccacggcggaggacgtgaaggctgcttttgggccggacgtagcgctgctcgtggacggcgtcaccaagctgggacgcatcaagttttcctcagtggaggagcagcaggctgaaaacctgcgcaaaatgctgcttgccatgagcaaggatgtgcgcgtgatgctcatcaagctgtgcgaccggctgcacaacatgcgcaccggcgacggctggcccgaacagaaacgccgtgacaaggcgctggaaaccatggaggtgtatgctcccattgcccaccgtctgggtatgagcaatgtaaaggaggagctggaggaccgcagcctgcagtatctggaccctgtgggctatgaggagatcacctctttcctggcccaaaacggcggcgcggattcgttcatcagcggcattgcggaccgcatcaaggagcgcctggccgagaacggaatggacaaatgcaccatcaaaaagcgcatcaagagcgtatacggcatctaccgcaagatgtatatgcagaaccgcacgtttgaggaaatttacgatgtgtacgcagtgcgcatcattctggacacagtgggcgaatgctacaatgcgctgggcgtcatccacgacatgtaccatcccatccccagccgcttcaaggactatatctccacacccaagcccaatatgtaccagtcgctgcacacgacggtcatcggacatgagggaattccctttgaggtgcagatccgtacctgggagatggaccagaccgccgaatacggcgtggcggcccactggaaatacaaggcgggcgtgagcacgaaagataagctggacgaccgtatcgcctgggtgcgccagcttctggaaagccagcgggagagcgaggatgccggcgacctgctgcgggacatcaaaagcgagctgctgcccgaggaggtgttcgcttttacgccgaaaggcgacgtcatcaatctgcccgcgggagcgaccgtcatcgactttgcctacgccatccactcagccgtgggcaaccgcatggtgggcgcgaaggtgaacagccgaattgtgcccatagaccacaaggtggtgacgggcgagatcatcgagatcataaccggccccaaggataaggggcccagccgcgactggctgaacctggttgccaccagcgaggccaagaacaagatccgcaactggttcaaaaaggaacgcaaggaagaaaacatcaccgagggcaaggcagctctggacaaggagatgcgccgcaacctcatcaccatccctgaggaaaagtacgacgaatttatggctgaccttgcgcgccgccagcgcctgaacacgccggaagagctgtacgcggccatcggctacggcggcatccagctctcccgcctgatgataaagatcaaggacgaatacacgaagctgctcaaggaacaaagccctgccgaggtgcttcaggtccccatcaaaaagcagaaatccagcgagggcgttattgtggaagggctggacaactgcctggtcaaatttgcaaagtgctgcaacccgctgccgggggacgatatcatcggcttcatcacgcgcggctttggcgtttccatccacaagcgctcgtgttccaacgcgcgggccggccttctgggcgacgacgcgccccgctgggtgaacgcccattgggcggaaagcgtgaaggagagcttcaaatcctcgcttgagatctcggccatggaccgcgacggcctgatggccgacgtggcgggcctcatcgcggagatgcatctgccctgctacgccatctcggcacggcagctggccgacggccgtgccacgatggcgctgaccatcggcgtgaacaacaccgagcatctgaacaccgtcatcgcgcggctgaggaaaatcaagagcatcaccaccattacccgcgtgtga

SEQ ID NO: 480 - DNA, 2334 bp, Subdoligranulum sp. 4_3_54A2FAA
atgtcagtagtcatcaaatacaaactcagcgatgtagcaaaggacctcaatgtccagaataaggagctcatcgattttctgtatcagacgctgggcgagtcgaaaaagcatacctcgccccttacagaagccgagctgaaccatgtgttcgagcattacacgcagaaaaattccgaggcaagcctcgacgcgtaccttgccagcgcgcccgcgcccaaggtggcggaaaaggatatcctgaaaaaggccgacggcaccgttgtggcggccggcccggccaagcgcaaagagcgcatccgccccgccaagcccgagaaggagaacaagcccgcgcctgagaagcgggaggtcgtcaccgtcacggtggatacccgcatcacggacgtgaatctggataagttcaacgaaaaatacaccgagctggcttccacgaaaaatgtggagaaccgccgcaagcccacgcccgcgggcaacaaacaaaagttctcgggccgcaacaaccgccgccagcagccgttccagaaaaagcgcgagacagaggccgagcgcctgcagcgcatccagctggaaaaggctcgtaaggcgcagctgaaggtatccattcccgacgagattacggtgggtgagcttgccagccgcctgaaggtgaacgtggcgcaggtcatcaaaaagctgatgggcctgggcatcatggcagctatctccgaggtcgtcgatttcgacaccgccagcctggtggccgaggagctgggcgcgaaggtagagcacgaggtgcatgttaccatcgaagaacgcctgttcgaagtggatgaggataaggacgaggatctggaagagcgcccgcctgtcgtcgtggtcatgggccacgtcgaccacggcaagacctccatcctggacgccatccgcaaaacgcgcgttaccgcgggcgaggccggcggaataacgcagcatatcggcgcgtatcaggtgacgatgaacggcaagcccatcacattcctggacactccgggccatgaggctttcacatccatgcgcgcccgcggcgcgaacctgacggacatcgccgtgctggtggtggccgcggacgacggcatcatgccgcagaccgtcgaatcgatcaatcacgctaaagcggcgaatactaccatcatcgtggccatcaacaagatggataaacccacggccaaccccaaccatgtaatggaacagctcacgcagtatgagctggtgcctgaggaatggggcggcgacaccatctgcgtgcctgtgtccgcgctgacgggccagggcatcgaggacctgctggaaagcatcaacctggtggccgaggtcaaagaactgaaagcgaacccccaccgccgcgccaagggcgccgttatcgaggcgcgtctggacaaggggcagggccccgtggccacgatcctcgtccagaagggcacgctgcatcagggagatgtggtcatcgcgggtacgtccgtgggccgtgtgcgcgtcatgcgcgacgaccagggcgccatcctcaaggaggccggtccctccatgccggtggagatcacgggcctgacggaggtgcctgcggcgggcgatctgttcgacgccgtagaagacgagaagctggcccgtgagctggccgaccgccgtgctgccgagcagaaggaacagcagttcagtgcatacaagaaggtcacgctggataacctgttcagccagatcgctgagggcgaacgcaaggagcttgccatcattgtcaaggccgacgtgcagggcagcgccgaggccgtaaaacagagccttgaaaagatctccaacgacgaggtgcgcgtgcgtgtcatccatgcgggcgtaggcgccatcaacaaatccgacgtcatgcttgccaacgcgggcaatgccatcatcatcggcttcaatgtccgtccggaccccgttgccaaggaggaagccgcccaggccgaggtggagctgcgcatgtaccgcgtcatctacgacgccatcaacgatgtcaccgacgccatgaagggcatgctggcgcccaagttccgcgaggtggagctgggccgcgccgaggtgcgcagcgtgttcaagatatcttccgcgggcaccattgccggctgctacgtgctggagggcaaggtaacgcgtgccgcgaagatccgactggtgcgcgacggcatcgtcatcaccgaggacgagatcgacagcctgcgccgcttcaaggacgacgtgaaggaagttgcccagggctacgagtgcggtatcggccttgacaagttctccgacatcaaggagggcgatatcttcgaggccttcatcatggaggaataccgcgactga

SEQ ID NO: 481 - DNA, 2517 bp, Subdoligranulum sp. 4_3_54A2FAA
atggaatcccaatttgaaacacaattccttgcactgcgcaaaaagtatattgaggcgcaattcggaaagctgaacccggtgcagcgggacgcggtatttaccacagacgggccgctgctgatcctggcgggggcgggcagcggcaaaacgacggtgcttgtcaaccgtattgcgaatctgattcgtttcggcagcgcgcacagcagcacatatgcgccgcaaggcgccgggccggaacaggtggcggagctggaacgcctgctgcacagcggcggcgagccttccgaggctcttcggcccttcctgcgggagcacacggtgcgcccctataatgttctcgccatcacctttacaaacaaggcggcgggggaactgaaaaatcgtctttccgccatgctgggtgaagcaggtcaggatgtcaacgcatctacattccattcggcatgcgtgcgtatcctgcgccgggaagccggcaggctggggtatccccagagctttaccatttatgatacggacgatcagcagcgcgccatgaaagaagtatataagtcgatgaacatcgacgacaagtttcttccgctgaaatcggccatcggcgccatcggccgtctgaaagacaagatgatcagcccgcaggacgccatgagcgcgcccgcagatacgcgtgcggggcttgttgccaaggtatacgacgcctatcaaaaacgtcttttgcaggcaggtgcattcgattttgacgatttgatttatgccacagtgaagctgctgcgggattttgaggatgtacgggaatattatcaaaaccggttccgctatatcctggtggatgagtatcaagacaccagcgtggcacagtttcagcttgtatatctgctgggcggcgagcaccggaacgtttgtgtcgttggcgacgatgaccagagcatttaccgtttccgcggtgcaacgattgaaaacattcttaattttgaacagcacttccccggcgcaaaggtcattcggctggaacagaactaccgctctacctccaatatcctgaacgcggcgaactgtgtgatcaagaacaatatggggcgcaaaggaaaaacgctttggacggagaacggaaacggcgagaagctgatgtgctatgaagcggattctgagttcgacgaggcggcccatgtggcggcggtgatcggccagaacgtgaaaaagggcgcgaagctgcgggatcatgcgatcctgtaccgtatgaacgcacagtccgggccaatcgaaacctattttgcccgtgcgggtattccgtataaaatcgtcggcggccagcgtttctacgaccgtaaagagataaaggacatgcttgcttatatgagcatcgtcgcaaacgagcaggacgatctgcggctgcggcgcatcatcaacgaaccggcgcgcaagattggcgcgacaacggtgcagaacgtggcggatattgcggcggggcttggcgtctcaatgctggaggttattgagcacgcgccggattatccggcgctggcgcgggcaagcgcggcgcttggcggcttttggcgcatttaccgcaggctgaaagaagcgtacgatacgatgcctctggatgtgttcgtcagcgagatcttggagatcacggggtaccgcagtatgctggaggcagagggagaagaaggccagacgcgcatggaaaacatcggtcagcttgtttccagtgtaaagacctatgccgatcagcgcggtccggaagccagcctgccgggctttctggaggaagtggcgctcatcagtgatatcgacagttatgatgaaggcgcagatgttgtcgttctgatgaccatgcatgcggccaaggggctggagtttaattatgtgttcatcgtcggtctggaagaaggaatattccccagcgagatgagccggtattccaatgaagatctggaggaagagcgcaggctttgctatgtgggtattacccgtgcgaaaaaagagctttatctttcctgtgcgaactcgcgcatgctgttcggccagacgaagcataaccgcccttcccgttttttggaggagatcgacgcctctctggtggaggtggagcaaagcccggctgccgcgcagacgaaggccatgcgtcagcgttatatgcagcagcaaaatgcatatttgcagccggaatatggcgcggcaagcatgcgctccacggtacaggcgggatattcggcccgttacggcggggcttcccacggctctggggcgagcggcgcttcacgccctgcccggcagcgcgcttctgtgggaggcggtttttccacggttcaggcgggcagcgcggcctccgttccgcgaacggagggcagcggagcctatcgtccgggagacctggtggagcataaagttttcggccgcggcgaggtgctgaaggtaacgcccgtggcgggagataccatcgttgaaattcgttttgatacggccggcgtaaaaaagacgatggcgaattatgcgccgctgaaacatatttctgagtaa

SEQ ID NO: 482 - DNA, 2778 bp, Subdoligranulum sp. 4_3_54A2FAA
atgccggatatgagcgagacacatttccccctggacgagagcaaactgcccttttccattccaaaggacgcgcagccccgggagaaaattttaaaactggggcgtatgatcacagaccgcattcccgccaagctgcacggcctgacggcggaagacccggaatactggggcctggcgggcgtggtgacggatgaaatggcggatgtcgccctgaagatgaaggtgcgcaagcccatgacgctgtccgagcttgtaaaagccacgggcaagcccgccgaagagctggaaccgctgctgtaccagatgagttgcgtgggcctgctggagtacaactgggaaaacgaacggcatgaaaagcagtacgttctgccgatgttcgtacccggcagcgcggaatttttcaatatgcacaagcagcagatccaggacaatcccgaggtgacggctttttttgagcgcatgaccttcctgcccctggagcacatcaccgccatggttccgccgggcggcgcgggcatcgggatgcacgtcatccccgtggaaaaagctattgaaacagagaaccggtccgccgatatcgagcacatttcccactggctgaaaaaatacgaaggcaaatacgcggccagcccgtgctcctgccgcatgtcccgcgcccgcatgggcgagggctgtgccgacgacccggaggactggtgcatcggcgtgggcgatatggccgattatctggtggagaccaaaaagggccattatgttacttacgacgaggtgctggagatcctgcggcgcgccgaggacaacgggtttgtgcaccagatcaccaacattgacggcgagaacaaaatttttgccatctgcaactgcaacgtcaacatctgcaacgccctgcgcaccagccagctgttcaacacgcccaatatgagccgttcggcctatgtggcgaaggtgaaaaccgaaaactgcgttgcctgcggccgctgtgtggaatactgccccgcgggcgccgtcaagctggggcaaaagctgtgcacccaaaacggcccggtggaatatccccggcaggagctgcccgacgccgtgaagtggggcccggaaaaatgggacgtcgattaccgcgacaacaaccgcatcaattgctacgacgccggcacggccccctgcaaaacggcctgccccgcgcacatcgccgtgcagggctacctgaaaatggccgcgcaaggccgctacaccgacgcgctggcgcttataaaaaaagagaatcccttccccgccgtatgcggccgcgtgtgcaaccgccgctgtgaggacgcctgcacccgcggcaccgtggatcaggccgtcgccatcgacgaggtaaagaaatttattgcccagcaggacctgaacgccgccacgcggtatgtgccgccggtggtcgcacccacgaaccggggcggcttcgcggaaaagatcgccgtcatcggcgccggcccggccggcctctcctgtgcatattatctggccgagcgcggctataagcccacggtatttgagaaaaacgagcgtcccggcggcatgctggtatacggcatcccctcctacaagctggaaaaggacgtcgtggacgcggagatcgaggtgctgcgccagatgggcgtggacatccgctgcggcgtggaagtggggcgcgacataacgctggacacgctgcgccgggagggctataaggctttctacgtggccattggctgccaggacggccgcagcgcgggcattcccggcgaggacaccgcgggcgtgatgaccgccgtggacttcctgcacgccgtcgcggaaaacgaaacgtaccccgtggagggccgggccgttgtcatcggcggcgggaacgtggccatcgacgtggcccgcaccagcgtccgctgcggcgctgcagaagtttccatgtactgcctggagccgcgggaaagcatgcccgcctccgccgaggaagcagcagaggccgaagatgagggcgtggccatccgctgcggctggggcccgaaggagattcttgcggaagccggccgggtgaccggcatcgttctgaaacgatgcgtttccgtgtttgatgaaaacggccgcttctgccccagatatgacgaggccgataccattaccgttccctgtgaacatgtgtttctgagcattggccagagcatccggtggggcagcctgctggacggcgcaaaagtagagctgggacgcggcggcgccgccgtggcggacccgctcacctaccaaacggcgcagccggacatatttgtaggcggcgatgtgtacaccggccccaaattcgccatcgacgccattgccgccggcaagcagggcgcggaatcgctgcaccgctttgtacacgaaaacgccagtctgaccatcggccgtaaccgccgccagttcaaggagctggacaaggaaagccttgcgctggagagctacgacaacggtgcacgccagagcgcgggcatggacgagcgcatcgactaccgccgttccttccgggacgcgcacaagacctttaccgaggagcaggtgaaggccgaaaccgcgcgctgcctgggctgcggcgcttcggtggtggaccccaacaagtgcatcggctgcgggctttgcaccaccaagtgcgagttcgacgccatccatctgaaccgggagcttcccgaatgcagcaggatggtgcgttcggaggataaattcaaggctattctgccttatatgatcaagcgtgaaatgaagatccgcttcggcaaaaaggacggctga

SEQ ID NO: 483 - DNA, 2607 bp, Subdoligranulum sp. 4_3_54A2FAA
atggcagcgctttcccccatgatgcagcagtatttcgacatcaaaaaacagcatcccgacaagatattgtttttccgtcttggggatttttacgagatgttttacgacgacgccattcttgcgtcaaaggagctggagctcaccctgacgggccgggactgcggccaggaggagcgcgcgcccatgtgcggtgtgccgttccattcctatgaaaactatgtggcaaggctcattgccaaaggttataaggtcgccatctgtgaacagatggaggaccccgctctggcgaaaggcctcgtcaagcgggatatcatccgtgtggtgacacccggcactgtgatcgaaagcagtatgctgcaggatgataaaaacaactacatcgccagcatctatatcacggagaaaaaagcgggcgtatgctttgcagacgtctccacaggcacggctcacgccacggtgctcacgggcgaaaagctggggccggagatcatctccgaattgtgccgctattctcccagcgaggtgctgttcaacgcagctattctggactacaaggaagtaacggcgtatatcaagcagcagcttgcctgcagtgtggagctgctggatgaagcggccttcgcgcccgacgcctgcatggaagagatgcgcgcccagtttggggatgccccggaaaaaacggccggccttgcgccggaaagtccggcgttcacggccctggccgtgctgctgggatacttaaaggaaacacagaaaaagggcgtggagcggttaaagaccgtacacaattacgccgaagcgcagtatatgcagctttcgcccgtcacgcgcgccaacctggagctgacggaaacgatgcgcgggcgcgagaaaaaaggtacgctgctgtgggtgctggataaaacgcagacggctatgggcaagcggctgatgcgcgcgtggatcgagcagcctctggtgaacgtggcggccatcaatgcgcgtctggacggcgtggaggagctggtgggcgattccgtagcccgcgccgatatcgcggccgcgctctcaaagatatttgacatcgagcgcctgatgacgcgcacggtgtacggttcggcctctccgcgggaaatctacgcgcttgccgccacctgtgagcagctgccccgcttgaaggcgctggcccggcccttcggcagcgccgagatcaccgcgctgctggctgatatcgacgaattgtccgatatcaaggagctgatcttcgcagcggtcgacgagaatgcgcctgccatgctcaaggacggaggcgtcattcgcccgggctacaacaccgaggtggacgagctgcgggacatcgtccacggcggcaaaggttaccttgccacgctggaggcaaagctcaaggaggaaacgggcatccgcacgctgaagatcggctacaaccgggtgttcggttattacatcgaagtgagccgttccttttcgaaccaggtgcctgcaaattttgtccgcaagcagacgctggccaacgcggagcggtacatcaccgaggacctgaaggtactggagaacaagatcctgggcgcaaacgagcgtctggctgtcctggaacgccagctctttgacgatctgctgcataaaatttcggccgaactgccgcgtatccagaaaaccgcgtccggcgtggcccgtctggacgtactgacggctctggcggaggtggctgtgaaaaacggctatacaaagccggttgtggatgaaggcgacgagctcatcatcgaggagggccgccatcctgtcatcgagcagatgctcaagggtgcgctgttcgtgcccaacgacactgtgctggactgcggcgataaccgtatgctcatcatcaccggcccgaatatggccggcaaatccacctatatgcgccagacggcgctcattgcgctgatggcgcagatcggcagcttcgtgccggcccgggcgtgccgcatgggcgttgtggatgctattttcacccgcgtgggcgcttcagacgatttggctgcggggcaatccacctttatggtggagatgaccgaggtggccgaaatcctccagtacgcaacggcaaaaagccttgtgattttagatgaaatcggccgggggacttccacgttcgacggcatgagcatcgcccgcgccgtagtggaacacattgcggacaaggatggcggcatgggctgcaaaacgctgtttgccacccattatcacgagctgacggatttggaaaacgccattgacggcgtgaagaattataacatcgctgtaaaaaagcgcggcgacgacattacgtttctgcggcgcatcgtgcgcggcccggcggacgacagctacggcattgaggttgcaaagctggcgggtctgcccggcgaggtgacaaagcgcgcgaaggaagtgctcaaggtgctggaggccaccgcgcccaacgccgataaggtgacgcagctggacttcggcaattttgaaaaattcgcggcagcgcccgtgcccagcgagctggtggacaagctgacagcggtggatgtggaaacgctcacgccgctggaagcgttgaattttttgtatgaactgaaacagacactggtaaaataa

SEQ ID NO: 484 - DNA, 2745 bp, Subdoligranulum sp. 4_3_54A2FAA
atgcaggacaaaaggccggaccccgaccggattttgcatcagatccagcagcaggaggccgatgcggcgcatgtgcgcggcagactgaagatattcttcggctatgctgcgggcgtgggaaaaacctacgccatgctggaagccgcacacgcggcactcgcggcgggaaccgacgttgtggccggatacatcgagcctcacacgcgtccggatacgctcgccctgctggagggactggaacagctgcctccgctgtgcgtggaatacaaaaacgtgacgctgcgcgaatttgacctggacgctgccatcgcacgccgccctgcccttcttcttgtggacgagcttgcccataccaacgcggagggctgccggcaccgaaagcgctgccaggatatcgaagaattgctggcgcttggcattgatgtgtacaccaccgtgaatgttcagcatttggaaagcctgaacgacattgtagccgctgttacaggcattacagtgcgcgaacgcgtgccggacagtgtgttcgataatgccgatcaggtggagctggtggacatcgaacccgatgaccttctggccaggctggacaggggaaaagtttaccgtccgcttcaggcccgccgcgccatggaccattttttcaccagagagaaccttgtggcgctgcgggagattgctctgcgccgcacggccgaccgtgtgaaccgccgcgcggaaaaaggcaaggatgccagcgccggctattataccggcgaacatatcctcatctgtctgtcatcctctccctccaatgcccgtgtcatccgcacagcggcgcgcctttccgatgcatttcacggccgtttcaccgccctgtttgttgaggttcccggcacccgggagctgaatggcgagagcctcgcccgcctgcgcggcaacctgcgcctggccgaacagctcggcgcacgcatcgccacggtttacggcgaggacgtcgccgcgcaaattgccgaatacgcacgcgccagcggcgtttccaaaatcgtcattggacgttccaacaacagacgcggcattctgccgcggcccacgctggtggagcaattgacggcgctggcccccaatgtggatgtgtacatcattccggataatctgccgccctaccgcagacaccgccgcgcgccgcccgagcggctgacgccggcagatacgttcaagacgctcggcctgcttggcctttccaccgcggtggcactcggcttcgccgcaattggcctcagcgaggccaatgtcattacggtgttcattcttggggtactgtttgtttccgtttgccccggcagccgtatttacggtgccgctgcttcatttttcagcgtgcttctgttcaacttctttttcaccgtgccgcgcttcacgctccagttcaacgatcccggctatgccgtcaccttcgcgatcatgttcgccgcatcattcatcaccagcaccctgacggtgcgcgcccagcgccaggcgcggcaatcctccctaaaggcctaccgcaccgaggtcctgctggagaccagccagaagctgcagcaaagcgaaacacaggatgacatcatccgccaaatggcccggcagatgcagcgccttttggggcgcaccatctgcctgtacctggccgacggaaagacgctgggccgcccaaccgtctttcccgccccggacgccggcacggataccgctccctatatcacacccggcgaacaggccgtggcggagtgggtattccgcaacaacaagcacgccggcgccggcacggacacattgcccggcgcgaagtgcctctatcttgccgtgcgcagccaggacacggtgttcgcggtggcgggtatcgccatggacctcggaggcccgctcgacgtttacgaccgcaatctgcttttggcgatgctgaatgaatttgctcttgctctggagcgccagcaggctgccgaggcccgtaaccggctgttcatccaggcccgccaggagcagctgcgcgccaatctgctgcgcgctgtttcccacgatctgcgcaccccgctcaccagtatttccggcaacgccagcatcctgatgggcggcccggagctgttggacgagaagaaaaaacagcagctctataccgatatctatgacgacgccatgtggctcatcagccttgtggaaaatcttctcaccgtaacgcgcatcgaaaacggtaccatgcagctcacactggagccggagctcatcgacgaagtagcccaggaggcgctgcgccacttaaaccgccgcagcgcggagcacaccgtcacgctcgctgtccccgacgatcttctgatggccaaaatggacccgcagctcatcgtccaggtgctcatcaatctaacggacaacgccataaaatatacgcctgcgggcagcagcattgcagtgagcgcacagcgcagcggagaaacggttcgcgtggaggtcgctgacgacggccccggcatcccggacgcagccaaagaaaagctgtttgaaatgttttacaccgcacaggcaaagcgcggcgacggacggcgcgggctcggcctcgggctttccctgtgccgttccatcgtggaagcccacggcggccagatcggcgtgcgtgacaacaacccccacggcactgtattctggttcacgctgcctgcatcagacactccttccgccccgccgcaaaacggaccggctgtaatgcaaaaatgtgttttttccgatttcgcttga

SEQ ID NO: 485 - DNA, 2088 bp, Subdoligranulum sp. 4_3_54A2FAA
atggcagcgacgactacggaaattttcggcagcatggtattcaacgaccacgtgatgaaagagcgcctgccgagcgcgacttataaatctttgcatgagacgatccggcgcggtgcgccgctggacgtggaagtagccaacgtggtggccaacgccatgaaggactgggccattgagcacggcgccacgcactatacccactggttccagccgctgacgggcgtgaccagtgaaaagcacgacagcttcatcagccccaccaaagacggccgcgttattatggagttttccggcaaggagcttgtgaagggcgagccggacgcgtccagcttcccttccggcggcctgcgcgctacggccgaggcccgcggctacaccgcctgggaccccacctcctacgcctttgtcaaggacgaggtgctgtgcatccccaccgcgttctgcagctattccggcgaggtgctggacgaaaagacgccgctgctgcgcagcatgtccgccatcagcacgcaggcctgccgcatcttaaagctgttcggcaaaacggtgcctcaggtctccaccaccgtagggccggagcaggagtatttccttgtggacagggagcagtacctccagcgcgaggatctgcgcctgtgcggccgcacactgttcggcgcgatgccccccaaggggcaggagctggacgaccactacttcggtgtcatcaagccccgtgtttcaggctatatgaaggagctggacgacgaactgtggaagctgggcgtcgcagccaaaacgaagcacaatgaggtggcccccgcccagcatgagctggcgcccattttctcgaccaccaatatcgccgtggatcacaatcagctcactatggagatgatgaagcgcgttgccacacgccacggcatggcctgcttattgcatgaaaagcccttcgacggcgtgaacggcagcggcaagcacaacaactggagcatctccacacccacggaaaatctgctggacccaggcaaaacgcccatggaaaacctgcagttcctgctgttcctcgcggccgtaatcaaggctgtggaccagtatcaggacctgctccgtgtgaccgtcgcctccgcgggcaacgaccatcgtctgggcgccaatgaagcgccgccggccatcatctctatttttgtgggcgaggagctggaagccatcattgaatccatcgcctccggcgcggactacattgccccggccaaaacgcgcatggagctgggtgtggatatcctgcccacgttctccaaggatacgaccgaccgcaaccgcacctctccgttcgcgttcaccggcaataaattcgaattccgcatgccgggaagcgccatgagcatcgctgacgcaaacatcgtgctgaacaccgcagttgccaaagagctgaaaggctatgccgacgagctggagaatgcggaggatttcgacaccgccgttatcaaactggtgaagcgcaccatccgcgaccacaagcgcatcatcttcaacggcaacggttacagccatgaatgggaacaagaggcggaaaagcgcggcctgtgcaacctgaaatccaccgtagacgcgctgccctgtgtgttggaacgaaaaaatatcgaactgtttgaggaattcggcattttcagcgaggctgaggtgcgcgcccgttatgaagtgagcctggaaaactacaccaaagcgctgcacattgaagcgctgaccatgctggatatggccaaaaaacagatcgtcccggcggtagccgcctacatgggcgaccttgccgataccgcctgcagcaaaaaggcactgtcctctgccctttccacccgcgctgaggaaacgctgctggccaagctctcagccggggccgacatgctggtggaaaaaatcgacgagctgcaggccgccgtggacggcgcttcccgcggcgacagcctgcaggaggccgcctgctacaaagacagggtgctgccgaagatggccgagctgcgcgcggtggctgatgcgctggagcttgccacggggaaagactactggcccttccccacttacgcagatcttctgttcggcgtaaactga

SEQ ID NO: 486 - DNA, 2052 bp, Subdoligranulum sp. 4_3_54A2FAA
atgagtaagaaccgcaagcaaaagatgatcacaccggagatcatgcggcaggccgtggtcggggcgtttacaaagctggacccgcgctatatgatgaaaaatccggtgatgttcgttgtggagatcgggtttgtgatctcgctggtgctctccttcgcgcccggcctgctgggagacacgacgccgaacgcgcgcgtttacaacagtattgtgtcggccattctgttcgttacggtgctgtttgcaaactttgccgaatcagtggcggaggggcgcggaaaagcgcaggccgccagcctgaagaaaacaaaaaaagacacacaggcgcgcctgcttgatgcagacggaggcgaaaggatggtgccgtccagcgaactgaagaagggcgatgtggtgatggtggccgcgggcggggtcatcccgggcgacggcgaggtcatcgagggcatcgcctcggtggatgaatccgccatcaccggcgaatccgcaccggtggtgcgcgaggcaggcggcgatttcagctctgtaaccggcggcaccacggtggtgtccgactggctgaaggtgcgcatcacgtccgacccaggcgacagctttctggaccgcatgatcgctctggtggagggcgcttcccgcaaaaaaacgcccaatgagatcgcgctgaacacactgctggtgtcgctcaccgttatttttctgatcgtcatcgtcacactgtatcccatcgccctgtattccggcgtgcagctccagacttccacactgatcgccctgatggtctgcctgatcccgaccaccatcggcggcctgctgtccgccatcggaatcgccgggatggaccgcgtgacgcgctttaacgtcatcgccatgtccggcaaagccgtggaggcatgcggcgacgtggacacgatgattttggataagaccggaacgattacctacggcaaccgccttgcggcggactttttccccgtgggcggcgcgtgccgggaggagctggtgcgctgtgccgcgctgacgagcctgcacgacggcacgccggagggtaagtccacactggctctggcccgccttcagggggaggactgcggggagccgcagggcgcgcgcttcattgcgtttaccgctcagacacgcatgagcggtgtggacctgcccggcggccggagcgtacgcaagggggcgtccgatgccattgagaaatacgtttccgaaatgggcggcaaggtgccggaggaccttgcccggcgcgttgccgaggtgtccgctctgggcggcacaccgctggctgtctgcgaggacagccggattttgggcgtcatttatttaaaggacacggtaaaggcaggcatggccgagcgttttaagcgcctgcgtgccatcggcatcaaaaccattatgtgcacgggcgacaacccgcttaccgccgccacgatcgccaaggaggcaggcgtggacggcttcattgccgagtgcaagcccgaagacaagatcgcattgatcaaaaaagaacaggccgagggcaagatcgttgccatgacgggcgacggcaccaacgacgcgcccgctctggcgcaggcaaacgtaggccttgcgatgaacagcggtaccgccgccgccaaagaggccgcaaatatggtggacctggacagcgaccccacgaaaattttggaggtggtggagatcggcaagcagctgcttattacccgcggcagccttacgactttttccatcgccaacgacatcgcaaaatacttcgcaatcatccccgctatgtttatgatggcgatcccgcagctgggtgtgctcaacatcatggacctggcaacgccgcacagcgccattctttccgcgctcattttcaatgccatcatcattccatgcctgataccgttggcgctcaggggcgtaaagtaccgccccatgtcatccggcaggatgcttgcccggaatatgatgctttacggcctgggcggtgtgatcgctcccttcgcaggcatcaagctcatagatatgctcatccatccgcttttggcgctttggggcttttaa

SEQ ID NO: 487 - DNA, 2763 bp, Subdoligranulum sp. 4_3_54A2FAA
gtgaaaaatttgtctttttttgaaaaactgttcggctccttttccacgaaggagctcaagaagatacagcccatcgcggacagggtgctggcgctggaggcccggtaccaggccatgaccgaccgcgagctgcaggcgatgacgcccgcgctccgggagcgtctggcagggggcgaaacgctggacgacattctgcccgacgcctttgccgtatgccgcgaggcaagctggcgcgtgctgggcatgaaacactttcccgtacaggtggtgggcggcatcgtgctgcaccgcgcctgcatcgccgagatgaaaaccggcgagggcaaaacgcttgtcgccacgctgcccgtatatctgaacgcgctcaccggcaagggcgtgcacgtcgtcaccgtgaacgattacctggccaaacgcgacagcgagtggatgggaaagctgtataaatttctgggtctttcggtggggctcatcatccacggcgtcacaggcgaggaacgccgcgccgcctacaatgccgacattacctacggcaccaacaatgaattcggcttcgattacctgcgcgacaacatggtcacctacaaagagcagatggtgcagcgcgggcattattacgccatcgtggacgaggtggactccatcctcatcgacgaagcacgcacgccgctcatcatcagcggcgagggcgataaaagcaccgatctgtacaagctggccgataattttgccaagggcctgaaggccaccgtcgtggccgagctggacgacaaagaggaccaggacgagcaggtggacggcgattatgttgtggacgagaaaaaaaagacggccacgcttaccgccagcggcattgccaaggctgaaaagtacttcaatgttgaaaatctggccgacggagcgaacatgacgctgcagcatcacatcaaccaggccatcaaggcgcggggcgtgatgaagcgggacgtggattatgtggtgcgcgacggcgaggtcatcatcgtggacgaattcaccggccgtctgatgctgggccgccgctacaatgaggggctgcaccaggccatcgaggccaaggagggcgtcaccgtcgcccgcgagagccgcacgctggccaccatcacgttccagaactatttccgcatgtacgaaaagctctccggcatgacgggcaccgcacagacggaggccgccgagtttgaggagatctacggcctgcaggtggtggaggtgcccacgaacaagcccgtggcccgcaccgactacaacgacgtggtgtacaaaaccgaaccggccaagttcaacgccgttatcgagcagatcatcgagtgccatgaaaagggccagcccgtgctggtgggcaccatttccattgaaaagagcgagctgctgagcaagctgctgagccgccgcggcgtgaagcacgaggttctgaacgccaagcaccacgaaaaggaagccgagatcgtagcgcaggcgggcaaaaagggcgcggtcaccatcgccacaaatatggccggccgcggcaccgacatcatgctgggcggcaacgccgagcacatggccaaagccgacctgcgcagggagggcttctccgaggaactgatcgtggagagcaccggccacgccgataccaccgacccggaaattttaaaggtgcgcgcgcgctatgccgatctggaggccgcgcacaaaaaagtcatcgcggaagaagccgccgaggtgtgcgccgcgggcggcctgttcatcatcggcacggaacgccacgagagccgccgcatcgacaaccagctgcgcggccgtgccggccgccagggcgaccccggcgccagccgcttcttcatcagcttggaggacgacctcatgcgcctgttcggcggcgagcgcgtcagcaccatcatggattccctaggcgtcgaggaagacatgcccattgagaacaagatgatctccggcaccatcgagaacgcccagaaaaagctggaggcccgcaacttctccatccgcaaaaacgtgctgcagttcgacgacgtgatgaacagccagcgcgagatcatctacggccagcgcggcaaggtactgcgcggcgaggatgtatccgaaaatgttcacaccatgatccacgagtccattgcggccaatgcccagctgtttctggcgggcgaagttgccgacgactgggatttcgacggcctgcgcagccactaccgcggctggctggccaaggacggcgatttccgctacacgcccgaagctctgggcgagctgaagcaggaggacgttgtgaaggtcctgacggaccgggccgacgccatctgcgcggacaaggaaaaacgctacggctcgcctttgatgcgcgagtttgaacgcgtcgtgctgctgcgcaccgtggacaccaagtggatggagcacatcgacgccatggaggagctgcgcaagggcatctatctgcgcagctacggccagcgcgaccctgtggtggaataccgtatcgagggcttcaacatgttcgacgaaatggtggcgtccatccgcgaggacacctcccgcatgctgctcaccatggagctgcgcaccgagcagcctctccagcgcgaacaggtggcaaagcccacgggtgaatccggcgcggacgacggcagcgtgaaaaagcagccggccaagaagatcgccaagccgggacgcaatgacccctgtccctgcggcagcggcaaaaagtttaaaaaatgtacctgtgagcagtataaagacctgcgctcgtga

SEQ ID NO: 488 - DNA, 2655 bp, Subdoligranulum sp. 4_3_54A2FAA
gtgttgaagttttattgtgaggaggccggccgggcgcttgccgaactgaagagcaccccggacggccttaccgacgcggaagccgccaggcggctggccgaaaaaggccccaacaagctggccgaaggaaaaaaggtcacaacgctgcagcgctttctgcagcagctgagcgaccctatgatcattatcctgcttgttgcggcggcagtgtccggtgtaacggcggcttattcgggcgaaagctttgcggatgtgttcatcatccttatcgtcgtgctcatcaacgccgtactcggcgtgtatcaggagagcaaggcggaaaaagccattgaggcgctgcaggaaatgacggccgccaccagtaaggtgatccgcggcggcaaacaggtctcgctgaaaagcgaggagctggtgccgggcgacgttgtcgttctggaagccggcgacgccgtgcccgcagacggccgcattctggagagcgccagcctgaagatcgaggaagccgcgctcacgggcgaaagcgtacccgtgaacaaagtcgtttccgcactgggcctcgacgacggcaaggacgtccccctgggcgaccgcaaaaacatggcctatatgggcagcaccgtagtatacggccgcggacgtgtcctcatcacgggcaccggtatggacaccgagatgggcaagatcgcaggcgcgctggcgcaggccgaagagggacagactccgctgcagaaaaagctggcgcagctcagtaagatcctgagctggctggtgctcggcatctgcgtattcatcttcgccttcagccttatcaaggcgggcgatttccacctcgacgtcatcatcagtacgttcatggtagcggtcagtcttgccgtcgcggccatccccgagggccttgccaccgtcgttaccatcgtactctccatcggcgtaacgaacatgtccaagcgcaatgccgtcatccgccgccttacggctgtggagacgctgggctgcgcacaggtcatctgctcggacaagaccggtacgctgacgcagaacaagatgacggttgtggagcacgtgggtgaagaagagcccctggcccgcgcgatgtctttgtgcagcgacgccaagcccggcgaaaacggcgacgctgagggcgagcccaccgaatgcgcgctggtaaattacgccaccggcgtcggcctgcctaagggcacgctggaggcggcccagccccgtgtgggcgaggctccttttgacagcggccgcaaaatgatgagcaccgtgcacgaaaacaacggcgcatatatccaatacacaaagggcgcgcccgacgtggtgctcagccgctgtacctcttacgccaaggatggtaagatactgcccatgacggaggaagcccgcgccgagatcctgcgccagaacaagcagatggccgacaaagcgctgcgcgtgctgtgcgcggccagccgcgaatggccccagcttccgccggatttcgagccggacacgctggagcaggacctgaccttcctgggcctgacgggcatgatcgacccgatccgccccgaggtaaaggacgccattacagagtgccgccaagccggcatccgtcccatcatgatcacaggcgaccacaaggataccgccatcgccatcgccaagcagctcggcatcatcgaaacagcggatgaagccatcacaggcgcggagctgaacgacatctccgacgaccggtttgcggaagtgattggccgttacagcgtgtatgcccgcgtgcagcccgagcacaaggtgcgcatcgtcaacgcatggcgcaaaaacggctttgtcacagccatgacgggcgacggcgtcaacgacgcgcccagcatcaagagcgcggatatcggcatcggcatgggcatcaccggcacggacgttacaaagaacgtggccgatatggtgctggccgacgacaacttcgccacaatcgtcaacgccgtggaggaagggcgccgcatttacgacaacatccgcaaggccatccagttcctgctgggctccaatatgagcgaggtgctgagcgtgttctttgccacgctcatgggctttgttatcctggagcccgtacacctgctgtggatcaatctcatcaccgactgcttccccgctctggccctgggccttgaaaagggcgagccggatttgatgcaccgcaagccgcgcccgtccacagacggtatcttctccggcgggctgggcgtagacgtggcgtatcagggctttatggtcacctgcgtaacgctggccgcctactttatcggccactggatggaatccggcgtatgggagatcgccgccagccccgacggtgtgacgatggcctttctcaccatgagcatggccgagatcttccacagcttcaacatgcgcagccagcgcggcagcgtgttcacgctcggctctcacaacaaggtgctgtggggcgccatgctgctcagccttgtgctgacgaccggcgtcatctacctgcccggcatttcggacgcgttcggctttacgcacatcagcgcgccggaatatgctgttgccatggctctggccgtgtgtgtgatccccattgtggaatgcgtcaagttcttccagcgtaaggctgcacgccgccgcgcggaaaaacagcctgcgtaa

SEQ ID NO: 489 - DNA, 2544 bp, Subdoligranulum sp. 4_3_54A2FAA
atggacagcagcttggcaaaaaagaatactacgcggtttctgatatacagcttcgtcggccttcttgtcttcagcatgggtgtttttgccatgctgggtgtctatatgagccggaaaagcacaaagaccatccatgaagtcggcgagatctatatgtccgggatgagcgaacagatggcccggcattttgagaacatcatcgaactgcggtttgagcaggtcgaaggcatcgtgtccgtggtcccgtcgaagagcgccgacaaggaagccatgtatgcagatctcgtatacagggcgcaggtgcgcggtttcgaatatctggctctctgtacctcagacggcagatttgaaacgctctgcggggaagcattccagccggtcaacccgccgcccttcgtggacgcgttaaggcggggcgagcagcgggtcgccgttggcgtggacgccgccggcaacgaagttgtgctgttcgggatcgacgcggattatccgatgcaggacggcgaagcctgcaccggtttggtcgcggcggtgcccctggaatatatcagcgattttcttttttcagaaaatcaggatgctctgatctattgccatatcatccgcccggacggcagccttgtgatcgccaactccaatacggagctggttggatatttcagcgcgctgcctgcctcttccgcggcaggcggtccgcttgaggggcttgacgcggcgctggaagaacagaaggattacaccgtaacgctcgacacgggcggaaacaacctgcagatctacggcaagcctttgccgcactccgagtggtacctcatctcggtgatgccttacggcatgttggacgaaagcatcaacgacctgagcgcgcagcgcaccttcatcactttgcttgcctgcggctccatcctgcttttcctgacgctgatctttctgcggtactttttcctgacccgccagcagctgcaggagctgggaaaggcccgccaggcggcgcttgaggcaagcaaggccaaaagcgaatttctggccaatatgagccatgatatccgcacgccgatgaacgcaatcgtgggcatgactgccatcgcaacggcgcatatagacgaccgtaagcaggtgcagaactgtttgcgcaaaatctcgctgtcgagccggcatttgcttgggctcatcaacgatgtgctggacatgtccaaaatcgagagcggaaagctgaccctgacgctggaagcaatctcgttgaaagaagttgttgaaggcgttgtcggcatcatacagccgcagatcaaaaccaaaaagcaaagctttgacgtccatatagaaaatatcacggtggaaaacgtatattgcgacagcgtccgcctgaaccaggttttgctgaaccttttgtccaatgccaccaaatatacgcccgagggtggctccattcagctttctctctttgaagaggcgtccccgcgcggcgaaaattttgtccggacgcaccttaaagtgaaagacaacgggatcggcatgtccccggaatttttgcaaaggatatacgaatcttacagccgtgcggatgaagccagaatccacaagaccgaaggcgccggccttggaatggcgatcacaaaatacatcgtggatgcgatgggcgggaccatcgacattcagagtgaactgaataagggcactgaattccacatcacaatcgaccttgaaaaggccgcccttccggaagccggcatggtgcttcctccctggaacatgctggtagtcgacgacgacgcggtattatgccagaccgccgtcagcgcattaaagtcgatcggagtaaatgccgaatcaacgctgagcggagaaagcgcgatgaaacggatcgttcagcgccaccggcagcacaatgactatcagatcattcttttggactggaagcttccggatatggacggcctccagatcgccagggagatacggcgcagctttgggagcgaaatcccgattctgttgatctccgcctacgattggaccgaatttgaggaagaggcgcgtgaggccggcatcagcggttttatttccaagccgctgttcaaatccactttgttttatggcctgcgccagtatatgggccttgaagccacgcatcagcctgcatccagccacggcgccggcctctccggcagccgtgtcctgctcgcagaggacaatgagctgaattgggagattgcaagcgaactgctgtccgatctgggtgtggagctggaatgggcggaagacggacagatctgtctggacaaattccgggaatcgccggagggttattatgattttatcctgatggatctccggatgccgcacatgacaggctatgaggctgcacaggcgattcgcgggctgaaccgcgcggattcggcgtcggtccccatcatcgccatgacggcggacgcctttgccgaggacattcagcgttgtctggaatgcggcatgaacgcgcatatcgcaaagcccatcgacgtggctgaattgacccgtctgctgaaaaagcattcgcgcaaagtataa

SEQ ID NO: 490 - DNA, 1929 bp, Subdoligranulum sp. 4_3_54A2FAA
atgtcagaacagcaacatccgcagcatgaatacgacggcagccagatccaggtgctggagggcctcgaggccgtccgcaagcgcccgggcatgtatatcggctccaccgggccgcgcggcctgcaccatctggtgtacgaaatcgtggacaacgccatcgacgaggcgctcgccggcttctgcgaccatatcgaggtcaatatccgggagggcaatatcatccgcgtaacggacaacggccgcggcatccctgtggatatccagccgaaattgggcatcccggctgttaccgtggtattcaccatcctgcacgcgggcggcaaatttggcggtgacaattccgggtacaaggtcgccggcggtctgcacggcgtgggcgccagcgtcgttaacgcgctgagcgaatggctcaatgtcgtggtgcgcaaggacggcgtggcatacaaacagagttttaagcgcggtgtggctgacgccgacctgcagaatctgggccccacggacgaaccggacggaacgacggtcacgttcaagccggaccctgagatgttcgaggtgctggactacgattatgacactctgaacacacgcctgcgcgaagaggcgttcttgaatgccggcgtgcgcatcacgctgacggacgagcgcgccgggcaggaaaagcaggagagcatgtgctacgagggcggcatccgcagctttgtggaccacatccaccaaaagcggcagcttgaggtgctgcacccggacgtaatatatctgaaggggcagcttaacgactccatcgccgaagtggcgcttcagtataacaacagctacaacgagctgatcctttcctttgcaaacaatgtaaacactccggacggcggtacccatgaggagggctttaaatccgcgctcacccgtgtgttcaacgatttcggccgtgaaaagggttatatcaaggagaaggacgacaacctttccggctcggacgtgcgcgaaggcctgacagccgtcatcagcgtgaagctgacggaggcgcagttcgaaggacagacaaaggcgaagctgggcaataccgagataaggggccttgtctccggcatcgtgtacgacaagctgaaggaattttttgaagaaaatccggcggtggcaaaggccatttatgaaaaagccatgcaggccgcccgtgcccgcgaggccgccaaaaaagcgcgcgagctggtgcgccgcaagtctgcgctggaaaacagccgtatgcccggcaagctggcggactgccgtgagaaggaccccacgaaaacagaaatctacatcgtggagggcgattccgccggcggcagcgccaagatggggcgcgattccaaaatacaggctatccttccgctgtggggcaagatgctcaacgtggaaaaggcgcgcattgacaaaatttacggcaacgacaagcttactcctgttgtgacggcgctgggctgcggcctgggcgaggagttcgacgtctccaagctgcgctaccacaaggtattcatcatggccgatgccgacgtggacggcagccatatctgtacgctgctgctcacgttcttcttccggtatatgcgtccgctcattgaaggaggttatgtgtatatcgcacagccgccgctgttcaagctgcagaagggcaagcaggtacgctacgcgtacaacgagcctgaaatgagccagatctccgccgagatgggccagggcaccaaggtgagccgttacaaaggccttggcgaaatgaatcctgagcagctttgggagaccacgatggacccggagcaccgtgtgatcgtgcagatcaccatcgaggacgcgatggccgccgacgaggcgttcacaatcctgatgggcgacaaggtggagccgcgcaaagagttcattgaaaggaacgcccagtacgcgaatctggatgtctga

SEQ ID NO: 491 - DNA, 2043 bp, Subdoligranulum sp. 4_3_54A2FAA
ttgatcgcttttgttgaaatgaccgttaccttcgcggcgctcacggcgctgtgcctgttcctcaacacaaaaacgcgtctggccgcgggccttacgccgctgtttgttttgtgcggcacgatggtctggtacagcacgctgggcagcgtgcatatgctggtgcctgcgggcattgtctggtttggcgcggcggcggccgcgtgcgtctggctgtggcgcaagcacaaggacatccgctggcgggagtttttttcgcccgccatggtatatttcctgctggcgtcgctggccgttatcgtgctgtttgccgtgcgccggcctatttttaacgagtgggacgagttcagcttctggggcatcgcgcccaaggtcgtcaagaccgagaatcagctgtatacctataacccgggtgagatgcgcgtgagcacctttgtgccgggcatcatcatgctggattatgcgttccagttcctgggcagcgtatttgtgccctggaaggtgtacgcggcgtacgacattttgttttttgcagtattcgcggccgccatttccatgctgggccgcaggcactggcacattgccgtacccgccgccgcggtgcttactctggtgccatacatggtttccgtgtatcagcgcggcatctatgtgcagacgacgtatatgaacgcctattccgacattcccatgggcctgctgttcggcgcggggctggtgctgtattttgcgccgcgaaaaaaaacacccatactgatgacgggcgcggtgctggccgttacggcgtcctgcctttccaaggacatgggcttcgcgctgtgccttattgcggccgccatcatctgctttgacctgctgttcgtccagaaggaggacgtgccgttcttccggctgaagggccttggcggaaagctgtgctggtgcgcctcgcttgtgggcgccccgctggccgcgttcttcggctgggccgcgcacatgagcgttgtgctgggctccaaccggttcgacatcggcggctcggccgatatgggcatggtacagatggtgacgacgggcattgccgagctgctgggcatcggccgcacccagaaatttaccgatatcatggagctgatgaaaagcgcgtttttcaacacacggctcacgatgttcagcgttggcgcgccggacagcacgctggggcgtattttcaacggctcgggcttcatcaccgtgctgctgattttgagcattctgctggcggcattcctgctgggcgacaagcgcatgcgcgtgcgcacggcctggacggcgctgtggagcacgctgggctttgcggcgttctatatcttcacgggtttcacctatgtgtatgtgttcaaggaagagctggcctatgggctgggcgattacaaccgctatatttatccctattatgcgggctggctggtgtttgccgtaacgatgctgtgcgcttcgctgaaaaatgcaaagcccggtagtcttggcacgctgttcctgctggcgctgtgcggaggctgcatttggcgtgcggatgcatatttgcagccccagcttacggttctggattacccggacagccattacgcgggccgccgtttgcaggtggaacaggttgaggccgcgaagcactacctgacgcgggacgacaaagtgttcatcgtgtccatgacgcagcagggcgtgggctggttccagctttattatgaattttatcccgatgtggccgtagattacagcttcggcgcaggggaggaattcagcccggacatcgtgcgccgggccgacgcgatgccggggttctttacggaagaacaggtggactacttcaccagccagccgtttacacccgcggtctggtgcgattaccttgaggccagcggatgcacggccatctatatggatgaatgggacgcggcctttgcggaaaattacggcgcgctgtttgccgacggcctgaaaagcggcgccacgctgtaccgcgtagagggcgcgggggcggacatgcactttgtgccgctgaacggagaggaggcggcgtcgtga

SEQ ID NO: 492 - DNA, 2181 bp, Subdoligranulum sp. 4_3_54A2FAA
atggtaaaatatagggcgtacagaaaaaacaggacacgcccgcgccgggaatcgttttccctgccgggcctcataggggaggaaccgtttttggccaatgaattgttcgggctgttcggcagccatctgttcgacgaccgcgtgatgcgtgagcgcctgccgctgagcgtatatgaatcgctgcgtgagattcgcgacgagggcaagccctggaacccggaggttgcggatattgtggcagacgccatgcaggcctgggccatggagcagggtgcgacgcattacatccactggttcagccccatgacgggcacgggcagcggcaagcacgacagctttatcgacggtgtaaagcagggcgagcctatcttgaatttttccggcaaaatgcttgccaaaggcgagagcgacgcttccagttttccttccggcgggctgcgcgccacattcgaggcgcgcggatacaccgcgtgggaccccacctcccccgcttttgtgctgggcaccacgctgtacattcccacggcgttctgcgcctataccggcgaagcgctggaccagaaaacccccgtgctgcgcagcatgcaggcgctcaacaaacaggctctgcgtgtgctgcgcgcgcttggcgataccgaaacggtgtctgtacagcccactgtgggcgcggagcaggaatatttccttgtggacaaggacctgttcgaccgccggcttgacctgaaggtctgcggccacacgcttctgggcgcgaagccgcccaagggacaggagcttgaggaccactactacggcagcatcaacgaacgcgtgcgcgaattcatgcgcgaactggacgaagagctgtggcgccttggcgtacccgctaagaccgagcacaacgaggtcgctcccggccagtacgagctggccagcgtattcgccacagccaatatcgcctgcgaccacaaccagatcatgatggagctgatgcgcaaggtagctttgcgccacaattttgcatgcctgctgcacgaaaagccttttgcgggcgtaaacggcagcggcaagcacaacaattggagcatcgtcaccaatacgggcaaaaatcttctgaatcccaccgacaaacccgaggaaaaccctgtttttcttgtaacgctgtgcgcggtgctgacggctgtcgacaaatatgcggacctgctgcgcctttcggccagctgcccgggcaacgaggaacgccttggcggcaacgaagcgccgcctgctgtggtgagtatcttcctgggcaacgcactgacgcatatgctgcaggagcttgccgagggccacgcactgcaaaaggaagagcgcggcgcgcttctgacgggcgtaaaaagcctgccgcttttaaagctggatgattccgaccgcaatcgcacctcgcctttcgctttcactggcaataaatttgaattccgcatggtgggtgcgagccaaagcatcggccttgccaatgcggtgacaaacgctattgtggccgacgtgctgcacgattttgccgacaaattggaaggtgcggacgatgtttccgccgtggtgcgggaaatcgtggctgagacctggcacgcccacggccgcatcattttcaacggcaacaattacagcgccgaatgggccgccgaggccgcacgccgcggccttcccaatattcaaagcatggtggacgcagccggcggcttcatcgcggagaagaatgtagccatgttcgagcgcaccaaggtgttcaccgctgcggagtgccgctcccgatatgagatcacgctggaaacgtacgccaagcatatccacatcgacgcctccacgatgctggagatggcaggccgcagccttcttcccgccagctatgaatatctgtcccgcgtgagccgcgcggaatattacgcggagcggaacggctgcgcctgtgccagcgccaaggcgcaggtggaaaaactgtgcgtcaccatcgacaagaccgcgggcgccatggaggcgctgcgccgcgctctgcatgcgctggacactgcacatttgggtgaaaaggcccgggcggacgcctgccgcgcgctgcgcgagcacgagatggccgccctgcgcgaggccgccgacgagctggaggagcttgtgccccagacgtactggcccatgccggattactgcgagctgctgttcgacctgtaa

SEQ ID NO: 493 - DNA, 2079 bp, Subdoligranulum sp. 4_3_54A2FAA
atgaattacgcaaacgatcacatccgaaacgtcctcatagcgggccacggcggcgccgggaaaaccagcctcgccgaagcgctgctgtttaccgccaagagcaccgaccgcctgggccgtgtggaagacgggaacaccgtatgcgattacgaccccgaggaggccaagcgccgcgcatccctgtcgctggccgtagcgcctgtcgagtatgacggcgtaaaaataaatctgatcgacacgccgggtctgtttgattttgagctgggtctgcacgagggcatccgcgccgccgagagcgtgctcattacagtgtccggccgcagcggcctcaccgtcggtgcgcagaaggcgtacaagctggcgctgaaacacggcaagagccgtatgatctacatctctaaaatcgacgccgagcatgccgatttctataaagtatttgaagagctgaaagcggagttcggcccgtccatctgtccggtggtcgtgcccatcgagcaggccggcggccgcgtgtttgtgaacctgatcgaatccaaggcgtacagctacgtcaacggcacggcccgcgaagtgcctatgcccaaatacggccatcgggaggacgggctgatcgaggccatgcgcgaggctgtggccgagaccgatgacgcgctgatggagaaattcttcgagggtgagcccttcacgcaggaggagttgacggagggtgtgcgcgtaggcgttaaaacgggcgccatcacgccggtactctgcggctgctccactgcgctggcgggtacggacatggtgctgcgctacatcaaaaagctgctgcccagcgcagcgcgcggcgctgggtgcgttgcggcggaccgcgacggaaacgaagtggagatcgcctgcgaggcgaaagacccgctgtgcgcatatgtattcaaaacagtagcagacccgtttgtgggtaagatgagctatgtcaaggttgtcagcggcacgctcaaggcggactctccggtggtaaacagccgcacgggcgagcccgaacgtatgggcaagctggtgttcgtgaaaggaaaaaagcagacggatgcggcggagatcggcgcgggcgacatcggtgccattaccaagctgcctgccgcgcagacgggcgacacgctgtgtgcgccgggccgtgtggtgagcctgccgcgccccgagttcccccggcctacgctgtccatggccatcaaggtaaagcagaaaggcgacgagagcaagatcagcggcgcgttgcagcgcctgatggaagaggacccgacgctggggtacgccgtcaacaccgagacggtgcagcaggtgatatccggtttgggagagcagcatctggatgtggtgtgcgccaaactcaaaagcaagtttggcgtggaggtgagcctcaccgagccgcgtatcgcataccgtgaatccatccgtaagaaatgtaaggcgcagggccgccataagaagcagacgggcggtcacggccagtttggcgacgtatggatcgaattcgagccgacggacgagggagagtttgtatttgccgagaacgtgttcggcggcagcgtgcccaagaactatttcccggcggtggaaaaaggcctgcaggaggccgtgcgccacggcgtgctggccggctaccccgtggtgggcctgaaggccacgctgctggacggcagctaccacccggtggattcttccgaaatggcgtttaagatggctgcgaagctggcctacaaggctgcgctgcccgaggctggccccgtgctgctggagcccatcggcaacctgatggctactgttccgggcgatgtgctgggggacatcatgggcgaggtgacaaagcggcgcggccgcgtgctgggcatgcatccggccgaggatggtcagcagacgctggaagccgacgtgccggtcagtgagatgcatgatttcaccacctatctgcgccagctcacgcaaggacgcggcagctttgtatttgaattcacccgctatgagccgctgccctccaatttggagccgaaggtcatcgaggaagcgaagaagttcattgatatgaaggacgacgaggagtaa

SEQ ID NO: 494 - DNA, 1788 bp, Subdoligranulum sp. 4_3_54A2FAA
atgaccattttcaacgttatcagcctggcgggcggcctggcgctgtttttgtacggcatgtccatcatgggcacggggctggagaaatacgccggaggcaggatggagagcatcctgcagaagctcacttcgtccacctggcgcgccgtggctctcggggccgtcatcaccgcgctcatccagtccagctcgggtaccacggtcattgtggtgggccttgtcaactcgggcatcatgcagctttcccaggccatcggcatcatcatgggcgccaacatcggcaccacggtgacgggccagatcatccggctttccgatatttcgggcggcggcacgctgatggaattccttaagcccgccacgttcgcgcccattctggcgtttgtgggcgcggtgctgttcgtgttcatcaagtcgccgcgcaagcgcgacatcggccagattttcatgggcttcggcttgctgttcatcggcatgggcatgatgacagattctgtgagcacactgcgggaatccgaactgttcgtccgcctgttcaccacgctgcagaatcccattctgggcgttctggcgggtacgctcgtcacggtggcggtgcagagctcctcggcgtccgtgggcattttgcaggcgctttccagcaccggcctggtcacctggggcagcgccatccccattatttttgggcagaacatcggcaccacgtccacatctctcatcgcgtccatcggcacatccaaggcggccaagcgcagcgcgatggtacacgtttatttcaacattatcggtacggtcatatttatggcggccatctacggcgtgaaagccgcggttgggttctcgtggtggaacgacacgatgaatatgggcgatattgcaaacttccacacattgttcaacgtggtggtaacgctgctgttcctgccgttcacgaagctgctggccaaactggcggaaatgaccatcccggacaagcccggagaaaagcaggacatcgagatccccgtgctggacgagcgtctgttcaattctcccgcggttgccatccagcaggccaaaagcgccgtggagaccatggcccgcaacgcccgcgccaattacggcgaggccgtgcccgtgctgtacagccataacaccgaggtgctcaatctcattcagcagcgcgaaagcgtcatcgataagctggaggtcaatatcagcaactatctggtaaaggtgactgatcgtgaactgaacgagagcgaaagccatgcggtaaacgagctgatcaatttcattgtggaatacgaacgcatcggcgactacgccatcaatgtggtggagcgcagcggcgagatgttcgacaaggagatctccttctccgaaagcgcccggcgggagctttcgctggtggacaacgccatcaaagagatcatggatatcacgctggcggccttccaggcggacgatacggtgctggccgagcaggtggagccgctggaggagaccatcgacttgatgatcgacacgcttcgggaacggcatatcctgcgcctgaaaaacggtgtgtgcgccatcgagagcggcatcattttcctggagatcctgacgaacctggagcgcatctccgaccattgctccaacattgccgcgcgcatcgtgggcaaggaatccgaggacgaccacttcgacgcccacgagttccgccgcaacatgcacgacgggtatgtgccaaatttcaacgagatgctggcgcagtataagctgaagtattatacaccgctgctggaaagccaggagacggcctga

SEQ ID NO: 495 - DNA, 1656 bp, Subdoligranulum sp. 4_3_54A2FAA
gaggcgaaagcggcgggaagggccgcggaaaagggagatgcaaaagccatgaaggtaacgtttatcggcgccacgcatgaggttacggggagctgctccctgctggaggtggggaacagcgctttcctggtggactgcgggatggagcagggggaaaaccggttcgagaatatcccgctgcctgtgaacccggcagaactgagctgcgtgctgctgacgcacgcccatatcgaccattctggatatctgcccctgctgtacaaaaacggctttcggggcaccgtgtatgctacggaatccactgccagcctgtgccagatcatgctgcgcgacagcgcgcatattcaggagagcgaggcggagtggaaaaaccgaaaggcgcgcagggccggacgcccggaggcggaggcgctgtacacgatggcggacgcagagggcgttttatcccgcttccgtccgtgcccgtacaacaagctgacggccgttggcgaaggcgttgcggtgcgctttacggatatcgggcatctgcttggctccgccgccattgagatatggatgagcgagggcggcgttaccaaaaagatggtgttcagcggtgacgtggggaatacgcatcagcccatcctcaacgacccgcagcgggtggagcaggcagattatctggtgctggaatccacctacggcaaccggctgcacggtgagcgcccggattatgtgggcgcgttgacggagatcctgcagcagacctttgaccggggcggcacggtggtcattccctcctttgctgtgggccgcacgcaggaaatgctgtattttatccgggagatcaaggagcagggccgggtgcacgggcacgacggattccctgtttatgtggacagtccgctggccaatgaggcaacgagcattttcctgcaatgccccacggaaaatctggaccctgaggcgcgggaactggtgcggagcggggtaaatccgctctggtttgaagggcttaggaccagcgtgacgaaggaggattcccaagccatcaatgcgaatgccgtgccgaaggtcatcctttctgccagcggaatgtgcgatgcggggcgtatccggcatcatttaaagcataatctgtggcacagcgaaaatacggtgctgtttgttggttatcaggcagagggcacgctggggcgcgcgctggtggacggcgcaccatcggtaaaaatattcgacgaagcgatcgcagtcaacgcagaaatccgcgtgctggcgggcgtgagcgggcacgcggataaaaacgggctcatccgctggctccagggtgtttcaccgaagccggcgcagatattcgtcaatcatggcgacgatgaagcatgtacggattttacccagtgcctgagagaagaatacggttacaatgcgatggccccgtacagcggaacgtgttatgatctggccgccggggcgtttctggcccagcccgccggagtgctgcgcaaaaagccggaggaggccgcgcgcgacccgcgcgcaatggcggccttcagtgagctgcagcgggccgtcaagcagctttccgcattggcccagggggcgggaggaagacccaacaaggaactcaagcgcatggctgcgcaggtacaggccttgtacgacgcctggcgcgcatga

SEQ ID NO: 496 - DNA, 2184 bp, Subdoligranulum sp. 4_3_54A2FAA
atgagtatcaccattgcgcttgccggaaacccgaactgcggcaagacaaccatgttcaatgacctgacagggtcaaatcagtacgttggcaactggcctggcgttaccgtggaaaaaaaggaaggccggttgaaggggcataaggatgtcgtcatccaggatctgcccggcatttattccctcagcccctatactctggaggaagtggtcgctcgcggatttctggtgaaagaaaaaccggatgcgatcatcaacattgtggacggcaccaacgtggagcgcaatctttaccttaccacacagttgctggagctgggtatccctgtggtcatcgcggtgaatatgattgatatcgtgcgcaaaaacggagacaaaatcgacctcgcgaagctgggcgcagagcttggatgcgcggtgatggaaacgagcgccttgaagggcgagggcagtatggcggttgcggaaaaagccatcgccatcgcctcgggccgcgcggccaatgagcagccccatgtgtttacgggaagtgtggagcatgccattgcccacatcgaagaatccatctccgacaaagtggatgcgcagaacctgcgctggtacgctatcaagctttttgagcgcgatgaaaaagtggctgcggagctggacctcggcagccgtctgatgacgcatttggagacacatatcaaagactgcgaaaaagagctggacgacgatgcggaaagcatcatcacaaaccagcgttatgcatacatcagcaaggttgtagaccgctgtgtgaaaaagaaggcggccagacacagcatgacggcttccgacaagatcgaccgtatcgtaacaaaccgcgttctggcgctgccgatttttgccgtagtcatgtatctggtctattggatcgccatggggccgttcggcagatttttgacggactggacaaacgatgtatttgccgctgaatggctgcagggcggagcggccgcgctgttggagggctggggcgtggacggctggctctcgggccttatcgtcgacggcatcatcggcggtgtgggcgcggtgctgggctttgtgcctcagatgcttgtactgttcctgatgctctccgttctggaggacatcggttacatggcccgcattgcatttattctggaccgtgttttccgcaaattcggcctctcgggaaagagcttcatcccaatgctcatcggctccggctgcggcgtgccgggtgttatggcgtcccgcaccattgaaaatgaccgcgaccgcaagatgaccattatgaccacctgctttatcccgtgcggtgcgaaaatgcccatcatcggcctgtttgcgggagcgttgttcggcggcagcggccttgtggctgtaagtgcatacttcattggtggggcagctattgttatcagcggcattatgctgaagaaaacaaagcctttcgcgggcgaaccggcgccctttgtcatggaactgcccgcttatcatgtgccaagtgcgaaaaacgtgctgcatgccacatgggagcgtggctggagcttcattaaacgcgcaggcaccatcattcttgcttcctccgttgtattgtggtttctgcagggctttggctttacggacggctcctttggcatggtggaggacaacaacagcagcctgcttgctgttgtcggcagcgctgtgtccttcatctttgcgccgcttggctttggtgattggcagtccaccgtggctaccgtcacaggcctgattgccaaggaaaacgtggtgtcgactttcggcgtgctgtttcatgtgggcgaagaagttgcggaagatgacgcgaatctctggtctgccgtcgcgctgcattatacgcagctgtccgcatacagctttatgctgttcaatttgctgtgtgcgccgtgcttcgccgctatgggcgccatcaagcgcgaaatgaacaacgggaaatggacgctcgcggccatcggatacatgtgtgtgtttgcctatgctgtttcgctcatcacctatcagttgggaggtcttatcacaggcgagactgcgttcggggtcggcactgttgccgctctgttggttcttgcattcctgatctacatgctggtacgccccaatcaatacaacgcggattataagcgcggtggggcagcctccggaaagctgaacggcaagatcaatgtttga

SEQ ID NO: 497 - DNA, 2529 bp, Subdoligranulum sp. 4_3_54A2FAA
gtcgtgttcgctgtttcccggccagagcgcgtcaggccgctgtatatgatttttataaaaagcagaaaaggagccgccatgaaagatatcgtcatctccggcgcccgagagggcaatttgaaaaatatctctctgcagataccacgggagaagcttgtggtactcacgggcgtgtccggttcaggaaaatccacgttgctgatcgatgtactgttcaatgaatgccagcggcagtatctggaggcgatggacttgcagggaatccgaaagcctcaggtggaaagcatccgaggcgtttctccggccgtgtgcatcacgcagcgcggggcgaatcgaaacccacgttccactgtgggcactgtcacgaacatttatacggaactgcgcatgctgtacgaaaagctggcggtacgcaattgtccgcattgcggagctgccatttgcgcggcggactgctttgaaaccacggaaaagcgcggcggagatttttttgtctatatggactgctgtgtatgcggcaaacgcatggataagctgacgcgcacgcagttttcctataacaccaaagaaggggcatgtcctgaatgtcaggggcttggccagacactcaaggtggaccgaacgggggcggtggatgagcggcgttctctggaggatggcgctgtgcgtttttgggcacagaaatacgctgaataccagacgggtgcgttttatgcggctctgcggcattatgggctccctgtacagccggggacggcagtcgaagcatacagcgatctgcaaaaggcagtgctgtatgagggaacttcctgctctgcgctgcaagaaacgtttccgaatatagccgtgccgaaaactgtcgcgcagggcaggtttgagggcgtggaaccgatgctttggaggcgtttgcaggaaaagggcggcgacgctaaggggatggaggggtatttccttcatacgccgtgccgcgcgtgcggcggcgagcggttgaatcctctgagccgcggcgccgctgtgcgggacgtgcgtctgccgcagctttctgcgctttcgctggatgagcttcgcaggtggcttgaaaagttggagcaggagctgccttccgcgcatcaaaaactggtggagccgtatttgctggatctgcagacaaagcttcggcgcttgtcggacgttggtttgggatatctttcgctggagcggcaggcgggaacactttcaggcggtgaaacgcagcgcctgcggttggccgcggcgttggactcggacatcacggggatattttatatgctggacgagccgacggtgggcctgcacccgcaggatacgcagggtatgatcgatgttttgaaacaactgcgtgacaacggcaatactgtactggtgatcgagcatgacccggatgtaatgcgcgctgcggatcatatcatcgacattgggccgggtgcgggccggcatggcggacaggttgtcggcagcggcacgctggaagagctggcagcgcagcctgattctgtcacgggcgcctggttggcgaggcatcggccgcaaaagcggacgcctcgggcgggggacggcagaagggtgaagataaggaacgcctgcctgcacaatctgcaaaatgtggatgcggaatttccgatccgctgtctttctgcggtgacgggggtgtccggttccggaaagtcctcgctggtattcggcgtgctggcggacgagagggaacagcgtacacatgttgcggggctggaacatttcagccgtgtggtggttattgaacaagaggcgcttgtccgcatgcgccgctccaatgtagcgacctatacaggactgtattctgatatccgcagcttgttcgcggcaacgccgcaggccaaaaagctgggattgggagcaggggctttttcctttaatacaaaagggggccgatgtgagacgtgcgaaggcctgggcgttgttccaaacaatttgctgtttttcgcggatacggaaatcacatgcccggtgtgcggcggcaggcgcttcggcgaaaaggttttgtctgtccggtggaacgggaaaaatatttccgatatactgtcgctttccgtggaagaggcgatggagatgtttgccgcagaacgcaggttggcggcgcggctgcacacgttgtgcggtgcggggttgggctatttggagttggggcaaacgctcacgacattgtccggcggagaaggccagcgtctgaagctggcaaaggaactgatggagcaggcacagaacaatgtgttgtatttaatggatgagccgaccgtaggcctgcatccgcttgacgttgagcactttctcgcgctgctgaacggtatggtggaaggcggcgctacggtgattgcagtggagcacaatcaacaggtgatcgctgcgtcggactgggtcgttgagctggggcccggcggcggggtggacggaggacgggccgtgttttcggggacgcctcaggagctggctgcctgtacggagtctgcaacaggacgttttttggaaggctggtag

SEQ ID NO: 498 - DNA, 2025 bp, Subdoligranulum sp. 4_3_54A2FAA
atgttcaaaatgaaacagaaagcatcgcctgctgatgtaccggtgtacttattcaagcaggggaataacttcgagagccagcgttttttcggcgcgcattttgagaacgtgggcgagaccgaaggcgtgatgttccgtgtttgggcgccgcgcgccaaggccgtctccgtggtgggggatttcaacagctggatcccctcggccactccgatgaaaaatatcgatccccagggaggcatctgggagcgtttcgtccccggcattcggcagtttgatatctacaaatactgcgtcactacaccggcggacgagctggtattcaaagcagacccgtacgccttccatgcggaaacacgccccgcgaactgcagcaaggtgtacgcgctggaggattgctacaactggacggatgacgcatggcagaagcgcgctgccgcacgggaccctctggaccgtcccatgaacatttatgagatgcacgcgggcagttggcggacctatccggacgggaacccctttgactatcgggcgcttgcgcgggagcttgttccctacctgacggacatgggctatacccacgtggagctgatgcccctgatggaatatcctttcgacgggagctggggctatcaggtgacgggctatttcgcccccaccagccgctacggcacgccggcggatttcaaggcatttgtggatgaatgccatcgggccggcatcggcgtcattatggactgggtacccgcccacttcccgaaagaccaattcgggctgtaccagttcgacggcaccaactgttatgaggatcagaacccgctgcgcgccgagcacaaggaatggggcacgatggtgttcgattacgcccggcccgaggtacagagctttttgatctccaacgcactgttctggctgacggagtatcacatcgacggcctgcgtgtagatgccgtggccagcatgctgtacctggattacaaccggcgcgacggcgaatggcagccaaacgtcaacggcgacaacaagaacctggaggccgttgcttttttgcagaagctgaacaccgccgtgctggaacgtaaacccggcgcgctgctcatcgcggaggagagcaccgcgtggccgctggtgtcccatcccgccagtgagggaggcctgggcttcaacttcaagtggaacatgggctggatgaacgacatgctcagctatatgagcacggacccgctgttccgcgcaggcaaccacaataaggtgacgttcagctttttctacgcgttcagcgaacatttcgtgctgcccatcagccacgacgaggtggtgcatggcaaatgcagcctcatcaacaaaatgccgggcgactacgagcagaagtttgcggggctgcgcgcattttatggctatatgatggcgcaccccggcaaaaaactgctgttcatgggacaggaatttgcccagttcatcgaatggaatgagaaccagcagctggactggatgctgctgggctacgaccgtcacgcacagatgcaggaatatgtgcgcaggctgaatcatctgtatcaggaaacccctgcgctgtgggaagaggacttctcctgggagggcttccagtggatcgtcccggacgattcgtcccaaaacgtcgtggtattcctgcggcgggataaaaaaggcggcgaggtcatcgcggtgtgcaactttgcgcccgtgctgcgcccggactataaattcggcgtgccccgcgcggggcagtatgcagagctgatcaattccgacgcggaggaattcggcggcacgggacagcacaacgcgccggtgcgcgcgaagaagcagcccatgcacggctttgattacagcatctcgctgcgcgtgccgcccatgagcgccgtcattctgcgtacgccggcggcaaagccagcaaaagcggacgggccggcgccgaaaaaagccgccgcccgtggcgcaagggcgaagcccgcaagaaaaaccgcggcgcgcaaaaccaccggcaaacaggcgaaggacgcatag

SEQ ID NO: 499 - DNA, 2331 bp, Subdoligranulum sp. 4_3_54A2FAA
atgctttgtgttagatgcaaaaaacgccccgccattgtttttgtacagaagctggaggcgggcgaggcgaaaagcgagggctactgcctttcgtgtgcgcgggagcttggcatcaagcccgtggatgatattatgaaacagttcggcatctccgatcaggatctggaggccatggaagaacgcttcgccggcatgatggaaaacggagatatggaccccgccgccatgatgcagcagcttgggatgatggcgccgcaggacgatgcggacggggatgaagcgccggacgacgatacggacgaaggcggtgacggcgattttacgcccggcggcaacgcaacgttccccttcggtattttcggcggccgcaggaaaacggaagaagcgccggagaaggaagcaaagagtaagaacgaccgcggcaagaaacgcaagtttctggacaattactgcgagaacctcacccgcaaggcgcgggacggaaagctggaccgcatcgtgggccgcgacagggaaatttaccgcaccgtccagatcctttcccgccgccagaagaacaatccctgtctcatcggtgaggcgggcgtgggcaagacggccatcgccgagggcatagcgctgcatatcgcagaggggaacgttccggcgcgcctgcgggacaaggaaatttatctgctggacctgacaagcctggtggcgggaacccagttccgcggccagtttgaaagccgtgtgaaagggctcattggcgaagtgaaagcggcgggcaacgttattttatttattgatgagatccacaacatcaccggggcgggggattccgagggcgcgatgaacgcagccaacatccttaagcctgcgctctcccggggggagattcaggtcatcggcgcgacgacgtttgccgaataccgcaaatacattgagaaagaccaggcgctggagcgccgtttccagccggtgaagatcgaggagccgtccatcgacgatgctacggctgttatcgcgggcatccgccagtattatgaggcgtaccaccatgtaaaggtgagtgaagccatcgtgcgcagcacggtcacgctgtccgagcgctatatcaccgaccgtttcctgccggataaggccatcgacctgttggatgaggcctgtgcctgctgcagcctgcgccacccggaaatcaccgaatgggtggaaaacgaaaagcaccttgcgggtctgaaagagcaggaggctgagcaggaacaggccaaggaggggccggactacgagaagctggcgcagatcaaatccgagatcatccgcctggaggcagaactgcccgcgcagcgggaggccgtggatggcatccaggtgacgatggaggatgtggcaaaagtcattgagctttggacggggattccggccgcaaaagtaaaggaaaccgagtatacaaagcttgcgcatctggaagaaaacctgaacagggtcatcatcggccagcccgaggccgtgcatctggtggcaagcgctgtcaaacgcagccgcgcagacatctcagcgcgccgccgtccggccagctttatcttcgtcggccccacgggtgtgggcaaaacagagcttgtcaagcagctcgcgctgcagttgttcgatacggtcgacccgcttatccgtctggatatgtcggaattcatggaaaagcacacggtcagccgcctgatcggttcgccgccgggctatgtgggctatgacgaggccgggcagctgacggagaaagtgcgccgcaagccatacagcgtggtgctgtttgacgagatcgagaaagcgcatccggatgtgatgaacctgctgcttcagatcctggacgagggaaaaatcaacgacgcccagggccgcacggtcaattttgaaaatacggtcatctgcatgacgagcaatgcaggctccggcgacaagaccggagaaacaggcttcaaccgtaccatcgctcaaatgagcagggataagtccatcaaggcgctgggcgaatttctgcggccggagtttatgagccgtgtggacgagatcgtcacttttgcgccgctctctccggagagcctgaagcggatcgccgctctgatgcttggcgagtacaaggaacctctcgcggcaaaaggcatcggtctgagctggacagaagccgcgcttgccctgctgtgtgaaaaggcgaagggcggcaagttcggcgcccgcgacctgcggcgtgtcatccgcaaagaggtggaggatgccatcgccgggaagatcatcagcggcgagccgctgacggccattgaggtggatacgcaggacggggatatcgtactgcattgctga

SEQ ID NO: 500 - DNA, 1785 bp, Subdoligranulum sp. 4_3_54A2FAA
atgccatccatcaaagtactggcgatctcgccctatcccgggatggtgccgcttttaacagagaccgcgaaagaatacgacggcctggagctgaccatcagcgtgggcgatctggccaaagggctggagctcgcgcagaaaggcttccacgcaaattttgatgtgatcatctcccggggcggcacggccagactgctgaaacaatccgtttcgctgccggtcatcgagatcggcaccaccgtgtacgatgtcctgtgcacgcttcagcgcgccaacattcacgaggggcgagtggccattgtgggatattccaacatcacacaggatatgggcatcctgcggacgctgctgccataccagctggacgtatttaccatacaatcctccagccaggccgttaccacgctgcaatacctgcggcgggaggaatatgcctcggtcctgtgcgatatggtcacctacaccgccgccaaggagatggacgtcaacgctttccttatcacctccagcgccgaaagcatccgcgccgcgttcgaccaggctgtttttttctgcagcgccaaccgccagctgcgcagcgaaaaccagttcctgcgccagctcctgcacaaacgcaccagccagaccgtagtattcacccgtgcgggcaagctggttttttccacgctggaggacgcctccgcagagctgctggacatgctgcgcgaaaaaatcgagagcgtggccgccgcgggacgcatcaaggtcatgcagcagttccgcgggctgctgtacaacattgaagcgatgcagcttccctccgacggagaggcctataccgccttttattttctcgcttccaccccccctgttgccggggacaaatacggcatcagctactataactgcagccaattggaggaggcgtgctccgccggtatctataacatcaccggcctcaccgcccaatatcatcaaagcatcctgcaggcggcggcaggacgcgcaccggtgtttctgttcggcgccgccggaacagggaaggaatatctggcgcgcacgatctacctgcgcagcgcgcgtcgcagccacccttttattcagatcgactgtaacctgctgagccgtaaaacctggaattatctgctgggacaccacagctctccgctttgcgatacggaaaacacgctgtatttccaaaacctgaacgcgttggacgatacgcagtggcgccagcttctggcctttctgctggagggacagaccgcgaagcacaaccagctgattttttcgcgtgtggaagccggtgacgggcgcatcagcggagcggcaatggaattcatcaaccgcctgtcttgctttcccctctgcctttcctccctgcacgcccaacccgcgcaggtggaaaccgcgttcagcctgtatctggaccgccatacgatagacaccggcaggcagtggcgcggcatcgacgcggatgcgcttacgctgctgcgccagtatccgtggacgcagaactatctgcagttccaccgcgtgatggaacggctgacggaactgtgcacggatgcacaaatccggctgtcggacgttcaggccgccctgcaggcggagctttcccttgcgcccgccgacgcggatacggcggcctcccccgccgcctctctcgacctctcccagccgctggccctcatcgagcgggagatcgtccgaatggtattggaaaaaagcggtgacaaccaaagccgtgcggcgcagagccttggcatcagccgcaccacgctctggcggatgctgaaggcataa

SEQ ID NO: 501 - DNA, 693 bp, Bacteroides stercoris
gcgcagctatctgcacttcctgatattcctgaacttctgtattttcgtctatataggactgcaacccgctctgtatccccatctgttctctctgctgctaatcggcaccagtattctgataggacacttattcgtactgaccaacagccggagttccaacctgttcttcatcattatgctggtcggattatttactttattcggattcaatctatggacgcttttatagatacactcatacaactcctgatagactggggatatgcagggctctttatctcggccttattggcgggaagcatcattccgttcagttccgagctggtgatgctggcactcgtcaaggtaggcttgaaccctgccatctgtgttcttgccgccacactgggaaacacaatgggcggtatgacctgctattacatgggacatctcggcaagacagactggatagaaaaatatttcaaagtgaagcaagaaaaaatagacaaaatgcagcgtttcctgcaaggtaaaggagcgctcatggctttctttgcctttctgccctttataggagaagccattgccatagcactgggatttatgcgcagcaacgtaatgctgacttccctttccatgtttacaggaaaactgatacggtacatcgttatgttatcggctcttcaaggcgctttgtcggtgatgagtgtttag

SEQ ID NO: 502 - DNA, 987 bp, Bacteroides stercoris
atgagtgagaaaataataaaatggggatttatcggctgcggagaagtgaccaaatacaaaagtggacctgcatttcagaaaattgaacactccgaagtggtagctgtgatgagtcgggatatctccaaagccaaagcttatgccaaagaaagaggcattgccaaatggtacaatgatgcacaggaactgattaatgatgaagacgtaaatgccgtatatattgccaccccaccctcttcccatgccacatatgccattatgtccatgaaagccggcaaaccggtatacatagaaaagccgatggcagtgacttatgaagagtgttgccgcatcaaccgtatttcccaagaaaccggcataccttgttttgtagcctattaccgccgttatcttccttatttcctgaaagtaaagtcattggtggaagaaggggccatcggaaatgtcatcaatatacaaattcgttttgcccagccacctcgcgatctggactataacaaggagaacctaccctggcgtgtacagcccgatatcgccggtggcggttatttttatgatttggctccacaccagatagacatactgcaagatatgttcggatatattcttgaagccaacggatacaagagcaaccgtggcggactatattctgcagaggataccctcagtgcctgtttccaatttgacagcggtctggtaggcagcggctcgtggtgtttcgttgcacatgagtctgcacgtgaagaccgtatcgaaatcatcggagacaaaggtatgatatgcttttctgtatttacctatgatcccatagccttacacaccgaacgaggaagggaagaaatccctgtagaaaaccccatttacgtccagcaaccgcttattcaagctgttgtagaccatttacttggcaaatcaatctgtaactgcgatggcgaaagcgcaacactgacaaactgggtaatggacaaaattttaaataaaatataa

SEQ ID NO: 503 - DNA, 711 bp, Bacteroides stercoris
atgatggattttaaagagggagaagttctgtatttcaataagccgctggggtggacatcgttcaaggtcgtagggcatgcgcgttaccacatttgtcggcggatgaaggtaaagaagttgaaagtaggccatgccggtacactcgacccgcttgccacaggcgtgatgatagtatgtacgggcaaggcgacaaagcggattgaggagttccagtatcataccaaggagtatatcgccaccattcggttgggcgctaccaccccttcctatgatttggagcacgagatagacgctacctatcctacggagcatatcacgcgggagctggtggaggagacattgaagaagttcacaggcgagatacagcaggtgccgcctgctttttcggcttgtatggtgaacggcaagcgcgcctatgaccttgcccgcaaaggtgaggaggtagagctgaaacccaagttgctggtgattgacgagattgaactgctggaatgcaacctgccggaaataaaagtccgggtagtatgcagcaaaggcacttacatccgcgccctggcacgcgacatcggtgaagcgctgcatagtggagctcatctcacggccctggaacgtacccgtgtgggggatgtccgcatagaagactgtctgaatccgcttgatttcaaagagtggatagacgggcaggatttagttatgagtgatgggttataa

SEQ ID NO: 504 - DNA, 780 bp, Bacteroides stercoris
atgatagaaacgactgattttagtaaatcggaacaatataccttatccatccgtctcagtacggatggattttctttttctatattcaatccgctcggcgaaggcagattttctttccacgagcacggagtggacgattccctgtccctcactgccaacctgaaacaggctttccgcgaaacggactggctgaagaatcctttccgccgtatcaatgtccttatggcaggcaaacgctttacattcattccgttggaattctttgaggacgaacaggcggaaaccgtattctatcataatcactccagacaagacaacgagctggtgcaatacaacatcttgcataagaacaatatagtcgtactgtttggaatggacaaaagcgcctgctcccttttacgcgaacagtatcccgacgtccgtttctatgcgcaggcaagccctctcatagagtactttgcggcaaagagccgcctgggcaattgccggaaaatgtatgtgcacctgcgcaaagaagcgacagagatatacgcctacgaacgcggccggctggcattcgccaacacctttgcctgcaaggagacaaacgaccgcctctattacatcctctgtgtatggaagcagctcggcatggcgcaggaacgcgacgagctccacctcaccggcgaactgtacgacaaagagcaactgctgcccgaactgaaaaaatttatccggcaggtattcatcatgaaccctgccgccaatctcgacctacaagccatcaacctatgcgagtaa

SEQ ID NO: 505 - DNA, 615 bp, Bacteroides stercoris
cttaaacggatgttaataataggaattgcaggcggaaccgggtcgggaaagaccaccgtcgtacgtaaaattgttgaaagcctgccggctggtgaagtagttttattacctcaggactcttattacaaagacagcagccatgtgccagtagaagaacggcagaatattaatttcgaccacccggatgctttcgactggggacttttgtccaaacacgtatccatgcttcgcgaaggcaaaagcatcgaacaacctacctattcctacctgacctgcacgcgacagcccgaaacaatccacatcgagcctcgggaagtcattatcattgaaggcatccttgccctatgtgacaagaagctgcgcaacatgatggacctcagaatctttgttgacgcagacccggacgaacgccttatccgcgtcatccagcgcgatgtcgtagagcgtggccgcacggccgaggctgtaatggaacgctacacgcgtattctgaaacctatgcatctgcaatttatagagccttgcaagcgatatgccgatcttatcgtaccggaaggcggaaacaatcaggtagcaatcgatattctcacaatgtatatcaaaaaacatttataa

SEQ ID NO: 506 - DNA, 1200 bp, Bacteroides stercoris
atgaacccaaaaacagtgataaaaggaaaaatccactatgtgggagtgaatgaccgcaataagcatttgtttgaaggtatgtggccattgccttacggagtgtcttacaactcttacctgatagacgatgaaacggttgcgctgattgatactgtagatatttgttactttgaggtatatcttcggaagataaagagcataatcggcgaacgtcctatccagtatcttatcatcaaccatatggaaccggaccattccggctctatccgtttaatcaaacagcattatcccgacatcatcattgttggcaacaagcagactttcggtatgatagaagggttctatggcgtgacaggcgagcaatatatggtaaaagatgaagactttcttgccttgggtcaccacaagcttcgtttctatatgactccgatggtgcactggcccgaaaccatgatgaccttcgatgaaacggaaggcgtgctgttctccggcgacggcttcgggtgcttcggtacgctcgatggcggattccttgatacacgcatgaatctggataagtattggaacgaaatggttcgttattactccaatatcgtaggcaagtacggctctcccgtacagaaggcattggcaaagttgggcggtctgcccatctccaccatctgctccactcacggaccggtatggacggataatattgccaaggttatcggcatctacgatcgcttgagccggtatgcggccgaagagggtgttgtcattgtctacggttccatgtacggcaataccgaacaaatggcggaagccatcgctgcggaactttccgttcagggcatcaaaaatattgtgatgcacaatgtcagcaaaagtaatccgtcttacatcatagccgatatattcaaatacaggggtctgataatcggaagccccacgtatagcaaccagatttatccggagatagaatcactgctctccaagatattggtacgtgaggtgaaaggccgttatctgggttacttcggttcgttctgctgggcaggtgcagccgtgaagcgcatgggcgaatttgccgagaaaagcaagtttgaaatcgtgggcgatccggtggaaatgaagcaggccatgaaggacattacctacgagcaatgcgagaatctggcacgcgccatggcggagcgtttgaagaaagacagacaataa

SEQ ID NO: 507 - DNA, 618 bp, Bacteroides stercoris
atgcaaaagaagaaggaaatattggagagggcaaacaataaaccgaattacagcattacacatgatatgacgaatatatataccgaagcattttccattttctttaaaatcggtgcattcaccattggcggcggctatgccatggttccattgattgaggacgaaatcgtaacgaaacgccggtggatagccaaagaggattttatagacctgcttgccatcgcccagtcggcaccgggcatccttgcggtcaacatatccatattcataggctaccgcctgcgtggaatacggggaagcatcgttaccgccctgggaacgatactgccttctttcctcattatccttgccatagccttgtttttccataacttcaaagacaatgtctacgtagagcgtatcttcaagggtatccgtccggcagttgtagcactgatagccgctccgactttcagtatggccaaatccgccaaaatcaaccgctacacgatatggattcctattgtctcggctctgcttatctggttattgggcttctcccccatctggattatcattgctgccggtataggcggatacctgttcggaaggctgcgcttcccgaaaaccaacagttaa

SEQ ID NO: 508 - DNA, 567 bp, Bacteroides stercoris
ttaatttcatacatttgcagcctatacaaagaattatcattcaaaataaatagtaaatattatgttaaaaaaatcgcactgctcgtagttatgtttgccctccctctgggagctatggcgcaaactaaattcgctcacatgaactctcaagaagtaattgtcaccatgccggaatacacaaaagcacaagccgacctggatgctatgtctaaagagtatcaaacagaaatgcaacgtacccaggaagagttcaataagaaatatcaggaattcttggcacaagccgactcacttccgaaaaacattgcagaaagacgtcagaaagaactgcaggacatggcacaacgccaagaacagttccagcaggaagcatatcagtctatgcaaaaggcacagcaggatgccatgactcctatctataaaaagctggacgaagctatccaggctgtaggtaaggctgagggtgtagtatatatcttcgacctggcccgtactccgataccttatgtaggtgcacagagtgtagatgtaactgccaaagttaaaacgcaactcggcattaaataa

SEQ ID NO: 509 - DNA, 699 bp, Bacteroides stercoris
tacgcaaaatcggcatttaaaaaggcttatacgtgttttttatctatttttgcagacatgaaaacgcttactgatacccaatatatacatgctctcatagccgaaggagagcaccaacaacaagattttaagttcgaaatatctgatgcgcgaaaaattgccaagacgctttctgccttttcaaatacggacggcggacggcttctcatcggcgtaaaggataatggtaagattgccggagtgcgttccgatgaagaacaatatatgatagaggcagcagcccggttatactgccggccggaagtgagttacagcacacagacctatcaggtagaaggccgcagcgtattgctggtgcaaatcgatgaaagcgaccgtaaaccggtatatgccaaggacgaagccggcaaatatcttgcctatctgcgcatcaaggacgagaacatacttgccaccccggtacatctgcgtatctggcaacaaagcaaaagtcctcaaggagaattgatggaatataccgaacgggagcagctactgcttgatttactggaacaaaacgaccggttgtcactgaaccgttattgccgtctggcacgtctgtcacgccgtgctgcagagcatctacttgccaaactcatccgttatgacattgtggaacccgtattcgaagggcataagtttcacttcaagctgaaataa

SEQ ID NO: 510 - DNA, 915 bp, Bacteroides stercoris
gtggcaaaagaaagaattatagcaagagcccgcacgcaatatacggactatatggtaaaagagcctatggaactgatggaatttctggcagcgaaaatgccggatgccagccgcaccaagctgaaagcattgctgagcaagcgggttgtatatgtagacagcgtcatcacaacgcagtacaacttcccgctgaagccgggtatgaaagtccagatcagccgtgagaagggacgcaaggagttcaacaacaaattactgaaaatcgtatacgaagatgcttacctcatcgtggtggagaagatgcagggattgctgtccgtcaatacggaaaggcagaaagagcgtaccgcctacaccattctgaacgaatatgtgcagcgttcgggcaggcagcaccgcgtgtacatcgtgcatcgcctggaccgcgacacctcgggactgctgatgtttgccaaagacgaaaagacgcagaatacgctgcgcgacaactggcacaacatcgtaaccgaccgccgctatgtagccgtcgttgcgggtgaaatggaaaacaatgccggcatggtgcgctcatggctcaccgaccgcaaactgtacgtatattccagccccacggacgatggcggcaaggaagcaatcacccactaccgcaccatcaaacgcgccaacggcttctcgctcgtggaactgatgctggagacgggacgcaaaaaccaaatccgcgtgcacatgcaggatctgggacatcccatcattggcgacggacgctacggactggaagagataaatcctatcggacgactggcgctgcacgccttcaagctgtgcttccgccaccctgtcaccggagagctgatgcagtttgaaacaccgtatccgggagagttcaagaaactgtttctgaaacgtaatggataa

SEQ ID NO: 511 - DNA, 483 bp, Bacteroides stercoris
tttaaattaaaaaaagttatggcattgaattacgaagtgaaaaagaaagtattcggttttgatcagacaaaaacggaaaagtatgtagcgcaactgaaaacgcttggtataatacagtttggcgatttgtgcgatgaagtcaccaagataggcatggccccgcgtggtgtggtaaagatggttctggatggcttgatagacacattgaacattaacattaacaagggattttccgtacagttgggtgatttcggttgtttccgaccgggcatcaatgcaaagagtcaggacagggaagaggatgtgaagtcggatacggtttatcgtcggaaaataatttttacaccgggacagtacttcagggagatgctgacacgtgccagcgtgacgagagcaagttgggaaaaaacggaaactgtttcgggaagcggttctgctccgggaaccggcggaaacggggaagaagaaaatccgttgggataa

SEQ ID NO: 512 - DNA, 1311 bp, Bacteroides stercoris
atgaatatcggttcggggatgcttttggacaggaccattcagcctaaggtgagggacattgagcacttggccgtacagatgccccaacggtgcactatgcccaatggtgtgtctttgaatgtgcttgactctggcgataatgaagttgtgcgcatagacctgctgatggaaggcgggcgttggcaacagtcgcaaccgttgcaggctttgtttacgaaccgtatgctgcgcgaagggacgcttcggtacagtgcgggggaaatagcggagaagttggactattacggtgcctggctggaattgtccagcgcatcggaatatgcgtatattactctttattcgctgaacaaatatttgccgcagacgttggaaatactggaatccatcgtaaaagagcctgtgtttccggagaaggagctgggtgttataatagaaaataatatccagcagttcatggtcaactcgtccaaagtggattttctggcgcatcgggcgctgatgaaagctgtatatggtgaggtgcatccttgcggacggctggtgcagaaagaggattatggcaggataaatcctgctgtactcagagagttttacgaccggcattatcattcccggaactgcacgatttacgtttccggaaaggtgagcgatgattgtgtacggcggatagaagatatgtttggtaaggaagtgttcggcaaagacttccgcaaaccggaaaggcgggagtttattccggtttcttccatggataaacgaatttttgtagaacatgcggatgccatgcagagtgcggttcgcatggggatgctttctttggaacgccatcatcccgattatttgaagaccagagtgatggtaacgctgtttggcggatatttcggaagccgtctgatgtccaatatccgtgaagaaaagggatatacctatggcatttctgcaggcatcgtttcttgtccgggaccggaaatgctggttatcaatacggaaacggcaaacgagtttgtggagcctcttatccgggaggtttaccatgaaatagattgcctgcagaatgatctggtgccggaagaagaattggcaatggtaaagaattatatgctgggcgaaatgtgccgcagttatgaatcggcattctcactggcagatgcgtggatgttcgttcaggtttcgggttttggcgatgcacactttgaagatgctctgaacgcagtcagagatattactcctgaagatatacgcgaacttgccggaaagcatttgtgcaaagagaaattaaaagaagtcatatccggcaaaaaaatgtcataa

SEQ ID NO: 513 - DNA, 1158 bp, Bacteroides stercoris
aagacatttgtccctttttattcgtcttttccagagattttccgtatctttgtatcggtagttggcaaggtaatgaccgaacgtaagattatacatattgatatggacgctttctatgcttccgtagaacagcgcgacaatccggaactgcgtggcaaacccgtagcggtggggcatgcggaagagcgtggtgtggtagctgccgccagctatgaagcccgtcggttcggggtgcgttcggcaatgtcgtcacagaaggcaaaacggctgtgtccgcagcttatttttattccgggacgtatggacgtctataaatcggtgtcccgtcaaattcatgagatattccatgaatatacggatgtcatagaacctatctctttggatgaggcgtttctggatgtgacggaaaataagccgggtattcttctggctgtggatatagccagagaaataaaacggaaagtgcgcgagcagctgagtctggtggcctctgccggagtttcctacaataagtttcttgccaagatagcatccgattaccgtaaacccgacggtttgtgtaccattcatcccgaccaggctttggaatttatagcacatctgccgatagagagtttctggggagtgggtccggtgacggcaaggaagatgcatgttttggggatacataccggcgggcaactgcgtgcctgttcgcaagcgatgctgttgcgcgagtttggtaaggtgggaaacatctattatgattttgcgcgcgggatagatcttcgtcctgtagaagcggtgcgcattcgtaagtctgtggggtgtgaacatactttggagaaggatattaaccggcggtcgtcggtcattatcgagttgtatcatactgcggtggaactggtaacccgtctggaacataagaacttccgggggaatacgctgacgctgaaaattaagtttcacgatttcagccagataacccgcagcgttacgcagtccaaggaattgacggcacttgatgtgatcctgccgttggcgaaacaactgttgagggaggttgattacgaacatcatcctatccgtctgataggcctttccgtatccaaccctcgtgaagaaagtgatgaaaaaggtgtttgggaacagctgagttttgaatttagtgactggtaa

SEQ ID NO: 514 - DNA, 642 bp, Bacteroides stercoris
tcttatagaacaaatatctccttcattatgactgtcaagataggtataaccggtggtatcggcagtggaaaaagtgttgtgtcccgactgttggaggtgatgggaatcccggtctatatttctgatggggaaaccaaacagcttatgatgacagactcttgtattcgcagtgagttgactgccttgttgggtgaggaggtgtatgccggtggagtattgaataagtctctgcttgcgtcttatcttttcggtagtcccgagcatgccgggcagattaatggtattgttcatccgcgtgtaaaagaggatttcaggcagtgggtttgtcagcgtgcggcatgccggatggcaggaatcgagtctgctattctgatagaggctggatttgcagatgaggttgatgtagttgttatggtctacgctcccgaggagatacgggtgcagcgtgccatgaagcgggatgcttcctcacgtgaactgatagaaaagcgcattcgtagtcagatgggcgatgaagaaaaacggaaactggcagattttgtgatagtgaatgatggcgaaacaccgttaattccgcaggttttgggcttaatcacttttctgtctcaaaataatacctatctttgcccaccgaaaaaatga

SEQ ID NO: 515 - DNA, 654 bp, Bacteroides stercoris
gtgaataaagaagcagcattggtcgtattcagcggtgggcaggattcgacaacttgcctgttttgggcaaagcgtgagttcaggaaagtatatgcgttgagctttctgtatgggcagaagcatcagaaggaagtggaactggcacgggagatagcgcgtaaagcggaagtggagtttgaagtaatggatgtttccttcatcggcaagttggggcataattcgttgacggaccccgatatggtgatggaccgggagaagccggcagacagtgttccgaatacctttgtgccggggcgcaacctgttcttcctcagcattgccgccgtctatgcccgcgaaaagggtatcaaccacatcgtgacgggtgtgtcgcaaacggatttcagcgggtatcccgattgcagggacgcatttatcaaatcgctcaacgtaacgctcaaccttgccatggacgagcagttcgtactccatactccgttgatgtggattgacaaagccgagacttgggcgctggcggatgaactgggagtgctcgacctgattcgtcatgagacgctgacctgttacaacggcatccccggcgacggctgcggacactgccccgcatgcaagctccgcagagaggggctggagaagtatctggcgggaaaatga

SEQ ID NO: 516 - DNA, 567 bp, Bacteroides stercoris
gaaatgatagaagacattaaaaaagcctgccaggtaatgagggaaggcggggtgattctgtaccccaccgataccatttggggtattggttgtgacgctaccaatgaagatgcggtgcgccgtgtatatgaaataaagcagcgtcaggacagcaaagcgatgctggtgttggtggattcttccgtaaaagtggatttctatgtccgggatgttccggaggtggcgtgggatttgatagacctggcagacaaaccgttgactattatttattcgggagcgcgtaatctggcggcaaatttgctggcggaagacggaagcgtgggcatcagagtgacaaatgaagatttctccaagcgtctttgccagcagttccgtaaggcgattgtttctacttcagccaatatcagcgggcagccttcgccgaagaacttcagcgaaataagtgaggaggtaaagtcagcggtggattatatcgtaggctaccggcaggaagagatgagtaatccgaagccgtccagcattatcaagttggataaaggcggagtgattaaaataatccgtgaataa

SEQ ID NO: 517 - DNA, 573 bp, Bacteroides stercoris
aaagttaataatatgatatatagatttaccctcatctccgatgaagcggacgacttcatcagagaaatacagattgacccggaagccacgttctatgattttcacgaagccatcgtgaaatcagtaggttataccgacgaccagatgacctctttcttcatctgcgacgatgattgggaaaaggaaaaagaagttaccctcgaagaaatggacgacaatccggaaatagacagttgggtgatgaaagacactcaggtcagcgaattggtagaggacgaaaagcagaaactcctgtacgtgttcgactacatgacagaacgttgtttcttcatcgaactctccgaaatcatcaccggcaagaatatgaccggagcaaaatgcaccaagaaagccggagaggctcccaagcagaccgttgactttgaagaaatggctgctgccagcggctcgctcgacttggacgaaagtttctacggcgaccaggacttcgacatggaagacttcgataaagaaggattcggcggtttggacgatggaaccgcaggtattgcttacgaagacgacaaattctga

SEQ ID NO: 518 - DNA, 651 bp, Bacteroides stercoris
atgaaacctataatatccccttccatattgtctgccaactttgcatacctggcaaatgatattgaaatgattaacggtagtgaagccgactgggtacacgtcgatataatggacggcgtgtttgttcccaacatatctttcggttttccggtattgaagtatgtggcaaagcttgccgagaagcctttggatgtgcatctgatgattgtacagccggaaaagttcattccggaagtaaaggcgttgggggcacgtataatgaacgtgcattatgaggcatgcccacatttgcatagggtagtgcagcaaatccgcgaagcgggaatgttgccggcggttactatcaatccggctactccggtatctatgctgagagatattatcaacgatgtctatatggtgttgataatgggggtgaatccgggattcggcggtcagaaatttatagaacatactgttgataaggtacgtgagttacgcgaactgatcacagtgaccggttcggaagccctgatagaggtcgacggcggtgtcaatctggatacaggctcccgtctggtagatgcaggagccgatgccttggttgccggcaatgccgtattttctgctcccgaccctacagaagcaatccgtgctttgaaaaatctgtaa

SEQ ID NO: 519 - DNA, 528 bp, Bacteroides stercoris
atggtatgtattgaaactccccgtttgatattgcgcgattggaaagaagaagacttcattccttttgcagagatgaacgggaatccgtctgtcatggagttctttctgcatcctttgtccggggaagagtcccgcaatctttttgatactgtcaggaacgagtttcttcagtacggatatggcggatatgccattgagcaaaagtccgatggagcctttgtgggttttacgggttttcataactttatgtttgatgtggactttgctccgggtattgagatactgtggcgattaaggcaggaatattggggtcggggatatgctaccgaagcagcgaagtcatgtctggcttatgccaaggagaatcttccgttttctatggtccgggcttttacttcgctgaccaataaacattcgcaacgggtgatgcagaagatagggatggaatttgaaaagaattttatgcacccagcagtgcccgacgggcatctgctgaaagagcacgtactctataagatacaattgtaa

SEQ ID NO: 520 - DNA, 576 bp, Bacteroides stercoris
aaagcatacatcggcaaaatagttaacttcttggaaagaataaggatgagtacaatcaattacgatttgaataagataaaagccctcgcctttgatgtggacggggtgttgagcgccaatgtcattccgatgagtacggaaggcgagccgctgcgtacggtaaacataaaggatggctatgccttgcatctggctgccagacatgaaataccattggctatcattaccggtggacgcacggaagcggtgcgcaagcgtttccttgctttgggattattgccggagaatatctatatggggtcttccgtcaagatacacgattatcgcgacttccgcgaccgctacggtctgcgggatgaagaaattctatatgtaggtgatgatattcccgatattgaggtgatgcgcacttgcggtttgccttgctgtccgcgggatgccgctcctgaggtaaaatccgttgcccgctacatctcccacaaagaggggggatacggttgcggacgggatatcgtggagcagttcctgaaagtgaaaggcctttggatggcagacgagcgagccttcggttggtaa

SEQ ID NO: 521 - DNA, 711 bp, Bacteroides stercoris
atgccgaatccttattttcagttcaaacaatttaccgtccgacacgacaaatgcgccatgaaggtaggtacagacggggtgttattaggagcgtgggctccggttcaagatgttaaacgaattcttgatgtaggagcgggtagtggcttaatatccttacaattagcacagcgtaatccagaagcggtaattacctctgtcgagatagatccggcagcggcggcacaagcccaagagaatattcaatcgtccccctggagcaatcggatggaagttgtatgctgcgacttccgcaagtatcacccggaagataaattcgacctgattgtttccaacccgccttattttgttgacgccctgagatgccctgacaatcagcgctgcatggcacggcacacgagtgagctgaactatgaacttcttttggggcattcggcgcacttattatcggaacagggggttataagcattatcattccggccgaagttgaaagaacagtgattgatacggcctggaaatataattttcatccacatcgccgtttgcatgtttttaccaaacccggaaaaccttgccggcgcgtgttgctgactttcggccgacaaagcatatcatgtattgaggacagtctttacatagaaggagagaaacacgaacaatttaccccagagtacattgcgctgaccaaagacttttatttaaagatgtaa

SEQ ID NO: 522 - DNA, 630 bp, Bacteroides stercoris
atgttagtcgatttaacagtcaaagagtttttgaataaagtggcgggcagcgatcccgtccccggcggcggaagcatcgccgcattgaatggagccgtcgcttcggctttggcggcaatggttgccaacctcactatcggcaagaaaggctatgaggagcatgaagaactgatgaaacatatctccgaagtggctttgcaagtgaaagataccttcatcggcgacatagaccgcgactccgaggcctacgacagcgtatttgcctgcttcaagatgccgaaggccaccgatgaggaaaaggccgcccgcagcgcagccattcaggaagctacgaagtttgccgcacttgtgcctatgcaggtggcgcgcaatgccttcgaactgatgaccgtcattatggacgtagcccgcctgggcaaccgcaatgccgtaaccgatgcctgcgtggcaatgatgtcggcccgctctgccgtgttgggagccttgatgaatgtgcgcatcaacctcggttcgctgaaggataaggagttcgttgccaaactgcaagccgaagccgatgaactggaacgccttgcctgcgccaaagaaaaagaattgttggacgaaatcaatgaggagctcaaagtatga

SEQ ID NO: 523 - DNA, 633 bp, Bacteroides stercoris
atgaaccgtatgttacttgcgctaaagcgcccttttatctggctgtaccgattccgccaccgttgcggttacggggtgcactcgccttttgccttcaacctgataacgcacgttatctatgaaactactccttattataagtataaggagctggcttccgagcagaagaggcttatgccgcagaaagaccgggcatgggggtacgagtccttaaaggtgaaacggcttctgttccggctggtaaattatgcacagccggctacgattgtggatgcaggcatgcaggctgcctcttccttatatctgaaagctgcgaaggaaggggcggactacactgctgccgccgacctgtccgaactgtttctggagagtggcgcgtctgtcgactttttatacctgcacgattaccgccgtccggagtttgtggaagaggtgttccgtatctgtgccgaccgcactgcgcaaacgtccgtctttgtaatcgaaggtatccgttatacttcccggatgcgtgccgtttggaggcgtatcagccggcacgaaaaggcaggcatcactttcgacctttacgatctcggtattattttctttgataaaaccaggataaaacaagactatattgtcaacttttga

SEQ ID NO: 524 - DNA, 894 bp, Bacteroides stercoris
atgatacagactaaattgaaaggaatgggggtagcgctgattactccatttaaagaggatgaaagcgttgattacgatgcattgatgcgtttagtagactatcagctccaaaacaacactgattttttatgcgtacttggcactacagcagaaactccgacgctggctgaagaagaaaaaaagaaaatcaagaaaatggttatcgagcgcgtgaatgggaaaatacctattctgcttggagtaggtggaaataacactcgcgctatagtagaaactctgaagaatgacgattttaccggagtggatgccattctttctgttgttccttattataacaagccttcccaagaagggatttatcagcattataaagcgatttccgaggctatcgaccttccgattgtactttataatgtaccgggacgtaccggagtaaatatgaaagccgaaacaaccttgcgcatcgcacgcgactttaagaatgtaatagcaattaaagaagcatcgggagatatcagccagatggatgacatcataaaaaataaacccgccaattttgacgttatttcaggcgatgacggcattaccttccctctgattaccttaggagccgttggtatcatctcggtcataggaaatgcctttccgcgtgaatttagtcgtatggtacgtctggcattgcaaggagattactcaaatgcgctgaccatccaccacaaatttgcagaattattcaaattactctttgtagacggtaatccagccggagtaaaagccatgttgaatgcaatgggaatgattgagaacaaacttcgcctaccattagtgcctaccagaatcacgacttttgaagcaatgcggaagatattggatgaattgaatattaaatgctga

SEQ ID NO: 525 - DNA, 510 bp, Bacteroides stercoris
aataattattcacttaaaaacgaaaacaagatgagaagacttgcattgatcgtatgcctgcttattggcacagtggctgcccacgcgcagtttgaaaaaggaaagtggttcgtcaacccttccgttaccggacttaatttttcctacaatacggaaacggataaggctcatttcggtcttgaggtcaagggcggtgcttttttaatcgataacgtggctttgctgctggatgccggcgctacatggcaaggcggcggaacggatgtctatacgttgggtgtgggcggacgttactatttcaacaaaattggtgtatttctgggagctgatgtaaacttgaaccgttacaactgggacggtggcgataaaacccgtttcggcttcggcatggagggcggttatgctttcttcctgtcgcgtacggtcactatcgagcctgccgtttattgggatataaataaagaccgttcggagttcggtctgaaagtgggattcggtttctacttctaa

SEQ ID NO: 526 - DNA, 561 bp, Bacteroides stercoris
atggatataggaattgtatcgatgcggtatgcaaaggctctcatggagtatgccaagagcacgggtacggaagacaggctgtatacggaaatgcgcacgttgagcaggagtttcgagaagcatcctgatttgcgtgcggcattggagaaccctgtactgccggtacaggagaaattctcgcttatctgtaccgcagcagtgggggatgctcctgccgggcaggaattgtcccgtttcgttacgctgatattaaaaaacaggcgtgaggcatttctgcaatatatctgtttgagctatctggacttatacagaaagagcagacatatcggtgtagcgaaactgacgactgccgtacccgtaagtcgtgagatttgggaacgcatccgaaatagcgcttcccatctgttgcatgccaaaatggagttacagaccgatgttgacccttccatcgaaggcggatttatattcgacatcaacgatttccgtctggatgccagtattgctacccagctaaagagagtgaaacagcagttcattgataagaacagaagaattgtataa

SEQ ID NO: 527 - DNA, 651 bp, Bacteroides stercoris
atgaattatagagattggctgcaacagttgatttataagattataaatccggttgtgcatggaatgatcaaggtaggcattacgcctaattttattactactaccggattggtaatgaacatcgtggctgcatgcgtatttgtgtatgcgggcatgtataaaccgggtgagcttgcttatgtgggctggggaggaggaatagttctctttgccggtttgttcgatatgatggacgggcgcgtggcgcgtgtaggcaatatgtcttctacgttcggagcattgtatgactcggtgctcgaccgttatagcgagatggtgacgctgttcggtattttctattatctgattttgcaagggtatctgtggggatcgatgattacttttgtcgcattggtcggttcgcttatggtgagttatgtgcgtgcacgtgccgaaggattgggactggaatgtaaagtaggcttcatgcaacgtcccgagcgtgtggtgctgaccagccttggtgctttattctgtggtattttcggagattgcaaggtgttcgaccctatgctgatactgattgttcctagggccgtgatagccgttcttgctaatctgacagcattcgctcgcattgcgcattgctataaattattaaagaaacaataa

SEQ ID NO: 528 - DNA, 597 bp, Bacteroides stercoris
ttcgcaaaaaatcaaagactcatgaaaggattaagttattcgtttttgcgcgctgtgtgtgcgctggtaatcggtttggtgctggtgatgtttcccaatcaggccggtgattattttgtgataacgattggcgtcattttccttgtgccttcgcttattagtattataggatattatgctcaaaatgcagaagtgcgccgccgatttcctatcgaggggataggaagcctgttatttggactatggctggttattatgccgggcttttttgccgatttgctgacgttcgtgctgggctttatcctcgtgatgggtggtgtgcagcagatagcctcgctgtcggctgcccgcagatggacgcctgtgccgggcggattctacgttgttccggtggctatattgctggccgggctggttgcgctgttcaatcctacgggcgtgcgttccacggcgtttatcattatcggaatcaccagtctggtctatgcggtttcggaattgataaactggttcaaatttacccgtcttcgtcctaaagcacctgttgccggcagcaagagtgatgatgatatcgaagatgcaaagataatagaatga

SEQ ID NO: 529 - DNA, 486 bp, Bacteroides stercoris
tataacttagactataaacacactatgaagagagaaaaagaacaatggcttagaattttcaacggcgtgatgttcggtgcattgattttattggggttcgcatattgcgatgaaaacagtatgggggcaggaagtgagaattgtacttcttatgccaaatatgaattcagaggtaaagtactgggagagagccggcaggttgtgcccgatgccagaattctggtaaagcatatagcttctcctgccgacggttcatatggctatgctgttttatccgatacggtttataccaaagaaaacggagagtatctttatcagaataccataaccggttatcaggacttccgtattatctgtgaggaccttaccggggtttaccagactgattctgtggatataaagatgaatccgaaaggtggaaacggcaggtatgaaggtaaagataacagagaggtagtctttaaactgaaaaagagggctatataa

SEQ ID NO: 530 - DNA, 1020 bp, Bacteroides stercoris
atgagtacaataatcttaggaattgaatcttcatgtgatgacacttccgcagcggttatcaaggatggctacctgctgtcgaatgtcgttgccagtcaggctgttcacgaagcttatggtggggtagtgcccgaactggcttcgcgtgcgcatcaacagaatatagtgccggtggtgcacgaggctttgaaacgtgccggagttaccaaggaagaattaagtgccgtggcgtttacgcgcggtccggggctgatggggtctttgctggtgggtgtgtcctttgccaaagggttcgcccgtgcgttggggatacctatgatagatgtcaatcacttgaccggacatgtattagctcattttattaaagcggaaggtgaagaaaacgtgcagccggaatttcctttcctttgcctgctggtttccggtggtaactctcagattattttagtaaaggcctacaacgacatggaaatcctggggcagacaattgatgatgctgcaggtgaagccatcgacaaatgctccaaagttatggggctgggctatcccggcggaccgattatcgaccggcttgcccgccagggaaatcctaaagcctttactttcagcaaaccgcatattcccggactggattacagcttcagcggcttgaagacttcgtttctgtattccttgcgcgactggataaaggatgaccccgatttcatcgaacatcacaagacagacctggcagcgtcgctggaagctactgttgtcgatattctgatggataagttgcgtaaagcggcaaaacagtacaagataaaggatgtggccgttgcaggtggtgtatcggcaaacaatggtctgcgaaattcattccgcgaacatgctgagaagtatggatggaatattttcattcccaagttcagctatacaacggataatgctgcgatgattgccataaccggatacttcaagtatttggataaggatttctgtccgatggaagcgccggcttattcacgtgtcactttataa

SEQ ID NO: 531 - DNA, 867 bp, Bacteroides stercoris
aagaacaataaactaacgaataataatcgaaatatgaaatttataggtgcacatgtatctgccggcggcggtgtggagctggctcccgtcaatgcccatggaataggagcgaatgcttttgccctgtttaccaagaatcagcgtcagtgggtggcgaagcccttgacgcaggaaagtattgccttgtttaaggagaattgcaggaaatatgctttggaggcacgttatattcttccacacgacagttatctgataaatctgggacatcccgaagaagaagggctggagaagagccgtgcagcttttctggatgagatgcgacgttgtgaggaactggggctggaattgctgaatttccatccgggcagccatttaaataaaatttcggttgaggcttgcctggacagggttgccgaatcgattaatattaccttaggcaagacgcaaagcgtaacggcggtcattgaaaatacggcaggacagggcagcaatgtaggcaatgagttttggcaactgaaacatatcatcgaccgtgtggaagacaagtcgcgtgtaggtgtctgccttgatacgtgccatacgtatacggcgggttatgatatcgtaaatgaatacgacaaggttttcgacgaattcgataagaccgttggcttcggttttctgcgcgccatacacttgaacgattcgaaaaaagcgttgggtagccgtgtagaccgtcacgacagtatcggcaaggggcttatcggcttggatttcttcaaacgttttatgaaagacgagcgttttaacgatatgccggtgatactcgaaactccggatgaaacgctttgggcggaagaaatcagcatgttgcgtagttttgaataa

SEQ ID NO: 532 - DNA, 774 bp, Bacteroides stercoris
atgaaacaagtgtacattatcaacgagaaccatccccagttactccttttctttgccggttgggcagcggacgaaactcccttcaagcagtaccgtcccaaagacatggactacatgatttgctatgactaccgcacgctggacttcgactattccatcttcgaccgttaccggcaagtaaacgtggtagcctggtccatgggtgtgtggatgggctctctcatactgagccaagtctcccgggacaaggtgttcagcctggcgttcaacggaactacataccccatcgacaatctggaaggtatccccgtgaacacctttcaggctactctcaacgggcttacccccgcaacgctccagaagttcctgcgccgcatgtgcaaggacagcaacgcctacaaggcattcatggaagtgactccccgacgggacttcgacgaaataaaggaagaactgaggctcattctggagcggtacttcgatatgttcggagacgcaaataacaaaagttacgacgaggaaaaggaagataagtatgaggcaaacatcgaaaagtataactacgaatacaactacgccttcatcggcaagaacgaccggattttcccgcccgaaaacatggagatgaacttttgcgacctgatagactgccatccggtcctgacggacaacgcacactatgacgagtccatgttccgctttctgctgcaagatatgtgggagatgactgccagtgaattcagatatcatgtcaaaaccataaatattgaatga

SEQ ID NO: 533 - DNA, 852 bp, Bacteroides stercoris
aggagcgttggtatcggactttcgctcctttttttattttatattgttccggagtttgcggagttttcttatttttgccggtataatgcaaaaaacaaagccatgaaggagtatttatttgaagtctgcgcaaactccgtagagagttgcatcgccgcccaagccggcggagccaatcgggtagaattatgcgccgggatacccgaagggggaacaaccccttcctacggtgatattgtcatagcgagagaagtcttgcaaaacaccaggttgcacgtcatcatccgcccccgcagcggtgatttcctgtattcccctatcgagcaacgtatcatgctaaaggacatagacaatgcccgccgtttaggggcagacggtattgttttaggctgtctgacggcagatggagaagtggatattcctctaatgaagcagtttatggaagctacccaagacatatcggtaacttttcaccgggctttcgatgtttgccgcaatccgcaaaaggcgttggaagatattatcagcctcggatgtgaccgtatcctgacttccggtcagcaacccaccgccgaagcgggcattcctctattgaaagaactccagttgcaggcagcaggacgcattaccttactcgccggttgcggagtaaatgagaacaacatcgcacggattgcccgtgaaacgggtatccacgaatttcatttctctgcaagggaaaccgtagcgagccgtatgcaataccgcaaagaacgggtaccgatgggggcaaccgtacaaatcaatgaatttgagcggaatgtgacaacccaagaaagagtaaaagccacaatcgcccaaataaccgaatga

SEQ ID NO: 534 - DNA, 1062 bp, Bacteroides stercoris
atgaatagattgactgaagctttattggattggtacgcggataataaacgtgatttgccttggagaggcactactgatccctaccggatatggatttctgagattattttgcagcagacgagagtggtacaaggatatgagtattttcttcgttttatccgccgttttcctgatgtgagaactttggcttcggcttcggaagacgaggtcttgaagtattggcagggattgggatattattctcgtgcccgtaatctgcatgctgctgctaagagtatgaacggtaagtttccggaaagctatcaggaagtgcgggctttgaaaggggtaggggattatacggctgccgccatttgttccatagcctataatatgccctatgcggtagtggacggaaatgtgtatcgagtgctttcccgttattgcggcattgatgtgcctattgactctacggaaggaaagaagctctttgctgctttagctgatgaaatgctcgataaatcccgcccggctgcttataatcaagctataatggattttggggctattcagtgtacgccacagtctcctaactgtatgttttgtcctttggcggatagttgttccgccttatcgaaagggctggttatgcaacttcccgtgaagcaacacagaataaagacgtccaaccgttattttaattatatatatgtacgcatgggcgcgtgtacctttatacataaacgaacggctgatgatatttggaaaaacctgtttgaattgccattggttgaaacggatagaaatctatcggaagaggaatttttatcatcggcatcctttcgctcacttatagcggaaggagaggtaccggaagtacgtttggtgtttcgaaatgtgaaacatgtgctgtcccatcgggtgatatacgctaacttttatgaagtcgttttgccggagaactcccgttctttttcggaataccagtgtatcagaatggaagatttggagcggtatcggtatctcgcttggtacatgcttttttggagaagtatttataaaagttggctgtattctgcatga

SEQ ID NO: 535 - DNA, 996 bp, Bacteroides stercoris
atggctgaaacaattgatatccgcgaattgaacgagcggattgaaagacaaagtgctttcgttaccaatcttactacgggcatggaccaggttattgtaggacaaaagcacctggtagagtcgttgttaatcggtttgttgtctgacggacatgtgttgttggaaggtgtgcccggtttggcaaaaacattggctatcaaaacactggcttcattgattgatgcacaatatagccgtattcagtttacacctgacttgttgccggcggacgttatcggtacgatggtttacagccagaaagatgaaacttttcaggtaaagaaaggacctgtatttgctaattttgtattggccgatgaaattaaccgtgctccggccaaggtgcaaagtgctttattggaagctatgcaggaacgtcaggttaccataggtaaggaaacattcagactgcctgaaccttttttggtgcttgcaactcagaatcctatcgaacaagagggtacgtatccgttgcctgaagcgcaggtagaccgtttcatgctgaaggtagttatcgactatcctaaactggaagaagaaaaattaattatacgccagaatataaacggagaaagactgaatgtaaagcctattctgaaagcagacgagattatcgaagcgcgtaaggttgtacgtcaggtatatctggatgaaaagattgaaaaatatattgtcgatattgtatttgcaacccgttatccggagaagtatgatttgaaggagctgaaagatatgatcggattcggcggttcgcctcgtgcatctatcaatctggcattggcggcacgcagttatgccttcatcaaacgccgtggctatgttatcccggaagatgtgcgcgcagtggcacatgatgtattgcgccaccgcatcggcctgacttatgaagctgaagcaagcaatatgacttcggatgaaatcgtcagcaaaatattgaataaggttgaagtgccctaa

SEQ ID NO: 536 - DNA, 669 bp, Bacteroides stercoris
gataatataatgaaagttatcaactttgccgagactaactcagtcttgaaccaatacatggcggagatacgcgatgtgcaagtacagtccgaccgtatgcgtttccgccggaacatcgaacgcatcggcgaaatcatggcgtacgaaatgagtaaggaactcacctattccgaaaagcaggtacaaacgccgctggggatagctcccgtcagcactttcgatgatgatgtggtgattgccaccgtcttccgtgccgggcttcccttgcatgccggtttcctgaatgtgttcgaccgtgcgggcaatgctttcgtttccgcttaccgttattataaggataaagagtgccgtacggtggatgtgcacatagagtatatcgctactcccgacctttccggcaagactctgttactggttgacccgatgcttgctacgggcgaaagcatggaacttgcctggaaggctttccttaccaagggtacgcctgccaaactgcagattgcctgcgtcattgccagccggcagggagtagagcatttgcagaaactcttccccggcgacgaggtttccttgtggtgcggcgctatcgacccggatatgaacgagcattcgtatatagtaccggggctgggcgatgccggagacttggcattcggcgacaagctgtaa

SEQ ID NO: 537 - DNA, 1146 bp, Bacteroides stercoris
cttttccaaacaaagagatataaatactggcatagttttataacactttgctattattttagagatatattactatctttgcatggtaattatgtaagaattgagcgtatgtccccaaataatacttccgttttgttaatttacaccggtggcactatcggcatgatagaaaatgcggaaaccggagctttggagagcttcaacttcgaacatttacagaagcatgtacccgagcttcagaattttacgttccgcattgatacctatcagttcgatccgcctatggattcttcggatatggatccggatgcctggcgcaaactcgtacgcattatcagcgacaactacaatcaatatacgggctttgtcatccttcacggcacggataccatggcctacacggcatccgctctcagctttatgctcgagggcctcaacaagcccgtcatcctcacgggttcgcagcttcctatcggcgtgctccgtaccgacggtaaagaaaatctgctgacaagtatcgaaattgccactgcccggcatcccaacggccggcctatcgtaccggaagtatgtatcttctttgagaatcacttgacacgcggcaaccgtaccaccaaaataaatgcggagaacttcaatgctttccgctcgtacaattaccctgtacttgcttctgccggcatacatattaaatataataatgtgcagattcatacggagaacgtacaaagagagttacagccacactacctgctcgataccaatatagccatattgaagctcttccccggcattcaggaaaacgtagtggatgccattctcgccataaagggactgaaagctgtggtgctggaaacttacggttcgggcaatgctccgttgaaagagtggtttctccatcatctgcacaatgcctgcgaacaaggcattatcattgtaaacgttacccaatgcagcgccggtacggtagaaatggagcgttatgaaacaggataccgtctgatgcaggcaggcgtggtgtgcggatacgacagcacaacagagtccgctgtaaccaaactgatgttcctgttaggccacaactatccccccgcaaaagtacgcgacctgatgagccgccctcttgcaggtgagataacgatatag

SEQ ID NO: 538 - DNA, 933 bp, Bacteroides stercoris
atgaataaaacaaaaatcggaatattcctttcattgatgctggtgctggggttctgttcttcttgtggagaaaaggagtcaaactctaaactgttgctgaatgaagtgcttatcaccaacgaaagcaactttcaggatgattacggtgttcacagcgcatggattgagatattcaacaaatcatatggcagcgccgaccttgcaggttgctatctgaaattcagcagccaaccgggtgacaccgctacctatttcatcccgaaaggtgatgtcctgactttggtaaaacctcgtcagcacgcgctgttttgggcagacggagaacctaatcgcggtactttccataccaactttaagttagacagccagaacgccaattggatcggcttatacgattccggcaagaaattactggaccagattgtggtacccgccggaacattacaagccaaccaatcttatgcacgtgtcagtgatgccactccggaatgggaagtaaaaggagatgcgtccgataagtatgtaactccaagcaccaataacaaaaccattgacagcaatgctaaaatggagaagtttgaagagcatgacagtataggtatcggtatggctatttccgccatgagtgtagtattttccggattactccttctttatatctctttcaagattataggcaagatttctgtaaacctcagcaaacgtaacgcaatgcgcgctaagggcattaccgataaaaaagaggctaaagaaaaacaactgggagaagcaccgggtgaagtattcgcagccatttccctggcattgcacgaaatgcagagtgatgtacacgatgtggaagacaccgtactcaccattacccgcgtaaaacgcagctattcaccttggagttcaaagatttacacgttgcgtgaaacccctcagagaaagtaa

SEQ ID NO: 539 - DNA, 996 bp, Bacteroides stercoris
gtcataacgcatgtgttattttcaagaaatacgcagaataatacggtcgtgttacgtaatcaaatagataaaataaggctcttattccataaggacagagagtcttatttttgtttttataagatactcggattctttccccgtaacatccggttctatgagcaagcactgcttcacaaatccacttccatccgttccgaaaaaggacgtccgttaaataacgagcggctggaatttttaggcgacgccattttggatgccattgtcggtgatatagtatataagcactttgaaggacgcagggaaggctttcttaccaatacccgttctaaaatcgtgcaacgggaaactctaaacaaactggctgtggagataggactggacaaacttgtcaaatattccacccgttcttcatcgcacaacagctatatgtacggcaatgcttttgaggcatttatcggagctatctacttggaccaaggctatgaacgctgcaagcagttcatggagaaaaaaatcctcaagaactacatcgacctcgacaagatgtcgcgcaaggaagtcaacttcaagtccaaacttatcgaatggagccagaaaaccaaaatggaggtttcctttgagttgatagagcaattcctcgaccaggattacaacccgatgttccatacagaagtccgcatagagagcctttctgccggtactggcacaggctattccaaaaaggagtcacagcaaaatgccgcacaaatggcattgaagaaaatcaagagtgacgaagccttcaaagaagctattgaaacagccaagatacagaaccacgcggcaaaggaaaatatggcaacagaggaaacccaaattgtcgcagaagagacttctgctgtagagacatcagaagttcttgaagctacagattatacggaacctacggatactgcacaagatacagccaaatcatccgaaacaaatccccatacgcttgccctgaacgactaa

SEQ ID NO: 540 - DNA, 645 bp, Bacteroides stercoris
atggaccacattcatttacagcataccctgccccaggtctttgccggccgtgacaccgtcatttcacaggtgtggcatcaggacatcgtgttcgacaaaggaaagcgctatctgatagaggcttcctccggcaccggaaaatcctccctgtgcagctatatctacgggtatcggcgcgactatcagggcatcatcagtttcgacggacgcaacatccgctcattctccgtcggcgaatgggcagatataaggaaacattcgctcagcatccttttccaggaactgcgtatcttccccgagctgaccgctcttgagaacgtcttgttaaagaaccgcctgaccaaccataagaagaaaaaagaaattctcgcccttttcgaagcaaccggcattcccgacaaaaccgacgaaagagccggcaagctttccttcgggcagcagcaacgcgtcgcttttatccgcagcctttgccagccgttcgactttatcttcctggacgagcccatcagccacctagacaatgacaacagtgccataatgagccggttgctcatggaagaggcgggcaagcagggagcaggaattattgtcacatccatcgggaaacacctggagctcgaatacgatgaaaccttccgcctataa

SEQ ID NO: 541 - DNA, 372 bp, Bacteroides stercoris
ctgtgtattttttatactctctgtttacgctatctttgccgcaaagaaagactttatcttatgaatcggactacttttctgcaagatgtttacagtgttgttgccgctattcctgaaggatgcgttgtaacctacgggcagattgccagtttggtaggcagacctcagtgctcgcgtatggtggggcaggctatgcacaacgtaccggaggaattgcatttgccttgtcatagggttgtaaacagccggggcagattagtgccgggttggacggagcaaagagtattgttggagaatgaaggtgtccggtttaagacaaacggctttgtagatatgaaaaagtctcaatgggaatttatgaaagaacaataa

SEQ ID NO: 542 - DNA, 639 bp, Bacteroides stercoris
atggcaattcattttgaatggtatgagaatccggttccaccaaaccggccggatgagaaaaaactccatgcacgcattacgtacaatggaaaggtagggacagactacgtgaggcgtaaaatccaggagcgttgttcgctgacggaaacggatgtaacggctgtgcttgatgcactgtcgcatgtgttggggcaggaattgggcgacggacgccaagtgcatctggacgggataggctattttcatcctacgctgaaatgtatagaagaggtgacggcagagacgaaacgcaaaaataccaaagttcgtttaaaaggtatcaagtttcgtgccgaccaggcattgaagaacgaagtaggagctgtaaagcttaaaaatatcaagcatgacgggcactccagaaagttatcggacgtggaaatagacatgtgtctccgtgcttattttgccgaccatcagctgatgacccgtgcagacttccaacagatttgcggatttatgaggtcgaaggctatggaacatatccgcagattgaagttggaaggaaaaatacggaatataggactgcctacacaaccgatatacgtacccgtggagggatattacgggataagcagggataggattgtccggaaatga

SEQ ID NO: 543 - DNA, 507 bp, Bacteroides stercoris
aatagagaaaatgatttaaccatgaaagcattagtcagatttataatattcggggctgttcttttccctgttttcagtatagcaatatcctgttcggaagaagcggactgttcaatgacaacgcgagccatgatgcaatgttacctatatacattggatcctgacaccaaagtggtatccaatgataccttagactctttgacggttactgcctttggcacggattccgtcatcatcaacaatcaaaaaaaagtgcacgatctctcgttgccactgagatataccgccgactccaccgtactcgtgtttcattacagcaagacattgacagatacgcttgttattcaccaaaccaacacaccttacttcttgtcaatggattgcggttatcaaatgaaacaagccataacagatgtccgatacagtcgccacagtcttgattctattcgcgttgcaaataaagaagccggaatttatggagcagaaaatcttaaactattctattag

SEQ ID NO: 544 - DNA, 1410 bp, Bacteroides stercoris
atgaaacaggttataagaagacatgtaactgtactgctggtcatatttctagtaagtacagtttgggcgcaacaggcaaagtatgtattttatttcattggagatggaatgggggtaaaccaagtgaatgctgctgagatgtatctggcggaacaggaagggcttattggagtaaagtcgcttttgttcaccacatttccggcaggtactgtggctacaactttctccgccactaattccgtgaccgattcttcagcagccggtacggcgcttgccaccggtgcaaagacatacaatggggctattggtatggacgatgatgaaaacgccttgcagacagttgccgagaaagccaagaaagcaggcaggaaagtcggtgtcactaccagtgtcagtgtagaccacgctaccccggcggcattctatgcccaccagcccaaccgtagcatgtattacgaaattgcgcttgacctgccgaaggccggtttcgacttttacgcaggcggcggtttcctgaaacccgctacgacagccgataagaaagatgcgccgagtatcttccccattatagaggaagcgggatataccattgccaggggattggacgaatacaaagcaaaggctgcggatgcagggaaaatggtgcttatccaggaagagggtgccgtaccttcctgcctgccttatgccatcgaccgcaaggaaggtgaccttaccttgccggagattaccgaaagtgctatttcgttcctgacaaaaggaaacaataaaggattcttccttatggtggaaggcggtaagatagactgggcttgccacggcaatgaccctgccaccgtttttgaggaagttatcgatttggataatgcggtaaaagtggcttatgagttctacaagaagcacccgaaagagactttgattgttgtgactgccgaccacgaaaccggcggcatgagtctgggtaccggaagatatgagttgcgcctgaaagcattgacgaatcaggaacagtcgcaagaccttctttccaaggcaattaccgatttgcggaaagattccgacaaggcttcctgggaggaagtgaaggcgctgcttgccgataagatgggattttgggaagagttgcctttgacttgggagcaggaaaagatgctccgtgatgaatacgagacgtcttttgtgaagaataaggttgtctttgaagagagcctgtacgccaagaccgaacctttggctgctgctgcccggaaagtgatgagccagatagcaatggtaggatggaccggttcgggccatacggccggatatgtacctgtctttgcaataggtgcgggctccgatttgtttgtcggtaagatggataatacggaaattccgaaacgcattgcgaaagcggcggggtataaataa

SEQ ID NO: 545 - DNA, 567 bp, Bacteroides stercoris
atgattaatgcccaagacattaaaatcggaacttgcatccgcatggacggcaagctttatttctgcatcgacttcctgcatgtgaagccgggaaaaggtaatactttcatgcgtaccaagctgaaagatgtagtcaacggctatgtgctggaacgccgcttcaacatcggtgaaaagctggaagacgtacgcgtagaacgccgtccgcaccaatatctctatcacgacggtgacaactaccagtttatgaaccaggaaactttcgaccagattcccatcgcccacgacctgattaacggtgtggacttcctgctcgaaggaatggttgtagacgttgtgtccgatgcttctaccgaaaccgtgctgtatgctgacgtacccgtgaaggttcagatgaagattacttacaccgaaccgggtctgaaaggcgatacggctaccaacacgctgaaacctgcaaccgtagaatccggcgcaaccgtacgtgtaccgttgttcatcaacgaaggcgagactatcgaaattgacactcgcgacggttcttacgtaagccgcgtaaaagcataa

SEQ ID NO: 546 - DNA, 684 bp, Bacteroides stercoris
atggcagaacaaaaaaagacgaacgaagccttaaatgtggaagacgcacttacacaatcagaggcatttctcatcaaaaacaaaaagacaattattggtgctattttagctataatcatcattatagcaggtatagtaatgtacaagaacctctatgcagcacctcgtgaggaaaaagcacaggcagccctttttaaaggacaagaatattttgaagccgatgcttttgcagaagccctgaacggtgacagcatcggttacgtaggtttcatcaagatagccgaccaatacagcggtacagatgcagctaaccttgctaaggcatatgctggtctttgctatgcacatcttggcaaatttgatgaagctgtaaaagcattggagagctttgacggagatgaccaaatggtagctcctgcaatgaaaggcgctatgggtaattgctacgctcaactcggtcaactcgataaggcatcttccatgttgctgaaagcagctgatgaagcagataataatacacttagccctatctatctgaagcaagccggagaaattctggttaagcagggtaagtatgacgatgccatcaaagcatatacttctattaaggataaatacttccgttcatatcaagctatggacattgataaatacatcgaacaagctaagctcttaaagaagtaa

SEQ ID NO: 547 - DNA, 1053 bp, Bacteroides stercoris
atgaagaaaaaaatgatatgggtggccggcattctaatagctacaagtgcctatgcccaaacagatgtcagcaccggtattatgcgcggtaaagactacggagtaacttatctcctgcctaaaaccgaaatagaaattgtagtacaggctaccaaacatacatacatgcccggagagttctgtaaatatgccgaccgctacttacgcatgaacaatgtatctgccgatccgaatatctattggaccatcgacaaagtacaaacacacgtggcgggagtacccgataaagataatgtatacttcgttaagttgaaagataagactgtagccccactaatggaacttactgaagacggcattgtccgttccatcaacataccgcttaacagccatacgataccggcaaccaaaataaccgctgccgcacaagaaaccatagatccgcgtaaattccttacggaagaaatactcatggcaagttccagagctaaaatggcggagttggtagccaaggaaatctataacatccgtgaaagcaaaaatgcccttctccgtggtgaagccgacaatatgccgcaggatggcgcccaactcaaaatcatgctcgacaacctcaacttacaggaacgtgctatgacggagatgttctccggaaccttgaaagaagaacctcagacgtttacaatccgcctgactcccaaagaaatgaacaatgaagtagctttccgcttctccaaacgattgggcatagtggcaaacgatgatttggcaggcgaaccatattatatctccataaccgatttgaagactcccgccattccggaagaagacagtaagaaaaaagtagacggagttgcttacaacgttccaggacgcgcccatgttatattaacaggcaacaacaagaagatattcgatggtgaactgcccgttacacaatttggtactatagaatatcttgcacctgtactattcaataaaaattctactataaaagttttgttcgatacagctaccggtggattaatcaaggtagacagagaaagcaattag

SEQ ID NO: 548 - DNA, 435 bp, Bacteroides stercoris
ccgaaaatgaagataatcttgtcctatataatggccactatcatccttctttttcttcttgcattgcccattgcaggagtagtagcctacatacggttaatccgtaaaatgcgcagagagcagataactgccattccgaaattctccttattcatgctttttcttatctgcggaactttgctcatggaaattctgttaggaataagcggcatgtggtcgggagcatcgacagcgagattcatattcctgctgttcgttgctcccgccttgtgtggaatgatagcctggcggcatcggcatcatagcgaaatatccaaataccactgcactattttgcatgcagcattagggtatttgctgggcgaagcggttctgataggtgcagtcagcttgtttatcatcggagaactggcttatatggcgctgatcggttag

SEQ ID NO: 549 - DNA, 438 bp, Bacteroides stercoris
ttatatttgcacactgttatgggcagatatttgaaaatcataggactcttggtgcttgcgttggctttgtggcagacgtcgggcactgtacctacttccgatggcggggtgagtacaggagattctacggatattcaggcggtgactgccgctcattctcaggatggcacatgctttacttcacctcagttgccctatctgccggtagcggagctggcgagtaacagcggtcatctgcactcgcttgccatgtcccgcattcagcgttcctatactgccgaatacatcttttcactaaaggactgggtggataaacttgcccggcgcgaagcggttctgtctttgcataaagagaagctttatgattccaccgcttactatggttgcaagcctgtgtgtgaatactatattttcacactgaggcggattctgatttaa

SEQ ID NO: 550 - DNA, 1128 bp, Bacteroides stercoris
atgttttcagacgaattagagaaaatatcctgggaagagacgacccggcgcatcaatgccaaaacagatgcggacgtgcgtcgtgccctatccaaagaacattgtgacgtagaggattttatggcgctcatctcaccggctgccgtcccctatctggaaacaatggcacgtttaagcaagaagtacacggacgatcgtttcggaaagacgatttccatgtttgtgccgttgtatattacgaactcctgtaccaactcgtgcgtgtactgcggtttccacatcagcaatcccatgccccgcaccatactgacggaagaggagattgtaaacgaatacaaggctatcaagaagctcgcgccgtttgaaaacctgctgctggttacgggtgaaaatcctgccaaagccggtgttccgtacatcgcccgcgcgctcgatttggcaaaaccttatttcagcaacctgaagattgaggtaatgcccctgaaagccgaagagtatgccgagttgaaagagcatggcatgaacggcgttatctgttttcaggaaacctaccacaaggcaaactataacatctatcacccgcgcggcatgaagtccagattcgaatggcgtgtcaacggtttcgaccgcatggggcaggcaggcgtacattccatcggcatgggtgtgctgataggtctggagaaagaatggagaacggatatctgtatgatggcgtatcacctgcgctatcttcagaagcattactggaaaacgaaatacagcgtcaacttcccgcgtatgcgcccttcggaaaacggcggtttccagcccaatgtggtaatgagcgaccgcgaactggcacaagtcacatttgccatgcggatattcgaccatgatgtggacatatcctactctacccgcgaaccggcttttatacgcgaccacatggccactctgggagtcactaccatgagcgcggaaagcaaaacggaaccgggcggatattacagctatccgcagactttggagcaattccacgtcagcgacgagcgcaaggccgtagaagtagacaaagccttaaagagtttaggacgcgaacccgtatggaaagactgggatgccagtttcgacctgaaacgggtttga

SEQ ID NO: 551 - DNA, 6699 bp, Ruminococcus torques 1
atggggagaaaaaacagaatatttaaggggaatctgaaagcatcgcaaatcttggcggtgcttatgttgatcgttatgatcatccggccgattatggaagtctcggcaaaaccaggtgaaattacaacagaaaacccttccgcagaggtggggaaggaaggagaaagtctgtccgacggaatagatgggagcgccctatatccgttagaagagaatgggcaaaacgggcagacgtctgaaaacgatgctgtacggcaaaacgggcagacgtctgatgagacagacgcgaagaacagtccgaatgcatcggatagaacggtttctgaaggatcatcggaagaagagaacatgatatctgcgcagcaggaaagcttgtgcaatgatgaatattgttctcacatctattatgatctggatgggaggcaacatgcgctctgtgctctcggggagcggatgacagagacggatgtttacagaacagtggaagacagcgcggtatatgaagcaatgtattttgcaagtatcccgaacttgtatgaggcaagtgcgttcggcggagcgacaacgtttgagaaactgcatgtaaatacagtctacgcattgttttataaagaagatccgattgaaccggggaatgcggggaaaaaggaaataccgaagacatatcgaatgatcagcgtcgacgaagcgggactgttcggaacggtaataccggaaggctgttcttatgttgcgtttgagatggaagtaacgaataaaaacggagaagcgagagaaatagactctcagatcgtatacaatctgcgtcaggccgcaaatccgaacgacccttatcatgagataaaaaaagagccggtaatagacgccgccggagaggtaaagcaaagaggatcgggatcttttgtatttacgcaaaagacaagagactgcttttactgggacatgtcctatcacacgtcctactggggaggtcatccgtcatcaagtaataacatcttggatgaactggcgatctatgttgataatgacaaagacggaaattatgatacgaaaacagataaagtgtgggatgagttatgggtatcttacgcagataaaaacggaaagatcgtatcaaagaaagttacaagagagacccgctatgaattatgtacttattatgcgtttggaaaaggatcaggtctgacagaactgtcgcttctggcaatttcaaacggagagcttaatgaaaaaggcggtttcaaacatccttccgataataaagaagacgataaagtatattatcagttatataatattgcatcaggcgataactttttcattctgaggaacttggatgacagtcatcgtatttggagaagttatgaaacagacggcgaccggtatgtcgcgtttaaagatcagatgtacggaacgtcgggagcgctcgttgcaagtggcgtagaaggcgggaaaacagaagcggcggatacggtggaatatcgtctttgcgaaaacccggaagacgggcaggcagtggaaaccgaatggaaaaagatggatcaggcgctgccggaatcttcgggaacgggtcaggcaagcgaagatatggaaaatgaagttttttataaaacattttttacacatgaaaaactgtcggataaagaaaagtatattcaatttcgtatatgtgaaaacagagcagacggcaaagttgtaaaatataagacggatataactgagattgacgatacttatgcttttccatgctttttcgcagacgtacttcagaagaaaagtttaagttatacgagtgagcagtcgaaaatcaacggaacatggagttcgatctttaaggcgagcgatcacggagatgagggaaagaacattccgatagcgaaaaacaagtcgtatgatccaaaatactattacgcaaatacgacgttttatgattattattcggattatgaacttcaaggaaaaagattgagcgaagtaaacggatcgccgtacgaatatgaaacgagtttcggaatattgaacgacggcatctccaagtatttccaagggaaaaatgaaaaagcggcggcgtggtattatggaaaatatatcaggcatccggctgtaacagacggggataatccgctaaataattcttctccgggcaatatgtcgggaaatcagatcggaccgaatgactggcattcgggaaatacgttaaagtatgcttacgggcatgtcgataaacaactggaagatggaaaaatctcaactgcaggtgtgaaacttccgcagtttgacgagagttttcttcgcggaaacaatgcgtttcactcggcgctgggatacgtgtataataacgtttcatttccgtttttccttgcagatgacggctattgggagtacagtagtttgaagtccgatcatgtgctgcggttaaaagaagatcccgataaaggctattatttagacgtaggagaaaaggaagacgcgctgaaaacaggtgacagagatgtcacaatgggaaaagatcaattcggatttttcccgtttaatgacaaaaacgacgcaacgaaagaaaactcgttttaccggttggataggatgaaaacgaatttctgcttcggtatgaagatggaactggaatttaagctgacggaagacggaaaagtgcgtatgccgggagaaaaggcaggagaatatattgagaagccgattgaatttgagttttcgggagacgatgatttcttattgtatatcgacggaaaacttgtacttgatatggcagggaaacataatcctctggaaggtcatattaactttgagaccggagcggtagatgtgtacggattaaataaagacggtgcaacagaggacggatatccgatcaataaaaatcagcatcatgcacaggcgaatatttatgaaaaaaatgatgcgaacggtccgtgtttagatatggaagaactttcgcaaggcatacataagatcacgattttttatgcggagcgcggagcgggtgtttccaacttaaagatccgttttaatttcccgaaaacgaatcagcttgatctgacgaatcaggtaagcactgcttcggcaaatcaggacgtattcggaaaagcattaggatatatcggaagttttacttataaaatattgaatcaggcgacaagcggaaggcagattcccgtggaagattcggtaggttatctccgtaacgaaggcgctgttaagtttaacgattttaaaaacagcggaacatacagagggtctaagaccggagaaagtgagctcaaagaagcagatccggacgcagagacagacggcccgattatcggtgagcgcagcgatgtgataaagcttgtgaataaagacagcggcaaaaatctcgatcagtatcagatgtcggaagaaattgcttcgggaaaatactggacaacgatcgactgtgcggagaacggaggcagtgtggatctgtcaaaagcggcatatcttcaaatgtcagtttataataactcggatgcttccagcgctaccgggtggtcgttaaaagcgagactgacagaccggcacggaaatgtgatcaccagacctgccagtcagatgacgtattatggatacagtaattcgatgccgaaaggccagtggtcgatcgttcgtctgaatctggcagactggaattcgggaatatcggattttgatatgaaaaatgtcgccaaagtgcagttcgcctttgcgcgtgacagaggaagtctgtatatggcggatatggattttaaaggaaagatcattccgaaccaatcgaccggattttatgcaagcgacgatcagatttcagattatgaatcgctgggaacaaaagagcggcctcttagctataatgaggcggtcttaaatccggtaagcggagcgttcttccggttgaatccgatacaggaaacagatgttgtgaacaacggaaatgacctcatggtcagatcgagaggactgttggagcttacagatggaaacaaagcgtcttttgtcgataaattccgtgagggaagttatttgcagatcacacaagacgatccgctgagaaacaaagtatttcggacttcgtggtcgattttggaaaatgcggtatatgacggtgcgtcgggaatgtatacggaaggttatattgcggataacattcttgcgctgcatccgacggcaagaacggtggaaaatgatccggagattttgaataatacagtgacggatgtaagaacatatacggcgtcagacgacagaaatgtaaagagcgcggacggaaaagggtatcactatccgagttcaaacagagaaggacatgtatcggaaaagaacgagacttttgttttcagaagctatctcgatcctgacaaccttcagaaaaacgggatccatctgactgtggcgtataaaaacgatctgatcagcggaggactgatcattacaaaaaccgtcgatcagatcgatccgaaaaaagatcatacatataaatttcatgttcattatactgacgtagccggaatgagccttgaaggaaatctcggatcgggaagcatgtcggaaagcggaagcagtattgttcaggaaatcgacgtaactgttccggcgggaaaacagactgcaagcgtagcagtgtacggtattccgaaagagactgtatatacgatccacgaggaaaatgagataccgcaaaatatcgagatcggcgggaattatacttatcctcaaaacgtggcaaaaaatttcgtgcagacagatcctgacagaggcggtgtacgcacaggtgatgagtatgaccacaaggtgaaggtgggaacaaagaaatataatgtgaacggaacggaagtcgaatataaaacggcggaaggtacaatgaaagaaagcgtacaggaagttacgtttgcgaataaacaagtgcctgctcacggagaaattaagattacgaaaaaacttcagggaaaagcgtatggggaagagcggggttatttgttccatatccattataaaacaacggatgaaaacaataaggaaaaggtcgttgtcgttccgcagactgtagttgtaaaagcaggggaattgacaggaagtactgtctatgaaaatatcccgcttggcgcacaatatgaagtacatgaagtagatgaaaccgctcttctgactttggaagcggacgcaggatcaacggtattgggaagtgatgacccactttcggataccgaacagaatcattctcatacagatgtaaaagcagagaagaagcatatttcgatcattccggaagaagaaggggcgatcggaagcgaatgtgcgaagaaagggttttggacagcgcagggcggaacgggagaaagccgtcataattttacgtttacaaatatcggctctcataatgttgcggtcttgaaaacagacagttcccgaaacgtgcctttggaaaacgcaggttttacgctttatgatacggaagataatatcgttcaaaaccggacggccgtttatatgtggcaaaatgagatcagtataagcgatccgaattatgacagttcgagcggaaggtatcatcggggagatacgtcttatacggtatatacgctgaaaggcgatccggctgagaaaaacgtttattatgtaccgctgacgaatgaagagattgccgcatataaaaagggaatggaagatcctgaaagtgcggaaggaatggatgcacagaatcgtgaaaaagttcgcgcggcggcatgtttcgagaaccttgcggcaggagaatacgttttaaaagagacgacgcctccgaacggatacggcgcgtcagatccgattcggtttaaattatcgatacaggagggagaggaaaatcagtttgtacttccttacggagtaagtttggaaagtcctctctccaataaagaaaatgtgactcttcaggtgagaaatgaaaaaaacagcggagtcgtaagctttacaaaggaaaaccgaaaaggagagcctttgaagaacgcgaagttcgctttgtaccggctgatctgcagcgatccgtctcatggaggaaagcatgataaagatctgatccggcacgatgaaaacggtagtctcgacgccggatatgcgtataaagattgttggaaattgcagggaacggcggtttcggatgaaaacggaacagtcgaattcctaaatcttccggcagaagaaggcacagagtaccgtctggcggagttgaaagctccgagcggatacgtgacggcgaaaggtcagtggaaagtcacatatgagaaagagactcatgaactgaagataaccggaagcgtaaaaaggcctccggcattttcgggggaaggaacggatgagaatccgtataaagtgatcaactatacttatgccgaatttccgttatcaggcggaaggggatacagctatcttgcaggcacggttctgatcgcggcggcagccgggttgtggttttggtatgattcgagaaagagaaaaactgtaagatcacgcggcatgagaaaaggggatataaataataaggaggaaaaagttaatggacaagaaaacaaaaatgaaagaaaaaaaggcaagcggcatttggaaaaaagtgttgggaatctgtcttgcggtaatcatggtcatcgggatgacgatgccggcatgggcgcagatcgatgcagagtcgaaaggttctatcaaagttacggcagatga

SEQ ID NO: 552 - DNA, 2514 bp, Ruminococcus torques 1
atgcgatgcgccgcggcatatcaaaaggaagggaataaagcaatgcataataaaggatttgagaaagaaacatttaaggaaaccgtaagagaaaatattaagacgctgtacagaaaaacgattgacgaggcaactcctcagcagatttttcaggcagtatcctatgcagtgaaagacgtaatcatcgatgattggatcgcaacacagaaagcgtatgacgaggcagatgcaaagactgtgtattacatgtctatggagtttttgatggggcgtgcattgggaaataacctgatcaatctgacagcgtataaagaggtaaaagaggcgctggaagaaatggagatcgatctgaatgtaatcgaggatcaagagccggatgcagcgcttggaaacggaggtctcggacggttggcagcctgtttccttgattcacttgcaacattgaattatccggcttatggatgcggcattcgttatcgttacggcatgtttaaacagaagattaaagacgggtatcaggtggaagtgccggataactggctcaaagaaggtaatccgttcgagatcagaagagaagaatatgcaaaagaagtccgcttcggagggaatatccggtttgaaaatgaccctgagacgggaaaagcaaaatttgtgcaggaaaattatgagtctgttttggcgattccgtatgatatgcctatcgtaggatatggaaatcatgtcgtaaacacactgcgtgtgtgggatgcaaaagcgatcacagattttaagcttgatgaatttgacagaggaaattaccataaggcggtagagcaggaaaatcttgcgaaattgatcgttgacgttctttatccgaacgacaatcattattcgggaaaagaactccgtttgaaacagcagtatttcttcatctccgcaagtcttcaggctctgcttgagaaatataagaaaaagcattctgatgttcgtaaacttcatgagaaagtaatcattcagatgaacgatacacatccgacagttgcggttcccgaactgatgagactgctgatcgatcaggaaggattaagctgggaagaggcgtgggaagtaacgagcaaaacatgtgcttatacgaatcatacaattatggcagaagctcttgaaaaatggccgatcgacctgttttcaagactgctcccccgtatttatcagatcgtgcaggaaattgacagaagattcctgatcaaagtgaatgagatgtatccgggaaatgagcataaagtaaagaaaatggcaatcttaagagacggtcaggttcgcatggcaaatatggctattatcgcgggattttctgtaaacggcgttgcgaagctgcatacagatatcttgaaaacacagcagctccgtgatttctatgagatgatgccggaaaaatttaataacaagacaaacggcatcacacagagaagattcctcgcacacggaaacccgcttctggcagactggattacagataagatcggaaatggatggatcacagatctgtcgcagattgaaaagctcagaccgtttgcggacgacgaaaaggccagacgtgagtttatgcagattaaatacgagaacaaagtacgtcttgcaaaatatattaaagagcataatggaattgaagttgatccgcgctcgatctttgacgttcaggtaaaacgtctccatgagtacaaacgtcagcttcttaatattctgcatattatgtatctgtacaaccagatcaaagaacatcctgagatgtcgttttatccgagaacatttattttcggagcgaaagcggcggcgggatatttaagagcgaaagagacgatcaaactgatcaattccgtagctgatgttgtaaataatgacagaagcattaacggaaaactgaaagtcgtatttattgaagattatcgtgtatcaaatgcggagattatttttgcggcagccgatgtgagcgagcagatctccacggcgtcaaaagaggcgtcgggaacaggtaatatgaaatttatgctcaacggtgcgccgactctcggaacgatggacggagcgaatgtggaaattgtgcaggaagtcggagcggagaatgcgtttatcttcggccttagttcagaagaagtaattaattatgagaataacggaggatataatccgacggatatttactttaacgattgggaattaaaacgtgtgatcgatcagcttatggacggcacatatgcaaacggcgatcacgagatgtataaaaatctgtataattctctgttgaatacgcagtgtacagacagagcggatacttactttattctgaaagatttccgttcctatgcagaggctcagaaacgagtggaagaagcttacagagatcagcagagatggtcaagaatggcaatgatgaatacgatatgcagcgggaaattttcctctgacagaacaatcgaagaatatgtaagtgatatttggaaattagaaaaagtagatgttgctccgcttgaagagtaa

SEQ ID NO: 553 - DNA, 3396 bp, Ruminococcus torques 1
atgtcattacaatttattatgggaaattccggaagcggaaaatcttactgtttatatgatacggttgttcgggaagcgattgaaaatcctgacaagaattatcttgtcatcgttcccgagcagtttacgatgcagacacaaaaagatctctgtcttgcgcatccaaaaggcgggatcatgaatattgatgtgttaagtttcgggcgtctggcgtaccgcgtttttgaagaggtgggtcaggatgcccgtgttgtgcttgatgatgaaggaaaaaatcttgttttgcgcaaaattgcgggcgagtgtgaaaaagatctgaaggtctttaagggaaacctgaaaaaacaaggttatataagcgaagtgaagtctgttctttcggaatttgcgcagtatggcgtagactttgaacgtttggatgattttatgaaagaagtgccgcctgaaagttatctgcattataaactggatgatatccgaactatatatgaaaaatttgaagagtatttaagtgaaaaatacattacaaaagaagaaatgctcgatgtgctcagcgacgctgttccgtattccgatattttaaaaggaagcgtggtggcgatggacgggtttacaggttttacgcctgtacaaaaccgtttgatcggtgagcttttttcagtgtgcgaaaaagtgatgatcacagtgatgatggacggaagagaaaatccgtatgtatatgaacatccgtatcagatttttgcgctcggcaaacagatggtcacatctcttatgaagattgcgggtgagaaaaaaacagagattgaagaaccgatatgtttgtttgaaaggccggtgtatcgttttcgggattgttcggaaatggcgtttttggaaacggaactattccggtattcaggcgcaaaatataacggaagctgtgagtctgtatcgctgcatgaagtgcgctctccgggaaaagaggcaaagtatgtagcagaaagtatcaggcggttagtgaggacaaaaggataccgatacagagacattgccgtgatcgcgtcagatatgaatgtgtatgcggatgtgttggaaaaagcatgtgcttcttttgacatacctgtgtttatggatcataagaaaagtattcttctgaattcttttgtagagtatgtccgcagccttctggggatgatacaggaaaattttacttatgaaagcgtatttcgttatttaagatccggatattgtgaatttacggaagatgagatcgaccgattggaaaactactgtcttgcgctggggataaagggatataaaaaatggcagcaggcatgggcgaggaaaacgaaagaggcggatgaggaagaagtggaaaagttaaatcatctgcgcgtgaaatttgtcgaaaagatcgatccgcttatgttcgtttcaagacagaaaaaaaagacggtgcttgacattacgcttgcggtatatgaatttatcgcaggagagcatcttcaggagaaattggaacaacagcagaaatttttcgcagaacagggagaacttacacttgcaaaagaatatgagcagatctaccggatcgtcatggagttgtttgacaagttttcggaactgttaggcgacgagccgattacgctgaaagaatactgcgagcttcttgacgccggatttgaagaggcgaaagtgggagtgattcctccgagcattgaccaggttgtgatcggagacgtagagcgtacaagaatgaaagatatccgcgccttgttttttgtcggagcgaacgatgtgcttttgccgggcaatgcgggaacgggcggcattttgtctgagcgggacagagaaaaattcaaagagaaagatatctcgttgtcgcccggaccgaaggaaaaaatctatatacagaaattttatttatatacggcgctgacaaaaccgacggaacttctaagcctgtcatggtcaaaggtgtcgggggagggaaaatctctgcgtccggcgtatttgatacaggagcttcgcaggctgtttccgaatctgtccgttgtcgatgaagaaaacagaaagcttagcgacagagagatcacccgaagaggggggatcgagaaagtggcaaaaggaatttgcagccgccgtctcgggctggataatgagtggaaagagttgtatacatggtttcaaaaagacggaagaaataaaaaagagatcgaaagtattttgaatgcaggttttctgcataaaacagatacgaggcttgcaccggaactgacaaaagaactttatagtgatcgaaatcgcgtcagtgtgacaagactggaaaaatttgcgtcttgtgcatatgctcattttttaagttacggactgcggctttcagaccgggaagaatatgggtttgaggcgcttgatctcggaaatatcgcgcacaagtctttggagacgttttccaaaaaggcggatgcgcagaaaatgaaatggcaggaaataccggaagctcttcgtgacgagatgatcgatgagagtgtggaagaaagcgtaatagattatgggaatacagttcttttcagttcggcgcgaaatgaatatatgatcactcggatcaaacgtcttatccgaacttctgtgtgggcgctgacaaagcagatagaaaaaggagactttcttccaagcgggtacgagatgcagttcggaagcgggaagattgaccgaatcgatacatgttttgacaatgactgtgtttatgtcaaagtgacagattataaaacgggaatgaaaagttttgatattacggcgttgtatcatggtctgcaaatgcagcttccggtatatctgaacgcggctttggatgtagagcaaagaaaacatcctcataaaacgatcgtcccggcaggaatattttattatcggatacaagatccgatcgtttcggaagaaaaaactcaggatgccgtggagagaagtattttaaaagaattaaagcaggatgggctagttaacggggatgatatggtgatttcgcatttggagaaagaactttcggggaattcgctcctttttccaataggaagaaataaagacggttcattgagtaaaacgtctcacgcgcttccggaagaactgtttcggctagtactttcttttgcgaaacgaaaagaagagtcggtcaaagaccgaatgtatgacggagaagtttccgcctctccgtatgagatgggagaaactacaggatgtgattactgtccgtacagagatatatgtgggttcgatccgcgtcttgaaggatgtagttaccgcaggctggagagatattcttcagacgatgcggtgaaaaagatgcgggaggctttggaagaaaatgtcagccgggacgcttcggaaaacgagcaaagcgggaaaggcagggaaggataa

SEQ ID NO: 554 - DNA, 2529 bp, Ruminococcus torques 1
atgagacaaatatgtagagaaggaaaacgacaaaaaaaggagaaagagatgatcagacaacgacttggaaaagacctcctcttttttgatgggggaatgggaactctgcttcaggaaaaagggctcgcgccgggagaattaccggagacgtggaatctgacacattcggaagaaatatacaagatacacaggcaatatatagaagccggaagcgatatcattttgacgaatacatttggtgcaaatgcgctgaagtttcatgatgattcctgctctttagaagagattataaaggcggcggtcagccatgtgaaaaaagcagagcgggaggcgctcttacaaacaggagacgagcgtaaaatctatacggctcttgatgtcggacctacggggaaattgctgaaacctatgggagatctggaatttgagacggcatatgaagcttttaaggaagtagtgatcttaggagagcaggcgggagcagatttaatccatatagagacaatgagcgatacatacgaattaaaagcagctgttttagcggcgaaagaaaacacgtctcttccggtatttgctaccgtaatatttgacgagaggaaaaaacttttgacaggagcggatgtttcatctgttgttgcgcttttagaaggtttaggcgtcgatgctctcgggataaactgcgcaatgggaccaaaagagatgcttccggtgttggaagaactgatcaaatattcgtctgttccgattattgtaaagccaaatgcaggacttccgaaacagagagacgggaaaacatattatgatgtgacagaagatgaatttgcggcatatatggagcaaatcgtccggatgggggcatgtgtgatcggaggctgctgtggaacgacgccggaacatatccgtgccatgcgtaaaagatgtgaaaacgcagaacttgttccggtgacagaaaaagagtttacggttgtttcctcttacgggcaaagcgttattttgggtgagggttcaaaaattatcggagagcggataaatcccaccggtaaaaaacggtttaaacaagcgctgaaagaacacgatcttgactatattttaagagaagggattacacagcaggatcagggagctcacattcttgatgtgaatgtcggactgccggatattgacgagccggcgcttatggaagaggtagttcaggaactgcaaagcgtcgttaatattccgctgcagatagatacggttgatgaaaaagcgatggaaaaagcgcttcgtatttacaacggaaaggcaatggttaattccgtaagcggaaagaaagagtcaatggaaaaagtgtttcctcttgtaaaaaaatacggcggagttgttatcggtctgactttggatgaagacggaattccggcggatgcggacggccgtgtgaggattgcggaaaaaatcataaaaacagctgaaaaattcgggattaaaaagaaagatatcgtaatcgacgcactcgcaatgacgatcagttctgagccggaaggagcaaaagtgacattggagacgcttcgcagacttcgagatgagatcggagtcaatacagttctcggagtttctaatatatcctttggacttccatgccgcccgatcgtaaacgcagccttttatacaatggcaatgttaaacggtctgagtgccggaattataaatccatcatcggaagacatgatgaaatcgtggtatgcataccatgctcttatgaatctggataataattgtgaacaatatattcaaaaatatgccaattcggtagtgagcacaaatataatgaaaacatctgaactttccgaaacgaaattaaagggggaaaatgacagaagcagaaaaagcagctcaaaaatgacgcttcaagaggcaatcgaaaaagggctgcgggatgacgcggggaaaattacaacagatatgattgcgacagaagctccgctcgatattatcaacgaagaattgattcctgcattaaatcatgtcggcgacggctttgaaaaaggaactgtttttctgcctcagcttctgatgagtgcggaagctgcaaaatccgcattttctgttctgaaggaaaagatggaaaaaagcggtgagatcagagaaaaaaagggacgagtcattttggcgaccgtgaaaggagatattcatgatatcggaaaaaatatcgtgaaagtgcttttagaaaattacagttttgatgtgatcgatcttggaaaagacgtatcgcctgaaaaaattgtagaaacggcatgtgaaaagcaagttccgcttgttggattaagcgctcttatgacaacaacggtagtcagtatggaagagacgataaagatgcttcgggaaaagaaaccggactgtaaagtgatggtcgggggagctgtgctcaaccaagagtatgcagatatgatcggtgcggatttttatgggaaagatgcgatgcagtccgtacattacgccgaaaagatttttaaagatgctctgcaaaaaagtgccgataaaaaagaataa

SEQ ID NO: 555 - DNA, 2289 bp, Ruminococcus torques 1
atgattaaattatatgaaaacggtgtgtatttgctcaatggcactgagattgttgaagatacagggagcgcacaggtttcggtttctaaagaagaagcagcgaaaaacacgatagcttacggcgtgttagaggcgcataatacttcttctgatatgaagaacctgcagattaaatttgataaattgacatcacatgatattacttttgtcggaattattcagacagcccgtgcttcgggtcttgagaagtttccgattccatatgtattgacaaactgtcataacagcctttgtgcggttggcggtacgattaatgaagacgatcatatgtttggtctgacatgtgcgaaaaaatacggcggcatgtatgttccgccgcatcaggcagttatccatcagtttgcgagagagatgctcgcaggcggcggaaagatgatcctcggatcggacagtcatacacgttatggcgcacttggtacaatggctatgggagaaggcggtcctgaacttgtaaaacagctcctgaacaaaacgtatgatattaagatgccgggagtgatcgctgtttatcttgaaggcgagccgatgaaaggggtaggtccgcaggacgttgcgcttgcaattatcggggctacatttaaaaacggctatgttaataataaagtaatggaattcgtcggaccgggcgtgaaaaacttaagcgctgatttccgtatcggaatagatgttatgacgacggagacaacctgtctttcatccatctggacgacagatgaaaagatcgaagaattctatgagattcacggaagaaaagaagaatataaagaattaaatccgggagcggttacatattatgacggatgtgttcgtgtgaacttaagtgagatcaaaccgatgatcgcaatgccgttccatccaagcaacgtctatacgattgatgaattgaacgcaaatctgtcagacatccttcatgacgtagagcagaaagctctcgtaagtcttgacggagctgtagagtattctcttcaggacaagatccgagacggaaaactctatgtagatcagggaattatcgcaggatgtgcgggaggcggttttgaaaatatctgtgcggcagcagatatcatcaaaggtcataatatcggatcggatgcatttacgttcagcgtatatccggcaagtacgccgatttatatggaacttgtgaaaaatggtgtcgtagccgatcttatggaagcgggaacagttgtaaaaacagcattttgcggtccgtgtttcggagcgggagatacaccggcaaataatgcgttctctatccgtcatacaacgagaaacttcccgaaccgtgaaggaagcaagcttcagagcggtcagatttcttctgttgctcttatggatgctcgttccattgcggcgacagcggcaaataaaggatatctgacgcctgctacggcatttgatgtagaatataaaggacagaagtatcattttgatcagaatatttatgcgaatcgtgtgttcgacagcaaaggcaaagcagatccgaatgtagagatccagtttggtccgaatattaaagactggccggagatgtcggcgcttcctgagaatctgatcgtgaaggtcgtatctgaaatccacgatccggtaacgacaacagatgaacttattccgtcaggagagacgtcttcgtatcgttctaatccgcttggacttgcagagtttgcactttcaagaaaagatcccgcatatgtgggaagagcaaaggaagttcagaaagcacagaaagcaatcgaggcaggaacatgtcctcttgatgctctggaggaactgaaaccggttatgtctaagatccaggcagcgtatccggaagtcggagaaggaaatgtcggagaaggaaatgtcggtgtaggaagtacgatcttcgcagtaaaaccgggagatggatcggctcgtgagcaggctgcctcctgccagaaagttctcggaggctgggcaaacattgctgtagaatatgcgacaaaacgttatcgctccaacctgattaactggggaatgcttccatttttgacagatgcggatcatgaggcgcttccgtttaaaaacggagattacattttcgttccgaatgtgagaaaagcagttgaggaaaagaaagacgttatcaacgcatatgttgttggtgatgaattgaaagagatccagctgaaactcggggatctgacagatgccgagagacagattattctggatggatgtctgatcaactactataaggcaacaaaataa

SEQ ID NO: 556 - DNA, 2838 bp, Ruminococcus torques 1
atgagtacgaaaatggatgttcggaaatatatcaaaataaggggagcgaatgagaataatcttaaaaatatagatgtggacattccccggaacgaacttgttgtacttacaggattgagcggttcgggcaaatcttccctcgcgtttgatacgatttatgcagaagggcagagaagatatatggaatcattatcttcctatgcaagacagtttttggggcaaatggagaaaccggatgtggaaagcatagagggactgtcgcctgcaatttccattgatcaaaagtcgacaaatcacaatccgagatctacggtcggaacagtgactgaaatttatgattatttcagacttttatatgcaagagtcggaattcctcattgtcctaaatgtggaaaagcaatttcaaagcaaacagtcgatcagatggttgatcgaattatgtcaatgccggaaggaacgaaaatccagcttcttgctccggtcgtaagaggccggaaaggaacacatgcaaaattattggaaaaagcaaagaaaagcggatatgtgcgtgtacgtgtagacggaaatatgtacgaattgacggaagagattattcttgacaagaacttgaaacataatattgagattattgttgaccgattgatcgtaaaacaggggattgagaagaggttaacagattctgtggaaagtgttctgcatttatcggaaggtttgctcagtgtagatgtgatcggcggggagatgttgaatttcagtcagagcttttcctgtccggattgtgggatcagtatcgaagagatcgaaccaagaagtttttcatttaataatccctttggggcatgtccgacatgttatggattaggatataagatggagttttcagaggatttgatgattccggatccgtcattgtcgattaatgaaggtgcaatagcggtattagggtggcagtcttgtacagacaaatcaagttttactcatgcgatacttcaggcgctgtgcagagagtatcaatttgatctggacacaccgtttgaaaaatatccgaagaagattcatgatattattcttcatggcacaaacgggaaagaggtgaaagtattttataaaggccagagaggcgaaggcgtttatgatgttgcgtttgaagggttgattaaaaacgtagagcgcagatataaagaaaccggttcggagacgatgaaagccgaatatgagacatttatgaacataactccgtgttcggcatgccacgggcaacgtctgaaaccgggagctttggcggtaaccgtcggagaaaaaaatattgcagaagtaacgtcgatgtctatcggaaaattgcaaaattttcttgaagagcttgtattaggagaaacacagatgctcatcggagggcagattttgaaagaaatcagagctcggatcaaatttcttatggatgtgggacttgattacttgacgttggcccgcgctaccggaacactttcaggcggtgaggcgcagagaatacgtctggcaacgcagatcggatcgggtcttgtgggagtagcatatattttggatgagccaagtataggacttcatcagcgggataatgacaagcttcttgcaacattaaagcatcttcgtgatctgggaaatacgctgatagtcgtagagcatgacgaagatacaatgatggaggcggattatattgtagatataggaccgggagcgggagaacacggaggcgaggttgttgccgtcggaaatgcgaaagagatcatgaaaaatgaaaattcgattacaggcgcatacttatcgggaaggatcaaaattccggttccgcaagagcgcagacagcctaagggatggttgaaggtggtcggcgcccgggaaaacaacttgaaaaatatcgatgtgtcatttcctcttggagttatgacttgtgttaccggagtttcaggttcgggaaaaagctctcttgtaaatgaaattttgtataaaaggcttgcacgtgatttgaatcgcgcgagaacaattccgggaaaacataaaaaaatagaagggttagatcaggtagataaggtgattgatatcgatcagtcgccgatcgggcgaaccccaaggtcaaatccggcaacctatacaggtgtgtttgatctgataagagatttgtttgcggcaactccggatgcaaaagcgcgcggatataagaaagggcggtttagttttaatgtgaaaggcggacgctgcgaggcgtgctcgggagacggcattcttaaaatcgaaatgcattttttgcctgatgtatatgttccgtgtgaagtttgcgggggaaagcgatataatcgagagactttggaagtaaaatataaagggaaaacgatttatgatattctcaacatgacagtggaagaggcgttggaattttttgctcatgttccgagtatcaggcgcaagatagagacattgaacgatgtaggtctttcttatatccgtctcggacagccttctacagaattgtccggaggtgaagcacagcgcattaagctggcaacggaacttagtaaacggagtacaggaaaaactgtgtatattttggatgagccgacgacaggacttcattttgcggatgtgcataaattgacggagatcttgcggcgtctgacagatgacggaaatacggttattgtaatcgaacacaatctggatgttataaaaacagcagattacattattgatatcggtccggaaggcggagaacgcggtggtacggtcgttgcacacggaacaccggaagatgtggcagagaatgaaaattcctatacagggaagtatataaagaagatgctgtag

SEQ ID NO: 557 - DNA, 2448 bp, Ruminococcus torques 1
gtgaaaagctgtatggcaagaagaaaaaaattgcaggtagaagaaaaaaaggaacgacggctcccgacaacaagatataatcccgaatataaaaagggactgacaagtcagcaagttcaggaacaccggctgcacggttggacgaacaaggcggttgaacctccgtcaaagacgacgaaagagattgttcatgaaaatgtatttacttatttcaacttaatctttgtcgtgcttgcagtattgctctgtcttgtgggatctttcagagatttgacatttcttccggttattattgcaaatacattgattggaattattcaggagattagagcaaaacaagtactggataagctgactatgttgaatgcgccccgcgcctctgttgtccgagacggaaaaagaacggtgatcaatgccgaagatcttgtcgtagatgatatcgtaatttttaaagccggcgatcaggtgtgtgccgatgcggaagtatctgccggagaagttcaggtgaatgaatcgcttttgacaggtgaagccgatgagattacaaaacgtaaaggcgataaactgatgtcaggcagctttattgtttccggacaatgtcacgcgcggcttgataaagtaggagaggattcatatatatcgaaattgacattgcaggcaaaagcgatgcagtcaaaagaacagtcggaaatgattcgttcgcttgataagcttgttaaatgtgtaggagtagctattatcccgatcggaatcgttcttttttcacaggcatttttcattcaacatgatggatttagagaaagcgtgacatctatgatcgcggcggtgatcggaatgattccggaaggattgtatcttcttgcaagtgtggcgcttgcggtgagttcaattcgtcttgcacagaaaaaagtgcttttgcatgatatgaaatgtattgaaacgcttgcccgtgtagacgtgctttgtgtggataagacaggaacgattacggaaaatacaatgaaagtccaaaagctgatcaagacggatgagtacgatgaaaaagaaaagggcgggttatctttgcttgtcggagattttgcggcagctatgacaaatgataatattacgatggctgccctaaaagaatattttacaaaagcatcaggaaagaaggttttgtcaaaaacaggattttcttccgcaacaaaatacagcagcgttacatttgaagacggagcttatgtgctcggagcgccggaatttgttttaaaagaaaagtatgacgattatgcggaagagatcacagaatatgcatctacaggatccagagttcttgcttttggaatttatgacggagaggttgacggaaaacctctgacacatggcattcttccgtttggctttgttttacttgccaatcctatacgagaagctgcaaaagagacgtttgagtatttcgcagaacaaggcgtagaagtaaaggttatctcaggggataatccggttactgtttccaatgttgcaaagcaggccggaattaaaaatgcagacagatatgtagatgcgtcagagtttgaagatgaacagtccatgaggaaagcgcttctgaataatacggttttcggtcgggttacgccgagtcagaaacggaagtttgtccgtattttaaaagaggcaggacatacggtagcaatgacgggagacggggttaatgatgtgcttgccttgaaagatgccgactgcagtattgccatggcatcgggaagcgacgctgcggcacaggcatctcagcttgttttgctggagtcagatttttcatgtatgccggaagttgtgttggaaggaaggcgggttgtaaataatattcagagatcggcaagtttatttcttgtgaagaatattttctcatttttgctaagcgttgcgtctgtcgtgtttatgtttacttatccgttggagccgtctcaagtatcattgatcagtatgtttacaatcggtgttcctgcattcttccttgctctggaaccgaataaaaatatgatcaaaggacatttccttacaaatgtgctattaaaagcgcttcctgctgcgttgacagatgctcttgcagttgcggctcttgtcatatttggaagaacatttgacgtaagctctacggatatatcaacggcggcaacgatgcttttggcgatcgtaggatttatgatcttatataagatcagcgcgccgatgaataaaatacggtttagtattgtaagcggatgtattgcaggattattgttctgcagcatcttcctaaaagatctgttcgctattacaagtatgacaaaagaatgtattatgctctttgtagtatttgcgattgctacagaaccggtgcttcgttatttgacaacacttgtcgaaaaagtgaaatattactatctgaagctgcgaggcaaaaatctgtcttcagatgatacataa

SEQ ID NO: 558 - DNA, 2868 bp, Ruminococcus torques 1
gtgcaagtaaatttgtttagaagaattatagatcgaataaaagaagctgttgaatatttgatgagttcaaggttgatcgttctcattattgtcttttgccttacatcttcgatattgatcggacgacttttttatcttcagatcgtgcgcggagaagattacttggaaaattatgagctgcaaataagaaagacaagaactgtacccggaaccagaggcaatatttttgatcgtaacggagaagtgattgcttacaatgaattggcttattccgtgacgatcgaggatatcatccctacagacactaaaaccgaagataaaaacaaaatattaaatgatacgcttgacagtgtgctttcgatcgttgaagaaaacggagacagtgtgatcgacaatttcggaatcattcttgattcatcgggtagttatcaattcgccgagacaaacgaaacatccagacttcgttttgtggcggatgtgcatggaaaaagttttattgatgatcttacagaaaaagaaaaaaataagacagccgagcagatcgtacattatttatgcaaacgatacggattggattattccgaacatgatgccgcatatattctgaaaatggtcaatatgcgttatgctatgggactgaatagttatcagcaatggcttacaaccgtacttgcttccgatgtcagtgatgctacggcagcggctattatggaaaatcaggattcccttcagggagtagatatttctgaggattccctgcggcgttatcctgacggtcaatattttgcatcgattatcggatatacgggtcagatatcgcaggaagaatatgatgatctaagcgatgatgaaaaaaagagatattctttgtcggatattgttggaaaatcaggcattgagcacacgttcgatagcgttcttcagggcgaaaaaggtaaaacgacattctatgtagataatctcgggaaagtaaccgatactgtaagtatgacagatccgaaagcaggaaatgacgtctaccttacgatcgataaaaatttacagatttctgcttataaacttctggaagaaaaacttgccggaatcgttttaagcaaattaagcaatgtattagactatgatccttctgcggaaaaagatacgaaatatattaaaattcccgtaggagatgcatataattcatttattgcaaatgagattatcgatatgaaaaaattcggaagaacagacgcaaaacctgccgaacaggctgtctataatacgtttactcagaaaaaagccgagatactttccgaattaatggcacagcttcagaacgaaaatgctccggcatataaagatctttcaaaagaaatgaaagcttatatggactatatatgcgatactcttctaaaacaaacgacaggaatcctgatgtcagacaagatcgaagcagaagatgaaacacaaattgcctgggcaacgcaagagacaattagtttgaaccggtatttaaattatgcaatctccaaaaactggatcgatacctcaaagttgggagacagcgcttattcgagttctgaagagatttatagcggtgttttggcataccttgaagaatatttaaaggaagacagtaatttcgacaaacttctctacaaatatcttataaaatcaggaagtgtcaccggcgcacagatctgtgcgatcgtttatgaacaaggcgtactgccaatggatgagaatgcgtataacggtcttttaaacggaacgacagacgcttatggctggctatatgataagattaaaacattgcagattacgcccgggcagctcgctttagagccgtgttccggcggaattgtagttacagatccaaatagcggagatgttctggcatgtgtatcttatccgggatatgataataaccgtctggcaaatacaatggattccgcttactacaatcagcttaataccggacgtgcaaatattttctataaccgtgccacacaggaaaaaacagctccgggatcaacttttaaaatgatctcggccacagccggactggaagaagggtatattgacgcttacacaacaacatattgcagcggttcatttaatacggttactccgagtccgaaatgttggatctatccgggaggtcacggagcgttgaatgttgttcaatcattgcagcattcctgcaacgtcttttattatcaactgggatacaatatgggaatcgattccaatggaaactatgacagtgatcttggaacagacaagttgagaaaatatgcggctatgtatggcttagacaggaaatccggcgtagaaataccggaagctgcaccgcagatatctgatgaatattcgattcaatctgcaatcggacaaggtacgaacaactttacggtaagtcaactgaaccgttatgtaaccgcagttgcaaacagcggaactgtttatgatctgacgcttatcgataaaacgacagatgcggcgggaaatcttattaaagattattctgcagaagtagacagtacaatggatgaaatcaattccagcacatgggatcttattcaccagggaatggaacagatggttgcaagctcaaccacttttacaggccttgatttttctatggcgggaaaaaccggtactgcccaacataacgaattgcatgccgaccatgtattatttgtaggatatgctccggccgaacagcctcaattatcgattgcagtccgcattacttatggctataattcgggatatgcatcagagatcggcagagatattgcaaaagtctattttaatcctgaaacagccggtgaattaattaccggaagcgcagctaatctcggagaaggaattgcaggagactaa

SEQ ID NO: 559 - DNA, 1668 bp, Ruminococcus torques 1
aaaatgaaaaaccacccgctaggcgggtggatgtttattgcacttgtaaaaacggaaacgcccaactataatgagtacataaaaagcggttatcatgccgtgttaaacaggaggacaatcttgaagaatgaacttgtgatcgtgcttgatttcggcggacagtataaccagcttgttgccaggcgcgtaagagaatgtaatgtatactgcgagatctattcttacaaaacagatattgaaaagatcaaagcaatgaatccgaagggaatcatcctgacaggaggaccgaatagctgctatctgccggattcacctacctatacagaggaattatttaaactgggcattccggtacttggcttgtgctacggtgcacagcttatgatgcatgttcttggcggggaagtgaagaaagcagatgtgagagaatatggaaaaacagaggttttgattgataaaacttcttcaaagatttttgataatgtttcaccatctacaatttgctggatgagtcatttcgattacatttcccgaattgctccgggatttgaaatatccgcacacacggcagactgtcctgtagctgccgcagaaaatgcagaagagaagctttatgcaattcagtttcatccggaagtgcttcatacggtagaaggaacgaagatgatcaataatttcgtgaaaaatgtgtgcggctgtaccggagattggaagatggatgcgtttgtagaaagcacgattgaagcaatccgcgcaaaagtcggagacggaaaagtgctgtgcgctctttcgggaggcgtagattcttctgttgctgcagttatgttgtcaaaagcaatcggaaagcagcttacttgcgtatttgtcgatcatggtttgctgagaaaagatgaaggcgatgaagttgaagccgttttcggaccggaaggaccgtatgacctcaattttattcgtgtcaatgctcaggaaagattttatgcaaaattaaaaggtgtggaagagccggaagaaaaacgtaaaattatcggtgaagaatttatacgtgtatttgaagaagaagcaaagaagataggtgcagttgattttcttgtgcaaggaacaatctatccggatgtagtagaaagcggtcttggaggcgagtctgcggttattaagtcgcatcataatgtaggcggcttgccggattatgttgattttaaagaaattatagaaccgttgcgagatcttttcaaagatgaagtgagaaaagccggattagaattaggaattccggaatatcttgtgttccgtcagccattccccggtccgggacttggtatccgcatcatcggagaagtgaacgctgaaaaagtgaaaatcgtgcaggatgcggatgccatctaccgtgaggaaatcgcaaatgcaggattagatagaagtatcggccagtatttcgcggggcttacaaacatgagaagcgtcggtgttatgggcgatgagagaacttatgattatgctattgcactcagagcggtgaatacagttgattttatgactgcggaagcagcagagattccgtatgaagtgcttaataaggtaatgagcagaattatcaatgaagttagaggcgtgaatagagttatgtatgatctgacaagtaagccgccgggaacgattgagttcgaataa

SEQ ID NO: 560 - DNA, 3609 bp, Ruminococcus torques 1
atgcttcagataaaagaaatatgtaaggaataccggacgggaagtcttgttcaaaaagcgcttgataaagtgagcctgaatctgcgtgataatgagttcgtggcgattttaggaccaagcggttcggggaaaacgacgctgttaaatgtcatcggaggattggacaggtatgacggcggagacttgatcataaacgggatttcgacgaagaaatacaaagaccgggactgggattcgtatcggaatcacacgatcggttttgtgtttcaaagttataatctgatccctcatcaaacacttttggcaaatgtggaactggcgcttacgatttcgggagtaggcaaagcgcagcgcagagaacgtgcgagacaggcgttggagaaagttggcttaggcgagcagatccacaagcgcccgagtcagctttccggcggacagatgcaaagagttgccattgcaagagcgcttgtaaataacccggatatcctccttgccgatgaacccacaggggcgcttgacagcgagacaagtattcaggtgatggagcttcttaaagaggttgcgcaggacaggcttgttgttatggtaactcataatcccgagctggcgcagcagtatgctacaagaatcgttgagttaaaagacggaaagattcgttcggacagcgatgcattttatgtggatgaagaaacggcagacgttccggaacataaaaatatggggaaatcatccatgtcgtttctgacggcgctttcacttagctttcataatctcaagacgaaaaaagcgagaacattattgacttcttttgccggatcgatcggaattatcggcattgcgcttattctctctttgtccgcaggagtgaatgactacataaaaaatatagaaagagaaacgctttcccaatatccgcttcagatccaaagtacaggatttgattttacttcgatgatgacaggcggggaagattcggaagaagtaaaagcggtgtctgcgggaacgggaacatcttcaaaagagcggcgggaaaaagaaaatatatgggtgatcgacatggtcacgaatatgttttcgacaatggattcaaatgatctggaatctttgaaaaagtttttagacagtaaagaaagccggatcgatcaatacacaaatgcagttgagtattcttatcaggttgttccgcagatctatgcgcaagacggggagaaagtccgtcaggtacatccggaccgctctttcgaggcggcagggcttggttcgtctgtcggctcaaacagtctgatgtcttcgatgatgagtacagacgtcttttatcagatgccggcagattccgatctgtataaagatcagtacgatgtgaaagccggcaggtggccgaaatcatacaatgaatgcgtgcttgtgctgacgtccggcggaggtatgagcgaccttttgctgtacacgctgggcttaagagatccgttggagctggaagagatggttgcgggattcgtcgaggaagagcagatcgaagttccgaaagattcaactgtctatacatatgatgatattctcggaaaagagtttaaactggtaaacagtgcggattactatgagtatgacaacagttatcatgtgtggaaagatcgttcgggagatcagacgtacatggacaaagttgtgaaaaatgccgagccgatccggatcgtcggcatcgttcagcctgtaaaagatgcaaacggagcagctttgatgtcaggcatcaattatccagcttcattgacaaaacatgtcgcagaagaagcggaaaactcaaaaatagtcaaagatcagaaggcagatccgaaacgaaacgttcttacaggggaacatttcgggacagaaaatgtaaagggcaacgttaatatggattctctgattacgatcgacgaacaaaaacttgcccgggcatttgcatttgatcaaaatgccttttcgggaatgcaaaaaacggatggtctttctgagattttccgttctgccggaagttcagtcaatctttcgggaatgttagatctaagtaagattcaagttcagcttcccgaactgccgcagatgaatctggaagaattgctgggagaccttgatcttacagtttcgccggaaggatttttgccgctggcagaaagcctgacagaagggtacgcagaatatgcggccgcgcatccggaggcggactattctgcgcttgcacaacagttcggacaataccttggaacgccaaaagcgcaggaaatcatacgaagaaatatcagtgagatcatccagtcgggcggcgggatgtccgtgacgatggaacatcttcaggcaatggtgaaagaaatagcgaaaggatacggaaaatttatcgttgaaaacggctatcaggatccgtctaagtttgatgaatatttggcggaatatatgcagacagaagaagcgaaagcgatattgaaccgatatgcaaatgagattttcggaggtattgcaggtaatgctcagattaccgcagaacagcttcagaagctttcaaaagagctcacggaagggtatcttccctatgcggcggaaaacgggctggctgatccgacaaagatcggagagcattttattgcatatttaaaaacggaagacggacggcaaagactgtctgacgggatgaaaggaatcgtagacgcggacagtctggaacagcagatcacagacgcgttcggttcttatatgaaaggcgcggtttcctcttatgcgggagccgtaggaacagcgattgagaggcagatcacatcggctatggagcaggttatgaatcagatggcagaaggactgcagttttctgtaggacaggcaatgacacagatcggaagcagtctgcaaaatgctatgcatgtagatgaagatgcgtttgccgaggcgtttcagatgaatatgacaggagaggaactggcagaactgatgatgtctatgggagctgcgaaaaatgcgacgtatgacaataatctcaaacagttaggttatgttgatttcgctgttccgactacgatttcgatctatccgaaagattttgaaagcaaagaagaagtcgtcagaattcttgatgattataacagaaaaatggaagaacaaggaaaagaagaacaggttatcacatatacggatatggtcggcgcgctgatgtcgtctgtgacacagatcatagacgttatcagttatgtgctcgttgcgtttgtagcgatttcccttatcgtatcatcgatcatgatcggtgtgatcacctatatcagtgttcttgagcgaaagaaagaaatcgggatactgcgcgcaatcggagcttctaaaagtaatatttcacaagtatttaatgccgagacgtttattatcggtttgtgtgcgggcgtgatcgggatcgggataacgcttctgcttttgatcccgggaaatgctctgatccatcatttggcaggaacgaatgacgtaagtgcggttcttccggtaattccggcgatcatacttattattctcagcgtaatactgacgctgctcggaggactgcttccgtctaaaaaagctgcgaaaagtgatcctgtaactgcccttcggacagaataa

SEQ ID NO: 561 - DNA, 2652 bp, Ruminococcus torques 1
cttgagtatgattgtgaaacggaggtaattgctgccatgcgaaagaaaatcgtattgatagatggacatagtattttgaatcgtgcattttatggagttcccgatctgacaactccggaaggtctgcatacgaatgctgtgtacgggtttttgaatattatgtttaaaatattagatgaggagaaaccggagtatctgactgttacatttgatgttcatgcgccgacatttcgtcatgagatgttttcggagtataaaggaacgagaaaaccgatggcagaagaacttcgtcagcaagttcccgtaattaaagaagtgcttgaagcaatgaatatttctacaatagaaaaagcggggcttgaagcggatgatctgttgggaacgctttcacgcatgtgcgaagaaagcggaatggatgtatcgatcatatcaggagacagagatacgctgcagcttgccactgaacatgtgaagattcggattccgaagacgaagcagggaaaaacagagattgagaattattatgctgcagatgttgttgaacgatataaagtaacgccgagagaatttatcgatgtgaaagctttgatgggggattcggcggataatattccgggagttccggggatcggcgaaaaaacagcaacaaaaattattatggagtatcaaacgattgaaaatgcgtatgcacacgcgtcggaattaaagccgccccgggcaagtaagaatattcaggagttttgggaacaggcaaaaatgagtaaagtgcttgcgacgattgaaacacatgcggattttgagtttgatattgaaaaagcgcattatgaaaatccttatacggaagaagcgtacaaaatttttgagcggcttcgttttaaaaatatgcttggacgtttttctatagaaacgaaagaaaataaaatagaaaagatatttcgagaagttacggaaaaagaagaaatagaacgtatttttgcgatggcggagaaagcacaatgtgtcggggtagcattgtcaaaagatgaaggaaacgtactccctctttttgcacatccttcgggattcgggagaattgccatagcttggagtgagaaagatgttgttacgattccatgtgatctttctacggatatggaatttttatttgcaaagttgtcgcatgttgcggaaaaagtgagctgtttctcagtatgtggtttgaaagaaattcttccgtatatcaaaaatgtaaagcaaagcagcgcgtttgatgtgatcgtggcagcttatctgttaaatcctctaaaaagcgattatacgtatgaagatgtggcagaacagtatcttgggattgcaggcgggatacaggctgaacttaatgtgaagtgttgttatgaggcctacacggcgtttgcggcggcatcggttcttgataataaattaaaagaagctgaaatggatcgtcttttttatgagattgaaatgcctttggtttttacattgtacgagatggaatcggcaggtgtgaaagtagaggctgaagctttgaaattgtacggagatcagttgggagagcagatcatacaacttgagcatcagatttatgagatggcgggggaagagtttaatattaattccccgaaacagcttggagttattttatttgaaaaactaaatatgccacatgcgaaaaagacaaaaaccggatactctacagcggcagatgtgttggaaaaactggcagaagaatatccgatcgtaagcaaaatattagaatatcgtcagctggcaaaactgaaatcaacttatgcggacggtctggcggtttttatcggcgatgacggcagaatacacggaaagttcaatcaaacggtaactgcgacaggaagattgagcagtacagaaccgaatttacaaaatattccggtgcggatggaacttggtcggatgatcaggaaagtgtttgtgccaaaagaagactgtgtttttgtcgatgccgattattcgcagatagaacttcgtgttttggctcattgttcgggcgacgagcagttgatcaaagcatatcgggaagcgactgatattcatcggatgacggcgtcgcaagtatttcacactccgtttgatgaagtgacagatttgcaaagaagaaatgcaaaagccgttaatttcggaattgtgtacggtatcagttcctttggattaagtatggatttgagtattacaagaaaagaagcggcagaatacattgagcattatttcgagacttatccgggagtgaaaaagtttcttgacgattcggtagaaaatgcaaaagaaaaaggatatgcagttacgttgttcggcagaaggagacctgtgccggaattaaaatcgagcaattttatgcaaaggaatttcggagagagagttgcgatgaatgctccgatacaaggaaccgcagcagatatcatgaaaattgcgatgatcgatgtccataaagaacttaagaaaagaaatatgaaatcgcgtatgattttgcaggtccatgatgaattgcttattgaggcagagtgttcggaagtagatgaagtgaaagaaattttaagagataagatggaaaacgccgtgaaattgtctgttccgctaattgttgatatgcataccgggaaaaattggtatgaggcaaaatag

SEQ ID NO: 562 - DNA, 2454 bp, Ruminococcus torques 1
atgaagaaaaaaataatgaaagcaggtattttgatcgttgttttttgtgccgcggtcattatttcaagccttgtgatcaacaaagatgtgtcggatgaggccgccgacatgggggctgcatctctgcctgagatttctttttatgtcggagaaacagaagtgaatccgctttttggttatgtaaacaagatggagatacctgctgtacgtgatacgatcactccgcttaaaagcgacggttcattgactgtaaaagtagaaaaatacggaaataagatcgataaacttaaatatgaggtatattcgcttgacggaacgaagaaacatgcagaaggcaaagcggatatagtgaaagaaacttcgcaggcagaactggacttgaaagggatcttgtcatcggaagagccggaggcagttttgaaagtgacgcttgatacgccgctgtctcaaaacggaaagacggcgggatattatacccgcattgtacgaccgaaagaagtcacgactgatcagtgccttgcatttgcaaaagattttcatacaaaagcgttgaataaagaagcgacagaggaacttacggcatatttagagccggatgaaaagagcgataatacgacatatcaaacggtaaatattcattcagatattacgcatatacaatggggagatatgaagccctccgtgatcggagatgtggagtgggatataaaagaaagtaatacggtatatacttctatactcgcaaaatataaagtttcctgtacggacgaagagggagcggaaagcatctataacgtgaaagagtttttccgggtgagatttctcgtagatacgatctatttgctcgactataaccggaatatggaacaagtatttgacggaagagaaagtgattttgatgaaaacggaatcatacttggcattattccgaaggatatttcctatgagatcaataaagaccagacttccgccgcgtttgtgcaggctggtgaattatggctgtatgagtcgaaaaaaggaaatctgacaaaagtattttccatgccagatcaggaaggcagagatacgcggggagagaatgatcagcatgcggtgcgtgtgatcggcattgataataaaaataatattacgtttgccgtttacgggtatatggcgcgcggcagccacgaaggcgaggtcggcgtcggcatttattattatgatgcggctgaaaataagattgaggaaaaggcatttattacaagtacgaaatcgtttgccatcgcagaagatgagcttggtaagatggtatattataatcagagtacttcccttttgcacgttcttgcagacggaactttatatcggatcgatctgaagaaagatgagaagaaagtgcttgcggagaatcttactgacgaacggtatgccgtttcagatgacggtcatcttatggtgtatcagaccggagggaaaacagataagtccgcgacgcttcatataatgaacttaaagagcggagaggattatacgatcaaagcggaagatggggaaaacctgcgccctcttgggtttatcaacggagattttatatatggaaaggtaaatcctgccgatacagggatcacggtatcaggcgaagagatcacaccgatgtacgaagtgcagatcagaaactctaagaataaagaagctgcgcagtataatttcacagaacaaagtatttatacgacggatgtgctcatcgacgggaatctgctgacttttaaccgcgttataaaagacggagaaacatataattccacaaagcaggaatatgttacgaacaatgaggaacgtaaagagtcgaagattgtttttgaaacatatgtatcggaaaacacaggaaaacagatgcgttttacatttgcggacggagtgaaaaagaaacaaaaacagaatgaaaaaccgatatatcagccgggcaaaaaaacgctgacgattgagctgaaagggaaagagaaagaagaaaaatattatgtttacggcatgggagaactggcggctgtctataacaaagcagggtatgcggttcaaaaggcagagcaggtttcgggagttgtaatttcttccgagcaaaaatatgtatgggagaaaggaaaccgggatcttgtttattcaacagaagcaggtaagtttcaatgtgaagaaggagaaagttctcttgatgcgtgtgagcgttatatggaacagtatcatgcacagcggcttgatctgacaggctgttctctcgatcagatgttatatgtgatcaatcgcgggtgtccgatgatcgcgatattggaatcggcacatgcggtgcttttgacaggatatacgatgacggatatcacatatgtagatccgagtacaggagaatcatatacagtcggcatgagcgaaatggaaaatatgacagaagcaggcggaaacacatttatcggatacatcagatga

SEQ ID NO: 563 - DNA, 2151 bp, Ruminococcus torques 1
atgaaaaaaggattttatatcaggctggcaggggaaggcatttcaaaaaacagaaaattgtattttccgtatattttgacatgtatctgtatgatcatgatgtactatatcgtttcttttctgtcgataagtaaagaactggcgtctatccggggcggggaaatgcttcagggactgctctctatgggagtgtttgtagttgcggtattcgcattgatctttctgtattatacgaactcgtttcttataaggaaaaggaagaaagaacttggattatataatattctcgggatgggcaaacgtaatctggtaagaattcttttgtgggaaaatatactgactgccgtgatttctctggttatcggaatcgtgttcggaattctgttctcaaaacttgcggaacttctggcaattaagcttcttgacggggcgaccggattcggagttcatatagaaatgaagccgatccttatgacagtcggtctgtttcttgcgatctttctgcttattatgatccgcatgcttgtgtcggtatataaacttcgtccgattgagatgctcagaagtgagaatgtcggcgaaaaaccgccgaaggcaaactggctctttgcatttgcgggagcggtgatccttgccggagcatattatctggctgtgaagatcatcgatccgacaactgcgatgcttgtattctttctcgcggttgttatggtgatcattgccacataccttctgtttattgcaggttcggtcgctctttgcaagctgctgcaaaagagcaaaaagtattattataagacgagacactttgtatctttgtcacagatggtttaccgaatgaagagaaacggagcgggtctggcgtcgatctgtattttatctacgatggtgcttgtgacgatctcgtctacgatgtgtatttatgcagatacggaatcgtcgatcagaaaccgttatccacatgacatcacgatcgagtggagcgggaaaacatcccttccgcaaaatgaggacggaacagatacagaattaaaagacagcgtagtgcagcgtttgacgccggagatgaccatgacgtataaagaggctgtggaaaaggtgcttgaatctcataaagtaaaggctgagaacttggaaaattataatctttactctctttccggagtacagtcagacgatgttttaagtattgattttgaaaagatgaaaggggagatttcctcgattaatgcagggatgtcaggatctgtgaagacgatgtattttacaacaatggatgattacaacaaactgaaaggcacagacaagactttggctgaagatgagatgatgctctactcatataaaacagattatgagtatgattcctttacgatcgacggcgtcggaacatggaaagtagagacaatgaaagaacctccgataggggtaggcaacgccatggcgaatatgcaggggtcatatcaggttgttgtaaaagatttgtctgtgatcgaaaaaatagcgactgcgtacgaaacgatcaatgcaaaacctttgcaggacggaacattgtacctgctttccctgaaagaatgttatgactttgatctgaaatgtgatgaagaaaaacagatagagatttacaaggatattttggaatcttttgagcatatatccgaagcggcagatgaacagggcaatcggatgggagattcgctggcaaattattatgcggacagtaaagcgtacggtaaaggagatttcattgcgctcaacggcggattgtttttcctcggagtgcttctcggagcggtattcctgttcggtactgtgctgattatgtactacaagcagatttccgaaggatatgaagatcaggatcgctttaatattcttatgaaagtgggaatgacaaagaaagaagtgaagcagacgatcaactctcaggtgcttactgtatttttcatgcctctgatcatggcgggaattcatcttgcgtttgcatttccgatgattcagaaaatactgatgcttatgtcaggcgtggaagcgaaagtatttgtgatcgtgacgatcggatgttatctcgtgtttgcactcttctatgtacttgtttatgtcgtaacgtcaaaaagctattatacgatcataagcagtaaggaaaaatag

SEQ ID NO: 564 - DNA, 1968 bp, Ruminococcus torques 1
aggtacggcatggacgaaagagaaaaacgggatgtgcgggaatggagtcagacatcagatacccgcagacgacgccctgaaaacaatgcccggaaaccggtaaaccgttcgggacaaagcagacaaagaatgtcggaagcgggacctggacggaatagaagacctgcgagacaaagcagcagagcaaggagaagaaggcggaatgccgttatacggtggtttctgttttttgtgttgatcataattgcaataggcggatttgttatttggaaaagatacggttcaacgaatgagaaggccgatttgaaacaatattatggagtggagtcagaaacagatcctgcgcttgtaattgacgatcaggttgtgaaacagtctcagaatgcagaagaaggaaatacgccggatccggtgaaagtttatgacgggcagtattatgtcgaatattctgttgctcataatcggatcaataagcggttttattgggattctaatgagaacgttcttctttatacacttccgggaggcagtgtttcggcagcggtaggcagtaaagaatatacagacataacagagaaaaagagtgaagattatgtgatcctgaaaacagaaggaaagattgcatatattgcccttccgtttatccagcaatacacgaatatggaatacgaagtgtatgatgatccgacccgcgtagtgattacaactgagtggggagagaagaaagtggcttccatcaaaagggatacgcaggtacgctatcagggcggtgtgaaaagtccggttttgacagaagtaaagaaatcggataaggtaactgttcttgaagatgagaatgactggatgaaagtggctacaaaagacgggtttatcggatatgtgaaaacaaatgcgctcaacagtgttgaaaaagagctggtatcccgggattatgaagaaccggaatatacgaatatttcggaaaactatacgatcaatatggcgtggcataatgtttctaacgccgatgctaatagttatatattggaaacgattgcgtcgacaaaagggctgaatacgattgcgccgacatggttcagtcttgcggatacagaaggtaatattacatcgcttgcagatgcggattatgtaaattacgcacatcagtctaatttggaagtatgggcagtgctgagggattttcatggaggaatcaattcttatgaagaaacatatcaagtgctgagctatacgtcgaagcgggcaaaactgatcaatcaagttatatcaaaagcgctggagactgacgtggatggaattaaccttgattttgaacttgtatccgatgagtgcggaccgcattatgtgcagttcgtgcgtgaactttcggtgaagtgccgtcagaatggacttgttttttctgtagataattatgttccgcagccttataatgcacattatgacattgaagaacaggcggcagtggcggactatgttgttgttatgggatatgatgaacatacagaaggatcgtatgaagcaggttcggttgcgtcgatcgggtatctgaaaaacggaatatcagaggcccttaagtcagtaccggcggataaattgatcgcaggagtaccgttttatacccggctttggtttgaacggccaaagactgacgaagaatttgcggcagatgagggaacggaagccgaaaattatccgaataaagtaaagagttccgcttatggaatggatgatgcggcagaacttatctcatcaatgggagcacagacggaatgggatgataagacgaagcagaattatgcccagtgggaaggcgacggaggcgtttataaaatttggttagaagatactcagtcgctggaagagaagctgaaagttattaaagaaaaccagcttgcgggtgttgcggagtggagtcttggaatggaaggttccggcgtgtgggatctcatcctgcaatatgtaaattaa

SEQ ID NO: 565 - DNA, 1611 bp, Ruminococcus torques 1
catattatggcaaacattgatcttagtcagtatggtattacaggaactacggaaatcgtttacaacccttcttatgagctgctttttaaagaagagacagattcaagtcttgaaggctttgaaaaaggacaggaaagcgaactgggagctgttaatgtaatgacaggtatttatacaggacgttctccgaaagataaatttatcgtaatggatgaaaactccaaagatacggtttggtggacatcagatgaatacaaaaacgacaatcatccggcaagccaggaagcatgggatacatgtaaggcgatcgcgctgaaagaactttccaataagagactgtttgttgttgacgcattttgcggagcaaatgcagatacacgtatggcaatccgttttatcgtagaggttgcttggcaggctcattttgtaaagaatatgtttattcagccgacagaggaagagcttgagaactttaagccggattttgttgtatacaatgcatcaaaagcaaaagtggaaaattataaagaactgggattgaactcagagacagcggctatgttcaatattacaagccgtgagcaggttattctgaatacatggtacggcggagagatgaaaaaaggtatgttctctatgatgaactactatctgccgctgaaaggaatcgcttctatgcactgttccgcaaacacagacatgaacggagagaatacagcaattttcttcggactttcaggaacaggtaagacaacgctttccacagatccgaaacgtcttttgatcggtgatgacgagcacggatgggatgataacggtatctttaactttgaaggcggatgttatgcaaaagtaatcaaccttgataaagagtcagagccggatatttataatgcaattaagagaaacgctcttcttgagaacgtaactcttgatgagaacggaaaaattgactttgatgataagagtgtaacagagaatactcgtgtgtcttatccgatcgatcatattgaaaaaatcgtgcgtccgatatcggcagctccggcagcgaaaaatgtaattttcctgtcagcagatgcgtttggagtgcttccgccggtatcgattcttacaccggagcagacagaatattatttcttgtcaggatttacagcaaaacttgcaggtacggagcgtggtatcacagagccgacaccgacattctcagcatgtttcggacaggcatttcttgagcttcatccgacaaaatatgctgaagagctcgttaagaaaatgaaagctaacaacgcgaaagcatatcttgtaaatacaggatggaacggaacaggaaaacgtatctctattaaagatactcgtggtatcatcgatgcaattttgaacggagatatcgcaaatgcgccgacaaaaactattccgtacttcaacattgaagttccgacagagcttccgggagttgacacaaacattcttgatcctcgtgacacatatgcagacgcttccgaatgggatgaaaaggcaaaagatcttgcaggaagatttattaaaaactttgcaaaatatgagagcaacgaggcaggaaaagctcttgtttcagctggtccgcagttataa

SEQ ID NO: 566 - DNA, 1836 bp, Ruminococcus torques 1
atgtctaggcacggaatgaaaggtcctcatggaggaatgcgaggaggagcaaaagcaaaggattttaaaggctcgcttaaaaaacttgtaaaatatatgagcgtatataaagtgcagatgctttttgtcgctgttttcgcagtatgcggaacggtatttaacattgtcggaccgaaaatattaggtaaggctacaacagagatttttaacgggcttgtcagtaaagtatcgggcggatcgggaatggatttcggaaaaatcggacagatccttcttattactctcggtctgtatgtagtcagcgcgctttgttcctttattcagggaatgattatgaccggaatctcacagaaaacgacgtaccgattgagaaaagatattacggaaaaggtcaatcggatgccgatggattattttgatacgaagcctgtcggagaggtgctctcccgtgtgacaaatgatgtagatactctcggacagagtttgaaccaaagcgcgacgcagcttattacttctgtgacgactctgataggagttctcgttatgatgctttcgatcagtccgcttatgacggttgtggcgctgttgatcctgccgatttccgttggcctgatctcattcgttatgaaacattcgcagaaatatttcagcggacagcaggaatatctcggaaatgtaaacggtcaggtcgaggaagtgtacagcggacacaacgtgatcaaggcatttaacaaagaagacgatgtgatccgtgaatttgaccggacaaatgataaattgtatgaatctgcatggaaatcccagtttttctctggaatgatgatgccggtcatgcagtttgtagggaacttaggttatgtaggagtagcgatactcggaggttttctggcgattaaaaagacaatagaagtcggagatatccagtcatttattcagtatgtgagaaactttacacagccgatccaacaagttgctcaggtgacaaacatgcttcagcttgcggcggcatcatcggagcgggtgtttgaattcctcgaagaaaaggaagaagatcagacggttgaacaccctgtttcggtagaaggacttcacggaaatgtacagtttgaaaatgttcatttcggatacaatccggaaaagatcatcattaacgatttctctgcaaatgtaaaagaaggtcagaaaatcgcaatcgtcggtcctacaggagccggaaaaacaacgatgatcaaactgctcatgcgcttttatgatgtaaacagcggttcgatcaagatcgacggccatgacgtaagagacttcaacagaagcgaactaagagaaatgttcggaatggtacttcaagatacatggctcttccacggaacgatcatggataacatccgttacggaaaactcgacgcaacagaggaagaagttatacaggcagcaaaagcagcacatgttcaccgtttcgtccagacacttccgggaggctatcagatggaaatcaatgaagaagcaacaaacatctcacaaggacaaaaacagcttcttacgatcgcaagagcaatacttgcagatccgaagatcctcattcttgacgaagcgacaagttccgtcgatacaagaacagaagtaagaatccaaaaagcaatggataatttgatgaaaggcagaacaagtttcgttatcgcccatagattatcgacaatccgagacgcagatctcattctcgttatgaaagacggcgatatcatcgaacaaggaacacacacacaactcctcgcccaaaacggcttctacgccgaactatacaattcacagtttgaatcaacagatcagacctgcgcataa

SEQ ID NO: 567 - DNA, 2325 bp, Ruminococcus torques 1
atgaaaaacttatttaagtatgcgtccgagcactggaaagcgcttcttgcgatcgtggccattttgatcgtgcaggcgtattgtgatctgtctttgcctgcatatacttcggacatcgtcaatgtgggaatccaacaaggcggagttgaagatcatataccggatgcgatttccgcggaagatatggagacacttttgctttttacttctgaaaaagacggaaaaactgttttgtcggcatatgaaaaggatgacaaaacatatgaagaacaggcttatgtcttaaaagatactgtaaaagaagatacggataggacggaaaaattaagcggtattctggcagcgcctatgatgatggcggcaggatttgaatcaggaagcgatatgaccgcagatatcgaagaacagttgaaagcacagcttcctccggaaatgatatcggaagatatgacggttttggatattttgaaaatgatgccgcaggagcagaaacaggcatttgtatcggagatagaaaaaaagacggaagaacttcctgatacgatcacagagcaggctgccgtaaattatgtaaaagaagcttatgcagatctcggtatcgatatggatgaattgcagtttcgctatctgttttcaacaggagcaaaaatgatcggtcttgcatttctcggaatggtggcaagcgttcttgtcggatttcttgcatcccgcgtcggagcggcggcaggacgcgatctaagaggaagagtgtttaagaaagtcgtaggatattcaagcaatgagttcgatcatttttccacggcgtctttgatcacgagaagtacaaacgatatccaacaagtacagtttattatcgtgatgctgcttagaattgtactttatgcgccgattcttgcgatcggaggcattgtgcaggtatttcagacaaatgtttcaatgtcctggatcatcggtctggcagttgttttgatcgctttagtcgttttggttttgtttgcggttgcaatgccgaaatttaagagcctgcagaaattagttgataaagtgaaccttgttatgagagaaatattgaccggacttcctgtgatcagggcgtttagtacagagaagcatgaggaaaagcggtttgacaaagcaaatatggatctgatgaaaacaaatctgttcgtaaatcgcgcgatgacgtttatgatgccgatcatgatgcttattatgaacgggatctcggttttgatcatgtggtccggtgcaaaaggaatcaacgacggacagatgcaggtcggagatatgatggcgtttatccagtatacgatgcagattattatgggattccttatgatatgcatgttgtcggttatgcttccaagagcggctgttgcggcagatcgtgtggatgaggttctgtccagcaggacggtgatccatgatccgaaaacaccgaaaaaatttgaagaaaaacaaaaaggtgtgctcacattcgaccatgtttctttcaaatatccgggtgcggatgaaaatgttcttgaagatattacatttacggcaaaaccgggagaaacgacagcgattatcggaagtaccggaagcggaaaatcaacgcttgtcaatctgatcccccgtttttatgatgtgacggacggaagtatccgtttggatggaacagatattcgtgaagtgacacagcatgatttgagagataaacttgggtatgttcctcagaaaggactgttgttctcaggtgatatcgcatcgaatattatgttcgggaatccggaaggcggcgggcaggagatgaaagaagctgcgcagatagcgcaggcaacagagtttatcgaagcaaagccgaacaaatatgaaagtcctatttcgcagggcggatcgaatgtgtccggaggccagaaacagagactttcaatcgcaagggcgatcgcaaaacgaccggaagtgtttatttttgacgacagtttttcggcgcttgacttcaagacagacgttgctctacggaaagctttgaaaaagcggacgaaagaaagtacggtgctgatcgtggcacagcgaatcagtacgattttaaatgcagaacagatcattgtacttgatgatggaaagattgcaggaatcggtacacataaagagcttcttagaaactgtgaagtttacaaacagattgcggcatcccagttgtctgaaaaagaacttcaagatggaatgcaaagtgaagacagaaaaacggaagatataaaaagtgaaacgataaaaacagaagaaagaaaagaagcaatcagtgcaaaaacagcggaacaggaggtgagaagcgatgtctag

SEQ ID NO: 568 - DNA, 2622 bp, Ruminococcus torques 1
atgaaaacattttatcaaatgtccggagaggatacgatgaagcagttaaacggctctgccgaaccgcttactgaatcgcaggtgaaagagcatcaggaaaaatacggtcggaatgagcttgtggagggcaagaaaaagacggtgcttcagatctttcttgaacagtacaaggactttcttgttatcatcctgatcattgcggctattgcatcgggatttatgggagatgtggaaagtacggcggttattttaatcgtaatcacaatgaatgcaatactgggaacagttcagactgtgaaagcagaacaatctcttgccagcctgaaaaaactttccggtccggaagcaaaagtgctgagaaacggaacagttatcccgattccgtcttcggaagtaacagtcggtgatattgtaatgttggatgcaggagattacattcctgccgacggacgtcttttggaaagcgccagcctgaaagttgatgagagcgctttgacaggagaaagtcttggagtagaaaagtctgtagatattataaatgaagaagaggttccgcttggcgatagattgaatatggtttattcaggaagctttgtcacatatggaaggggatcttttgttgtaaccggaatcgggatggagacagaagtcggaaaaatcgcaagtctgttaaagacaacttccgagaaaaagacgccgcttcagatcaatctggatcagtttggtcaaaagttgtcgatcttgatccttgtattctgtggtattttattcggaatcaatattttgcgaggcgataagatcggtgatgcctttctttttgcagtagcccttgcagtggcggcaattccggaagcgcttagttctattgttacaatcgtactttcttttggtacgcagaagatggcgaaagaacatgcgatcatgcgtaaacttcaggcagtggaaggactcggaagcgtatcgatcatttgttctgataaaacaggaacgctgacacagaacaaaatgacagtagaagattattatgttgatgagctttgcattaaagcagaagatatagatttgaatgacccttcccagagcaggctgttgatcggaagtatgttatgcaacgattctaaaaatacagacggcgtagaaatcggagatccgacagaaacagctttgatcaatcttggaagtaagcttggacttgatccggaagaaataagaacgaaatatcctcgtgagagtgaaaatccttttgacagcgatcgtaagttaatgtcaacaaagcatacgattgaaaatgttcctacgatgatcgtaaaaggtgcggtcgatgtgttgctgactcgtatggatcagatacagatcggttctgaagtgcgtccgatgacggagcaggacagaaaaaatatcgaagaacaaaatcaggcattttcaagacagggactccgtgttcttgcttttgcatataaaacagtgtcagacgagttggaattgactttggaagacgaatataatcttacgtttatcggcttgatcgcaatgatggatcctccgcgtgaagaatccaaagctgctgtagcggaatgtaagaaggcgggtattcgtccgattatgatcacgggagatcataaagtgacggctgcggcgattgcgaaaagaatcggtattttggaagatgagtctgaagcatgtgaaggtgcggagattgataaactttccgatgaagaattgaaagattttgtagagggaatttccgtatatgcccgtgtttctccggaacataaaatccgtattgtacgtgcatggcaggaaaagggaaatattgtatctatgacaggtgacggagtaaacgatgcgccggcgctgaaacaggcggatattggtgttgcaatgggaatcaccggaagtgaagtatcgaaagatgcagcggcgatggtattgacagatgataactttgcaacgatcgtaaaagcggtagaaaacggaagaaatatttaccggaacattaaaaactccatccagtttttgctttcgggaaactttggcgcgattctcgctgtgctctacgcttctatcgcaggtcttccggttccgttcgcacctgtgcatttgttgtttattaacttgttgacagacagccttccggcaatagcactcggacttgaacctcactctaaagaagtgatggaagaaaaaccaagaccgatgaacgagtcgatccttacaaaagattttatgctgaaaatcggaacagaaggactgtcaatcggaatcacaacaatgatcgcatttttgatcggatataaaggcggtaatgcattgcttggaagtacaatggcatttgcgacactgtgctctgcaagattgttccatggatttaactgcaaatcagacagacctgttgtatttacaagcaagcttttaaataatatttatttgataggtgcatttgttgtaggtctggcattagtgacaatggttgttatgattccgggacttcacagtatttttaaagtacagacgttgaatttgacgcagcttttgatcgtatacggccttgcggcagtgaatattccgatcatccagattttgaaagcaatccgtctggcgctgaagaaaaaagaaaaataa

SEQ ID NO: 569 - DNA, 2340 bp, Ruminococcus torques 1
atggcagaaggacagaatgtgtgcagtgagaacaaggaaataagagaaacgatgcggcagatgcgtgttgtaaataaaggaatccggaaagttgacgcaaaagcgctcgtgacaggacgcgccgtatatacaaatgatatcgcatcttcagacagcttaatcgtaaagcttgtaagaagccctcatgctcatgcgctgatcaaagagattaatactacacgtgcggaggcgctcccgggaattgaatgtgtgcttacatataaagactgtccgaataaacgtttcacgctggcaggtcagacatatcctgagccaagtccgtacgaccggcttattcttgatcagagagtccggttcgtaggagatgcggtcgcaatcgtcgccggaacttcggaagcggttgtaaagcaggctatgaggctgatcaaagtaaaatacgaagtattggagccggttttagatttcagaacggcaaaagatcatccgatcctcgttcatccggaagaaaactggagaagtctttgtcctgtcggagcggataacaaacgtaatttgtgtgctcatgacgtaagtgagagcggagatgtagatgcagtccttgcatcttgcgaccatgtgatcgatcgggtataccatacaaaagcaaatcagcaggcgatgatggaaacatttcgtacatatacatatatggatgcatacggaaggctgaatattgtatcttctacccaagtgcctttccatgtccgccgcattctcggaaatgcgcttgatattccgaagcataaaatccgtgttataaagccgcgtattggcggcggattcggggcaaaacagacgtcggtttcggagatttatccggcgcttgttacatggaaaacaggaaaaccggcaaagattatttacacaagagaagagtctctgatcgcttcgtcacctcgccacgaaatggaaatccatgttcgtttaggagcggataaagagggaaatatcaaagggattgatctgtatacattgtcaaatacaggcgcgttcggtgaacacggccccacaacggtcgggttatccgggcataaatcgattcctctttacggaagcgcagaagcgtttcggttcagttatgacgtagtgtatacaaatgttatgtctgcgggagcttataggggatatggggcgacacaaggtatttttgccttagagtctgcggtaaatgaactggcacagacacttcatatggatccgaccgttctcagagcgaaaaatatggtgcgggaaggtcagatgatgcctgcctactatggggagacgacgagaagctgtgctctcgacagatgtcttgaacgtgcgaaagaaatgataggatgggatgaaaaatatccctgttatgactgtggaaacggaaaagtccgcggtgtcggcgttgctatggcgatgcagggatcgggaatttcgggagtagatacaggcgcggttgaaattaaagtaaacgatgacggattttacagtttaatgatcggggcgaccgatatgggaacgggctgcgatacgatactgacacagatggctgcagaatgtcttgagtgtgagatggaagatattgtcgtgcatggagtagatacagataattccccgtatgactgcggatcttacgcatccagtacgacatatgttacgggaatggcagttgtgaaaacgtgtgagacacttcggaaaaagatatgcgaaagaggggcggaatatctcggatgcagtcctgatgatgtggagtttgacggagaaaaagttgtcaatctgaaaacaaaagaagagataacgagaaaagaaataggaaacaaagtaatgtgcagcagcaacgcgccgctgtccgcaacagaagccttttcttctcctgtatctccgccgccgttcatggtcggtattgcagaagtggagatcgataaagagacgggagttgttgaaccaatcgattatgccgctgttgtagactgcggaacggtcgttaatccgaatcttgcaagagtgcagactgaagggggaatcgcccagggaatcggaatggcgctttatgaggatatcatttacagcgaaaaaggaaagaactacagtaattcctttatgcagtataaaataccgagccgtcttgatgtcggagagatccgtgtggaattcgagagcagttatgaaccgacaggacctttcggcgcaaaatccattggagagatcgttatcaatactccgtctcctgcaatttcaaatgcagttcaaaatgcagtcggagtaattgtgagggagcttccgatcacggcggagaaagtgtataaaggaatggcggaaaaagaataa

SEQ ID NO: 570 - DNA, 3561 bp, Ruminococcus torques 1
atgtatttaaaaagtatagaagtgcaggggtttaagtcctttgcaaataagattaaatttgactttcataacggaattacaggtattgtcggaccaaatggaagcggaaagagcaatgttgcggatgcagttcgctgggtactgggagagcaacgggtaaaacagctccgcggcggtacgatgcaggacgtaatcttttcgggaacagagaacaggaaaccgttaagttatgcctctgtagcgatcacattggataatgcggatcacaaattgcctgttgattatgaagaagttactgtgacgagaaagctgtaccgttcaggagaaagtgaatatctgatcaacggagcgtcctgtcggctgaaagatattaatgaaatgttttatgacacaggtatcggtaaagaaggatattcgattataggtcagggacagatcgataaaatattaagcgggaagccggaagaaagaagagaattgttcgacgaggctgccggaatcgtaaagtttaagcggagaaaaaacctatcggtaaagaaacttgaagaagaacgtatgaacttaacccgcgtaaacgatattttacaggaactggaaaagcagttgggacctttggaaaaacagtcggaaacagcgaaagagtatttaaagaaaaaggaagagttaaagacatatgatattaatatgttccttttggaagaagagaggatccgtgactgtttaaaagaaacacaaaagaaactggagatcgcatcattagaattagaagagtcaaatatcagttatgataagatgaaaacggagtatgaggcgattgaagaggaagtagaagagatcgaccttgcaatcgaaactgcaaaaaatcgtttgaatgaaacaaatttactgaagcagcaactggaaggtcagatcaatgtattgagagaacagatcaatacggctcgtatgaatgatgagcattatgataaccggttgaataccgtccaatcggaaatcaatatgagaaaagagcagaaagcgtcttttgaagaagaaaagaaaaatctttcggaaaagctgcgtgaagcgtcgcaggcagatacggttgtaaaaaaacgactgatcgatgtgcagacacagattgcggagcatacagaagagatcgaacagcggaaacaggaaattatggatcttcttggaaacagagcttctacgaaagcaaaaatccaacattttgatacaacgagagatcaaatatcaacaagaaaatccgtgcttgcaagaaatattttagaagtgtcggcaaaggcgaaagagcaggaagagcagctgcatgaacatgaagagcggttgtctgagattcaagataagattcggctctataatatgcagattaccgaaaatgaacagaagatacaaaaacttcaagaagagttaaatgtcagacaggaaaaattgaatgtcggacgaacagcatatcacagagaggcatccaggctggaatcactgaaaaatattacggagcgttatgatggatatggaaacagtatccgtaaagtgatggcaaataaggataaaaatccgggattgatcggcgttgttgcagatattatcaaagtcgataaagaatatgagattgcgattgagactgctttgggcggaagtattcaaaatattgttacggataatgaagatacagccaagaaaatgatttcttttttaaagacgaataagttcggccgggcaacatttttgccgcttacaagtatgagaggcggaggcggaattcgcaatgaagaagcgcttaaagaaccgggagtgatcggtacggcagataagcttgtttatgtagaggcgcgttttaccggactggcagagcagttgttaggaagaacccttgtcgttagaacgatcgatgacggaattctcattgcaagaaaatataagcagtcgattagacttgttactttggaaggagaattgatcaatccgggaggatcgatgacgggaggcgcatttaaaaattccagcaacctgctgagcagaagacgagagatcgaagaatttgaaaagacggtagccatgctgaaaaaagatatggatgccgccgaggcagatgtaagcaggattaaatctgaacgcgcgggatgctacaatatggtagatgatatccgtcaggaactcagaaaggcatcggtcatcgaaaatacagcgaagatgaatgccgagcagacgaagacgcgtatggaggaggcaaaacaaagctgtgcaggttatgtcgcagaacaaggaaagcttgaaagagagttaggagagataatagagaacgaagagtcgatcaggatggaacttgaggtatctgaaaatttagaaaaagaactcaatcttcggatcgaagaacttcatgctctgcttgaaaaagaaagagatacggagagtgaacagcttaagatctcagaagaatcacatttatctttggcaggaatggaacagcagaatcttttcgtatcggaaaatatttcacgtattgaagaagagatcgtcaagtttcaggcagaactggaagaattggataaaaataaagattatgcgtcagatgagattaaggaaaaggaagacaagataaaagagcttcggggaacgattgataattcaagagaattgtttgatgaaattgaaaaagaaataaaagaacagacagagggaagagatgcattaaacaggaagcataaacagtttctgcaaatgcgggaagacttgtcaaaacatatttcggctctcgataaagaatgtttccgcctggacagtcaaaaacaatcttacgaggcggcgtctgaaaagcagatgaattatatgtgggaagaatatgagatcacatacaatcatgcgatgaagcttcgtgacgaaaatctgacggatcttgcgtatatgaagcgtcagatacaagagttgaaaaatgagatccgaaaactcggcacagtcaatgtcaatgcgattgaagattttaaaaatatttccgaaagatatgcatttttgaaaaatcagcatgacgaccttgtcgaggcggagcagacgctgatgcagatcattgatgaattagatgctgcaatgagaaaacagtttgccgagcagtttttaaaaataaaagaagagttcaacacagtgttccgacagttgttcggaggcggaaaaggaacattggagttgatggaagatgaggatattttggaggcgggaatccgtatcattgcccagccgccagggaaaaaacttcaaaatatgatgcagctttccggcggcgaaaaagcgttgacggcaatttctttattatttgcgatccagaatttaaaaccgtcgccgttttgtcttcttgatgagattgaagcggcgctggatgataataacgtgacccgctttgcacaatatctgcataaactgacgaaaaatacgcagtttatcgtaattacgcatcgtagaggaacgatgacggcagcagatagactgtatggaatcacgatgcaggaaaaaggcgtttcaacgcttgtttcagtcgatcttttggaagataaattggatcgctga

SEQ ID NO: 571 - DNA, 2295 bp, Ruminococcus torques 1
gaggaattgatgacagaaacatttgagaaaaaaggaatgactttgataacagacagctttgtgtgccgtactttgcagtttcaagaacggttggaaaagcttttatatgacatacacacagaatttccggaaaaagtttattcattggaacttctttttgagaaattttcgggatttttgaaaacggatatggacgatggggaaagattcgacgcgctgatcaaagcggcggcggaacttacaagtcaggaagcgccgcgttgggaaatgatcgcaggatggctgcttgattttcgcttttcggaaaaattgaaagaagaagagaaatcgatcgggatttcagatctgtatgaaaagattgtttacctgacagaaaaaggactgtacggttcttatatcatggaaaattactcaaaagaagagatcgtagaagcggagagttatatatgcaaagaaagaaacaggctgtttaactattcgggattggatcttctcataaagagatatgtgatctcaacacatcggcatgttccgctggagagtccgcaggagatgttcttagggattgcccttcatcttgcgatgaatgagaaaagaaagatcagacttatgtgggtgagagagttttacgatatgctctctaaattagaagtgacaatggcgactccgactctggcaaatgcaagaaagccgtttcatcagcttagttcttgttttattgacactgttcccgacagtttgaaaggaattttccggtcgattgataattttgccatggtaagcaaatacggcggcggaatggggttgtatttcgggaaagtacgtgcatcgggaagtatgatacgaggatttgaaggggcggcaggcggagtgatacgctgggtccgcatcgtgaatgatactgcggttgcggtagatcagcttggggtaagagcgggagcggtcgcggtatatctcgatgcatggcacagagacttgccggaattccttcagcttcggacaaataacggcgatgagagaatgaaagcgcacgatgtatttccggcagtctgttatccggatctgttctggaaaatggcaggagaaaacctggatcaggactggtatctgatgtgcccgcatgagatcatgacggtaaaaggatattgtttggaagatagtttcggagaagaatgggagcgccgctattgggattgtgttcatgatgcaagaattaagaaaaggacagttcttttgaaagatctgatccgtctgatcatcaaatcagcggcggagaccggaactccgtttgcatttaacagagatacagtgaaccgtgcgaatccaaaccctcacaaaggaatgatttattgttctaatctttgtacggaaattgcgcagaatatgtccgcgatttctacggttgaaacaaaaatacagacagaagacaaagacacagtagtcgtcaatacaacaaaagcaggagagtttgtcgtctgtaatttggcgtctttgtcacttggtaaccttccggtaaatgatcctgcatatgtccgtaaagttgtgcgtacggttgtcagggcgcttgacaacgtgatcgatctgaatttttatcctgttccctacgcaaagatcacaaaccatacatatcgatctataggtcttggggtaagcggatatcaccatatgcttgcgaaaaataagatcaaatggcagtcggaagaacatttggcgtttgttgataaattgtttgagcagattaattatgcggccattgaagcaagcagtgattatgcgaaagaaaaaggttcttaccgatattttgaaggatcggactgggagagcggagcctattttgaaaagcggggatactgctcggatgagtggaaggagctaagggaaaaagtacacagacagggaatgagaaacgcatatcttttggcgatcgcgccgacaagttccacttccattatcgcgggaacgacagcgggaatcgatccggttatgaacaagtatttcctggaagagaaaaagggatctatgcttcccagagttgcgcctgatcttagcccggagacgtattggtattacataaacgcacatcatattgatcagaattggtctgtacgcgcatgcggagtcagacaaagacatgtggatcaggctcagtcgatgaatttttatataacaaacgattatacaatgcgccaagtgcttaacctgtatttaaaggcatgggaatgcggcgtaaaaacagtatactatgtaaggtcaaaatcgctggaagtagaagagtgtgagtcttgttcttcctag

SEQ ID NO: 572 - DNA, 6093 bp, Ruminococcus torques 1
atgagaaaaggaaggaaaaggtttatggcaggaagagtgatcaaaagactgctcgcaggggttcttacagtcgccgttgtgataccgggcaattttgttccggcgcaggcagcggaagaaccgcaagaagactacctcatttatccgaatccacataaggtggagtatcaggaaggagattacattctcggaaaagaattgaatgtaatctatgacaaaggaatcgatgaggcgacaaagaaccgtctgcaagaggcggcagacctcaaaggaatcgaggtaaacgaagcagagcagccaaaagaaggcgcaaccaatgtatatgtcggtgtacatggacaggacggaacggcagaagattatattacagaagaatatcagccggaagactctttgtttggaaagacggattcttactttctggcaagtgatgagaatgtaatatccgtacttggaaaagatgcagattctgcattttatggattgactacgctgtatcatgtttttgcacagatggacagcctgacaatcagaaactttgagatcgaggactatgcggacgtagtaagccgtggttttattgaaggctattatggaaatccgtggtctacagaagatcgtgtaaacttgatgaaatggggtggatattacaaattaaacgcgtatttctatgcgccgaaagacgacccgaaacatcgtacacagtgggatcagctttatacggaagaagagctggcaaataagatcagaccgcttgcagaggcgggaaatgaatcaaaatgccgatttgtttatgcccttcatccgttcccgcagggcaatcatcttcgttttgatgataattatgaagctgatttggcgaaacttcaggcaaaattcaaacaggtgatcgatcagggcgtacgtcagatcgcaatccttgcagacgacttttggaatccgggcggaccgaatggagtacgtctgttaaacgatatgactgcatggcttgaagaggtgaaaaagcagtatcctgatatgaagatgacgatcccttatgttccgtatgactatatgggcaacggaagcagcgcagaacttcaggagttgaaaaaggctccggctaatgttcagatcgttatgaccggcggaagagtatggggagaagtaacaaataactttacttctacgtttacaaataacgttggacgcggaccgtttatgtggatcaactggccgtgtacggataactctaagaaacatttgatcatgggcggttatgatacgttccttcatccgggagtagagccgtctaaaatccagggaatcatgcttaacccgatgcagcagtcggaaccgagcaaggttgctattttcggtaatgcagattatgcatggaatatttgggagacaaaggaagaggcagacaagtcatggaatgatgcattttcctttgtagatcataattcggcaattatgaatgatgcgagcgacgccctgcgtgaattatcaaagcatatgatcaatcaggcgatggatacgcgtgtaacacctttgcaggaatctgttgtactgaaagagaagttaaatgcatttaaagaaaaactggaagcagagactctcacggcggaagaagtagatgcggtaatcgcagagtttgaagtgcttcaaaaagcttcaaagacatatcgtgcaggcggaaacgaggcgatcaaaggtcagatcgtatattggctgaactgctgggatgacacgacagaagcggcgatcgcatacttaaacggcgtaaagagcgctctggcaggagacgtatcttctgtgatcagctataatacagcaggaaagacggcgttcgaccgttcaaaaacatatgactttttatatgtggatcatcaggaatatgccgaggtcggcgtacagcacattgttccgtttattaatacattggcagagtatgtatctgcaaaagcggaaacagcggtcaatcccgacaaagtgatcccaaaattcattacaagcagaaaagacgcgccgacaggttctaaagaaaatatttttgacggcgacgagtctacaagtgcagtttacaaaacgccgaattcattgtcgaaagatgattatatcggtgtagaatacaacaaagtaatcgatattgacagcattcgtttccttctcggaggcggaaaagatcattttgaacatgcaaaactgcagtatatgacagaagaaggaacatgggaagatctgacgttgacaggcatggaaaacaattttgccggagaattcggtaaagttcaggacatcaatgtaaaagaagcaaatcttccgagtgatctgaaagcaaaaggaatccgcctcattgcgacagcggcaaatgtaaatgactgctggcttgaggtacgcgaaatccagatcaacaaaaaagaagaagtttccgaagatacagagcgttacacaggagatgtgacgttcagcggtatttccacacagggaaatgatcatacggcggcaaaaatgtttgacggagatctgtctacagaaatgtggatcgctaaaggaccgtacagcggcgaaggaaaagatacgatcgcggcagacgcttatatccagattaccttcccggaagcgaagcagatcggaagcataagaatgacacagggcaaaacttcttctgcggatgtgtttaaaaaagtagaaatacagtatagcacagacggacagagcggttggaaaaaggcaggagagtttacgaacgcgaaagatcagacagtaaacattaacgtaactgacaagatcaaaggaatccgtcttgtgaataaagagcagacggcaggctgggtacgcatcggtgaattagatatccgcgcgccgaagaatatgacgactccgatcacatacaaagtgatcaagacggagcgttggaaagtagcgcaagggaaagaaacgagtctttatgacggagatgacaatacattcgtatggtacgatcctgatggagacggaaattcaacaagtgactctgttctgaaagatgatttcttaggatatgacctcggaacagaagctgtattggaaagcgctcatatcgtagtcggacatacaggcggagacaagcttgtaaaatatgcggttgagacgtctgtagataacagcacatggactccggcagaaggatatgcagagtatactggagcggcagaaggaaaagacgtactgaacattgatctgaaaggtgtgacggcgcgttacatccgtatccgcaatctggagaagaaacctacgtgggcaaaattctctgagtttactgtaaaacagaaagttgatcagacaggaacaacagagaatatttatacaaatgtaaaggatcacggaatgctcggaacgacagaagcaggtatgtcttctttgcagccgggaacgatcagtctgaaaaaagatcagtatatcggtgttgacttaaagaacatcaaagcgatcgaaaacattgcagtgaacgcaggagaaaatgcgaatgtgaaactgcaaagctctatgaacggagtgatctggactgatgttaatgcaggagcattggaagatgcaagatatgtaagactttacaatgcgggaaatgagacacaaaatgtttcggttcaagaattcaaagtgacgtatgcgtttatcggagagaaaacggtagaaagtgattttgctcagaaagattcggcaaacgatatgcgaagcaacggacaagtcggaaatgtattcgacggaaagcttaatacgcttggcaagatcacaggaacacaggatgcagggaaaaagatcgtattcgatctcggacagactgtgaattttgaatcgttcagatactatgtaaaagagacatgtcttgacttcttaagacatgcaaaatttgaagtagctgacaggaaagatgccacagacgatcagtggacaaagatccttgaagtcggaaacgcagaggctgtgcagatgtcggctaatgcgacagcgaaagatgcagactatctgcttcatgatactacaaatccgggaaatatgtatgcagaggcaaccggattgaatgtgtcgggacgttacttaagaatcgtaccgcttacaacatatacagagagatgggttgagctgtacgagcttcagatcaacggcggagcttatatgacgacagagtcaaaccgcgacatcatatcagaaacagcggaagaagcgggcaagatcccgtctaatgtatttgacggaaactttgcgacaacatacaaaccatctgcggcaaacggttcgtttacatatcgcatcagtgagccggatcagagaacgatccgtatcatacagaacggaaaggcgtcgaatgcagatgtacaggcagttctctataaagacggagcaaaacaagaagcagctgcgatcggaaagctgaatcagacgatcaatgaatttgcggttggaaaagacagtcagattctggaagttatcgtgacatgggcagaagacattccggagatttctattataaagacaagtgaaaaggaaaaagcagcggtcaataaagatgcgctgaatgaggcaatcaaaaagccgatcgacgataagtggactgcagacagcaaacgggcggcagaagaagcaaaagcagcggcagaagagatcgcggcaaatgagtacgtgactcaggaagttgtagatctggcagaaaaagcgcttcttgccgcacacaaaaacgcggttgtcaaaggcgatgttactgcattggaaaacgctttgaacaacatgaaagcaggcaaagaaaacgtcggagcagaggaagctcctgtttatgtagagatctattcggcgagaacttatgcggcatatgagtcggtgatgaatgagatcagagaggcgttaaaggataaagaaaatgtttcggagaaagaagcgcaagatctgacggcaaaacttgaaaaagccgaaaaagcactagtatattcatcgatccagagagagctggcagaaacagagttagaaaacgcagtaaaatataataaagacgactatacaactgtttcttacaaagcatatacagacgcgaaatcagcattagatgcgattgtgaaagcagataagacagagcggaagaacccgaaagaagtctatactgcacgaaatacttttgcgcagacagaagaaggtcttgtcaatgtagccgcattgaaagcaaaacttgcagaagttggaaaactggatgagaatctttatacgaaagacagttggaaagagcttcaagatgcagtgaagaatgcagaggcttatctggaaaacggaacaaaagatcaggtagataaagcggtttccgatctggaaaatgcagtgaatggtctggtagaaaaaacagaagtaactgtagatgatgtcattgcagaaatggaaaaaataaacggcaaagattacactgaagtaagtttcggcgcacttcaggatgcgatcagcaaagcaaaagcagataaagatcagaacgatccggcattagatcaggcgaatatcactgcaatgaaagaagcgaaagcggcgcttgtaagtatcgtagatttgaaggctgctcttaatgaagctgctcagcataaagcaggtacttatacggtaagttcttataagcttttgaaagatgctgtgacaaatgcagagccgttgaaagtaaacggtacaaaagaagaggttgccaatgcggcggctgcaatccgtgcggcgatcaagggtctggacaaacgtgcagttggtttggatgagtacagagactctatcgtattgaagaaaccggaaggttatacagaagaaagctatgcggcatataaaaatgcatatgatgcgctgatggctctggattcaaaggagacaacggcagaaatgtttgcaaatgcgaaatctgcatttgaagctgcacaggcaggtcttgtacagaaaccgggaagcaacggaacaggaagttcttcaaacggaactgtttcaaacggagcagttgcaaccggagatacagtgaatgtttcagcattagccggattattcctgtcactcttgatgatagcggcgtttatgaaacgtaaaacttttctgggattttttgaaaaagatgaataa

SEQ ID NO: 573 - DNA, 3348 bp, Ruminococcus torques 1
atgaaagcgttgcttgctccccttgcggaactggcggattatgaagaaatccggaaaaacagaacaaaagaaaacggaatgatacagatctcgggttgtgtaaatactcagaagatacatttgcttagtggaatcggatcgggatgcgggtataaacttgttgttttttcaaatgaggaaaaggcaaagaaggcatacgaagagtatttactgtttggagaagagacgtatttgtatcctgcaagagatttgcttttttattatgcggatattaaagggaagacacttacaaatcgaagaatggaagtgttaagagcgattgcagaaaagaaaaaagaagagccggtcactgtgattacgacgatggatgcttttttggacgggatcatttccccggatgaaattcaaaaaaacagaattcatattacaggagaagatacggttgatcttacgaaacttgaacaagatctgacggctcttggatatgagagagaaagccaaatagaagcgccgggtcagtttgcggtcagaggggggattatcgatgtttttcctcttgcggaagagatgccggtgcggattgagctttggggtgatgagatcgattctatccgtatgtttgatgctaagagccagaggtcgatagaaaatatttcggagatcacaatttatccggcttcggaaaattgttttggaaacaatggtttggtatcctttttgaaatattttccggaaaatgaaacactattattttatgatgaaccgcacagactgcaggagacggcggaaacagtagaggcggaatatacggaaagtttgaaaaaccgggctgatgcaggtatgaaagaagaaggcgaagaagagttgagagtctttcagacaaaagatatcatcagtgagatgaatcgttacagcgggatcggtttgacaacgctcgaatcaaaatgcggtttatttaaagtaagatcggtttatacggtgcaggcaaaaggggtaaatccttataataacagttttgagcttttgacacgtgatttaaagcggttaaaacgaaacgggtacagagttgtccttttatcgggttcgagaacgagagcaaaacgtctggcggaagatttaagagactatgatttgagcagtttttacagtgaagatatgcagagggaagtaaaaccgggcgagatcatggcagcgtacggctatgcgtcagaagggtatgagtatccgatgcttaaatttgtcgttatttcggagtcggatattttcggaagaaaaaagaaaaagaaaaaacgcaaaaagtatgaaggtcagcggattcaggattttgccgagctgaaacccggagattacgttgttcacgaaaatcatggaatcggcgtatataaaggaattgaaaaaattgaagtagagaagatcgtaaaagattatatgaagatcgtctatgccgaaggcggagtcttgtatatacctgtggcacagatggatctgatccagaaatatgcaggagcggatgcaaagaaacctcggttgaataaactcggaacgatccagtggggaaaaacaaaaagccaagtaaagaaagctgttcagattgtagcgaaagatcttgtagaattgtacgcggtcagacaacagtcggaaggatttgtatatggaccggatactgtctggcagaaagagtttgaggaaatgtttccgttcgaggaaacggatgatcagcttcaggcaatagaagatacaaagcatgatatggaaagtaagaagatcatggatcgtcttatctgcggagacgtaggatacggaaagacagaaattgctatacgggcggcatttaaagcggttcaggaaggaaaacaggttgtatgtctcgtgccgacgacgattttagctcagcagcactataatacatttgtacagcgactgaaagagtttcctgtaagaatcgatctgctctgtcggtttcggtcggcggcagaacagaaaaagacaatagaggacacgaagaaagggtttgtggatattcttgtcggaacgcacagagttttgtcaaaggatgtagtgtttaaagatcttggattgctgataatagacgaagaacaacggtttggcgtgacccataaagaaaaaataaaaaaattaaaggaaaatattgatgttctgacattgacggcaacaccgattccccggacgcttcatatgagtctgatcggtattcgggatatgagcgtattagaagaagctccgaatgaaaggatgcccattcagacttatgtaatggagtataatgacgaaatggttcgggaggcaatcacgcgggagttggcaagagacggacaggtatattatgtttataatcgcgtcaatgatattgccgatgttgcgggacgtatacaaagtcttgttccggatgcgaatgttgcatttgcgcatggacagatgaaagagagggagctggaagatatcatgtatgattttatcaacggtgatatcgatgttcttgtttcaacgacgattattgagaccggattggatattccgaatgcgaatacgatgatcatacaggatgcggaccgattcggattatctcagctttatcagcttcggggacgtgtcggtcgttctaatcgtatggcatatgcatttcttctgtatcagagagacaaattattaaaagaagtggcagagaagaggctctcggcgatccgtgagtttacagatctcggatccggaatcaaaatcgccatgcgagaccttgaaattcgcggggcaggtaatcttttaggagaagcgcagagcggtcatatggaagcggtagggtatgatctttattgcaaaatgctaaatgaagcggtcagacaattaaaaggcgggccggaagcagaaacgtttacaacattgattgatctaaatgtagatgcatatattccggaatattatattaaaaatgaatatcaaaagctggatatatataaacggatcgcggcgattgaaagtgaggaagagttagaagatatgacggaagaactgatcgaccgctttggcgatattccgaaaaaagtgcagcagcttcttgtgatagcatctttaaaaagtctggctcattcggtgtatgttactgctatcgagcaaaaaggtgaagaaattcgatttacaatgtatgaaaaagcaaagatcgatccatccggtattcctaaatttttggatagttataaaaacgatctgatattcagggcagaagaaccgccgtattttctgtattgcagaaaaggcagaaacaaaaaaagcaatacagaaaatgtactggatacagtgagacggattttggaagacctaaaaaagctgacttaa

SEQ ID NO: 574 - DNA, 3864 bp, Ruminococcus torques 1
atggagaaaaacagaatccgtcccattaaaaccggaaaaagtttccgcatgagttactcacggcagaaagaagtattggagatgcctaacctcattgaagttcaaaaagattcctatcaatggtttcttgacgaaggactcaaagaggtgttcgacgatatttccccgatcgctgattacagcggacacttaagtctggaattcgtagatttcacactttgcgaggacgatgtgaaatatacgatcgatgagtgtaaagagcgcgatgcgacttatgctgctcccttaaaagtgagagtccgtctccacaataaagagactgatgagattaacgagcatgagatttttatgggagatcttccgctgatgacaaagacgggtacatttgttatcaacggtgcagagcgtgttatcgtcagtcagctcgtgcgttctccgggaatttattatggcattgctcatgataaactcggaaagaaactgtactcatctacagtgatcccaaaccgaggcgcatggcttgaatatgagacagactccaacgacgttttttatgtgcgcgtcgatcgtacaagaaaagttccgatcacagtgctgatccgtgcacttggtatcggaacgaatgcagagattgttgatcttttcggtgaagagccgaagatccttgcaagctttacaaaggacactgcggagagttatcaggaaggtcttttggaactgtacaagaagatccgcccgggcgagccgcttgcagtagacagcgcggaaagtctgatcaacagcatgttctttgatccgagaagatatgatctcgcaaaggttggacgttataaattcaataagaaactgatgctgaaaaaccgtattgcaggctgcatacttgcagaggatgcggtgagtcagcttacgggagagatagttgctgaaaaaggtacgaagattactcgtgaacttgcagataagatccagaacaatgccgttccttatctgtgggtagaaggtgaagatgaagagagaaacatcaagatcctttctaatatgatggtagattttcaggctgttacagatatcgatcctgaagaagtaggtgttacggagcaggtatattatccggttttggcgggaattatcgaagagtccgcaggagacatcgaagagatgaaagcgttgatcaaacgtgacattcacgatttgatcccgaagcatattacaaaagaggacatcctcgcgtccatcaactataatatgcatcttgaatatggcatgggaacggatgatgacattgaccatttgggtaaccgccgtatccgcgcagtaggagaattgctccagaatcagtacagaatcggtctttcaagattagaaagagttgtccgtgagcgtatgacgacacaggatcaggaaggaatttccccgcagtcactgatcaatatcaaaccggtgacggcagcggtgaaagagttcttcggttcttctcagttgtctcagtttatggatcagaacaacccgcttggagagttgacacataagagacgtctttccgcacttggaccgggaggtctttccagagatcgcgccggattcgaggttcgagacgtacattattcacactatggaagaatgtgtccgatcgagacgcctgaaggtccgaacatcggtctgatcaactctttggcaacatatgcgcgaattaatcagtatggatttgttgaagcgccatatcgttggattgataagtctgatccggaaaatccggtcgttacagaaaaagttgtttatatgacagctgacgaagaagacaattatcatgtggcacaggcgaatacaccgcttgatgaagaaggccactttattcataaaaatgtatccggtcgttacagagaggaaacacaggaatacgagagaagcaagttcgattacatggatgtttctccgaagatggtattctcagtcgctacggctctgattccgttccttgaaaacgacgatgccaaccgtgctcttatgggatcgaacatgcagcgtcaggcagttccgcttctgacgacagaggctccggtagtcggtacgggtatggaagtaaaagctgccgttgactcgggagtatgtgttgtcgcagaacgggcgggaacagtagaaagctctacgtcaaaagagatcgttgtccgcgaagaagacggcaagaagacatcttataagctgacaaaattccagcgaagcaaccagagtaactgttacaatcagcgtccgatcgttaataaaggcgacgttgttgcggcaggacaggttattgcagatggaccgtctacatcaggcggagagatggctcttggtaagaacccgctcatcggttttatgacatgggaaggttataactacgaggatgctgttcttctgagtgagagacttgtacaggatgatgtttatacttctgttcatatcgaagaatatgaggcagaggcaagagatacaaaactcggacctgaagagatcacgagagatattccgggcgtcggcgatgatgcgttgaaagaccttgatgagagaggaatcatccgtatcggtgcggaagtgcgcgccggagatattctcgtcggaaaagtaactccgaaaggagagacagagcttacggctgaggagagacttctccgtgcgattttcggagagaaagcccgtgaagtaagagatacatccttgaaagtgccgcacggtgagtatggtatcgttgtagatgcgaaagtatttacaagagaaaacggcgacgagctttcacccggggtaaatcaggcggtcagaatttacatcgcgcagaagagaaagatatctgtaggagataagatggccggacgtcacggtaacaagggtgtcgtttcccgtgtgcttccggtagaggatatgccgtttcttccgaacgggcgcccgctggatattgttttgaatccgcttggtgtgccgtctcgtatgaatatcggacaggtgcttgagatccacttgagtcttgcggcgaaagctcttggatttaacatttctacgcctgtctttgacggagcaaacgagatcgacattatggatactcttgatctggcaaatgattatgtcaatcttgagtgggaagagtttgagaaaaagcatggacaggagcttcttccggaagtattgcagtacctgtctgacaatagagaacacagaaacctttggaaaggcgttccgctctcaagagacggtaaagtgcgtttgagagacggacgtacaggtgagtatttcgacagtccggtaacaatcggacacatgcactacctgaaacttcaccatcttgtagatgataagatccatgcgcgttctacaggtccttactccctcgttacgcagcagccgctcggtggtaaagcacagttcggcggacagcgtttcggagagatggaagtttgggcgctggaggcgtacggcgcatcttatacactgcaggagatcctgacagtgaagtccgacgacgttgtaggtcgtgtgaagacttacgaggcgatcatcaaaggagaaaatataccggaaccgggtattccggagtcatttaaggtgcttttaaaagagcttcagtctcttgcgttggatgtgcgtgtcctgcgtgatgacaatacagaagtagagattatggagaacgtagattacggcgagacagatctgcgtcacattatcgaaggagacagaaagtaccgtgatgagaatgaatctttcggtgatcacggatttagtgagaaggagtttgtaggcgaggaactcgaggatgttgaacctgaggaagagccggatgatgatgccccggtggacattgagtttgacgagtattccgattatgaggaagaataa

SEQ ID NO: 575 - DNA, 3261 bp, Ruminococcus torques 1
atgagaacatgggacaatacaggaggaagaaagatggcaaaaagaaatgatatccacaaggtacttatcatcggctccggcccgatcattatcggacaggcttgtgaattcgattattccggaacacaggcttgtaaagcattgagaaatttaggatacgagattgtattggtgaattcaaacccggcgacaatcatgacggatccggagattgctgacgttacttatattgaacctttgaatgttgacagaatagaacaaatcataaaaaaagaaagacctgatgcattactgccgaatctcggtggacagtccggtcttaatttatgctcagaactggcgcaggcgggcgttttggagaaatataacgtagaagttatcggcgtacaggtcgatgcgattgagcgaggagaagacagaatcgaatttaagcacacgatggatcagctcggtatagagatggctcgaagcgaggttgcatattctgtggacgaggctcttgcgattgcggagaagcttggatatccggtagttcttcgtcctgcttatacgatgggcggcgcaggcggcggtcttgtatataatgtagatgaattgaaaacagtatgcgccagaggtcttcaggcaagtcttgtaggtcaggttcttgtagaagaatctatcttgggatgggaagaactggaacttgaagttgtccgcgacgcagagggcaatatgatcactgtatgctttatcgaaaatatcgatccgctcggcgttcatacaggagattctttctgctccgctccgatgcttacgatctcagaagaagttcagcagcgtctgcaggaaaaatctcataaagtagtagattctgttaaggtgatcggcggctgtaacgtacagtgggcgcatgatccgaagacagacagagatatcattatcgagatcaacccgagaacgtctcgttcttcggcgcttgcatcgaaagcgacaggattcccgatcgcgcttgtatccgcaatgcttgcgacaggcatgacgctgaaagatattccgtgcggaaagtacggtacattggataaatacgttcctgacggagattatgttgtgatcaagttcgcgcgctgggcatttgagaaattcaaaggtgtggaagacaagcttggaacacagatgcgtgcggtaggcgaagtaatgagcatcggtaagaacttcaaagaagcgttccagaaagcgattcgttctttggagacaggaagatacggactcggtcatgcgaaagattttgacggaaaaacaaaagaagagcttctcaagagtttgcggtatgcgacaagcgagcgttactttgttatctacgaagcgctgagaaaaggagcttctgtagaagagatccatgaactgacaaaagtaaaacactatttccttgagcagatgaaagagctggtagaagaggaagaggctctgcttgcgtttaagggaggtctgccggaagacaatgctcttatcgcggcgaaaaaagacggattctctgataaatatttaagccagattcttgaagtggatgaggatgagatccgcaataagagaatcagcctcggcgttgaggaaacgtgggaaggcgttcatgtaagcggaacgcaggacagcgcatattactattcgacatataacggaacggacaaaaacccgatcagtgaagagaaaccgaagatcatgatcttaggcggaggaccgaaccgtatcggacagggaatcgagtttgactattgctgtgtacatgcgtctcttgctttgaaaaagcttggtttcgagacgatcattgtcaactgtaaccctgaaacggtatctacagactatgacacatctgataaactgtattttgagccgcttacactggaggacgtattgagcatttataagaaggaaaaaccggtcggagtgatcgcgcagttcggaggacagactccgctgaaccttgcggcagatctggaaagaaacggcgtgaagatcttaggtacggctccgtctgttatcgatctggcggaagaccgcgatctgttccgtgaaatgatggataagcttgagattccgatgcctgagtcgggaatggctgttacggtggacgatgctcttgaaattgccgagaagatcggttatccggttatggtgcgtccgtcttatgtacttggcggtcgtggcatggaagtcgtatatgatgcggaaagcatggtaggatatatgaaagcagcagtcggtgtgacacctgaccgtccgattttgatcgaccgtttcctcggacatgcaacagaatgtgaagcagacgcgatcagcgacggcacacatgcgtttgttccggcggttatggaacatatcgagcttgcgggagtacattccggagactcggcatgtattattccttctaaaaatatttcggaagaaaatgtaaagacgatcaaagaatatacgagaaaaatcgcagaagagatgcatgtgaaaggtcttatgaacatgcagtatgcgatcgaaaacggaaaagtgtacgtattggaggcgaaccctcgtgcgtcaagaacagtgccgcttgtatcgaaagtatgtaatatccgcatggttccgcttgccatcgacattgtgacaagtgaactgacaggaagaccttcaccggttccggcgttaaaagagcagaacattccgtactacggagtaaaagaagcggtattcccgttcaatatgttcccggaagtagacccgctgctcggaccggagatgagatcgacaggagaagtgctcggattgtccaaatctttcggcgaagcattttataaggctcaggaagcaacacagacaaagcttccgcttgaaggtacggtgctgatctccgtaagcaatcgtgataagccggaagttgtggaagttgcggctgattttgcaaaagcgggattcaagattattgcgtcagaccatacttgcagcctgcttaaagagaacggaatcgaagcagagaagatcaataagcttcaggaaggccgtccgaatatgctcgatgtgatcacgaacggaaaagttgacatgatcgtgaatacaccgtcaggaaaagaaagtaagaatgacgacagctatttgagaaaagctgcgatcaaaaagaaagttccgtatatgacgacaatggctgctgcgaaagctgccgcaaacggaattcttgcagtgaagaaacatggaagcaaagaagtgaaatcacttcaggaaattcacggagaaattacggacaaagaatag

SEQ ID NO: 576 - DNA, 2097 bp, Ruminococcus torques 1
atgatttcagtggtcaaagcaggcaagtggattgcaaagcatcgggtgttgatcttgattgtcagcgcgctgcttatgattccgtcttttttcggaatcgtgaatacgagggtcaactatgatctgctcagctatctgcctgaacatcttgaaaccgtgaaggggcaggatattttggtagatgaatatggcatgggagcgttttccatggtcgtagtagaagatatggaactaaaggatgtacagaagctggaagaaaagttcagcgaagtaccgcatgtaaaagatgtgttatggtacgatgatgccgcagatatcagtcttcccgtcgagatgctgccgaaggatataagggaagcctttttcaaaggagaagcaacgatgatgttggctctttttgataatacgacatcttcggacgaggcaatggatgcggtgacacagatgaggcagattgcagataagcaatgctttataagcggaatgacaggtgttgttacagatattaaaaatctttgcctgcatgagctcccgatttatgtggtgatcgcagtactctgctgtcttttgatattggaactgacgtccacgtcgtttcttgtaccgatcttgtttttgataagtatcggagcggcgattgtatataatctcggaagcaatatctttttgggagaaacgtcctatattacgaaagcgctgactgcgattttacagttaggcgtaacgatggattattccattttccttttgaatagttatgaggaaaataagaaacggtttccgggagaaaaagaacgggcgatggggcatgcgatcgcgaatacgtttaagtcggttgtcggaagttcggtgacaacgatcgcaggcttcgcggcgttgtgcgccatgacgtttacacttggaagagatctcggaatcgtaatggcaaaaggtgttgttatgggagtgctctgttgtgtgacgctgcttccttcacttgttcttgtatttgacaaatggatagaaaaaacaacgcatagaccactgttttctaatatgaataaaccgtcagagtttattacgaaacattatgctgtctggatcgttttgttccttgtccttttgttccctgcaatttacggaaacaaccatacgaagatctattataatatcgctcagtctcttccgggatcgcttgacagtaatgtggcgaatgaaaaactggaaaaggattttgaaatgggaaacatgcatatgatcctcatggataaaaatatggatggtgtgcagaaacagaaaatgctcgatcaggttgatgaagttgacggtgtaaaatggacgatcagcatgaactctttgataggtccgtccgtgccggattcgatgatcccggacgatattaagagtatgttgaaaagcgatcactatgagctggcatttatttgttcggaatatgcatctgcaacagatcaggtaaatacacagatcgcacagatcgacgatattgtgaaatcatatgacgatgacgctatggtgatcggggaagcgcctttgatgaaagaccttcaggatgtaacggatgtagaccttacaatggtcaatgttctttcgatggcggcgatctttctgatcattatgatcgtatttaagtcaatttcccttccggttattcttgtatcggttatcgagtttgcaatagcggtcaacatggcgtttccatattatatgggaacggaacttccgtttgtggcaagtattgtgatcggaacgattcagcttggagcgactgttgactatgcgatcttgatgacgagccgttatcagaaagaacgcggacgcggaaggtcgaaaaaagaagcgatcgcgatcgctcataaaacaagcatgccgtcaattatcagcagcggtttaagtttctttgcggcgacgttcggagtggcgtgctactctaaagtagacatgatcggttctatatgtacattgttggcaaggggagcgatcatcagtatgatcgtagttatacttgtacttccggcgatgtttatgatatttgataaaattatctgtaagacatcgattggatttctcggagaaaaggcgaagaaaacggcgcaataa

SEQ ID NO: 577 - DNA, 2235 bp, Ruminococcus torques 1
gtgtgcataaatagacaaaatacaagagaaacgggcgggaaagagctgtctgtttctctttattttttggacggaatcaagtataatgaaactatcacggaagcgggcagaaacgcttcgatattttattatgaggaaacggcgaggtgggcttttatggcaaggagaaaaggtgcgggcagaaacgcggcaaaaagtgcaggcaaaggcatcgtgaatcacgcagccggcggtatggcgggcagtgcggtgaaaaaggcgtcaggcggcgcaagccggaacagggcgaacagtccggcgaaaaacactgcggcggatgcggcaagtatgaaagcgaatgaacatgcctatgagataggagaattggatcattatctgtttggtcagggaaaccattacgagatctataaaaaattaggcgcacataaagtagtgaacgacaaaacggagggcgtttatttcgcggtatgggcgccgaatgcaaagaatgtgtctgtagtcggggaatttaatgactggaatttggaaagagacagaatggagcgtcaggagcctctcggtatttatgtgaagtttgtaccggaagcgaaagaaggacagctctataagttctgtattgagacgcagaaaggcgagcttctttataaggcggatccgtttgcaaattatgcggagcttcgtccgggaacggcgtctcgtattacggatctttcccgtataagatggacggatgacgcatggatgaaagcgcggaagacatggaatcataagaagaatccgatgtcgatctatgaagttcatatgggttcgtggatgcgtcacccgggaagggaagatgaaggattctacacatacagagagttcgccgaggcgatcgtaaaatatgtaaaagagatgggatacactcatgtagaactgatgggcattgcagagcatccgtttgacggttcgtggggatatcaggttacgggatattatgcgccgacttcaagatacggaactcctgaagattttgcatatctggttgaccttctgcataaaaacaatataggagtgattcttgactgggttccggcgcattttccgaaagatgctcacgggcttgctgattttgacggaactccgacattcgagtatgcagatcccagactcggagaacatccggattggggaacgaaagtatttgattacggaaaagcggaagtgcgcaacttcctgattgcaaacgcattattctggatcgaacatttccatgtggacgggctccgtgtggatgctgttgcgtcgatgctctatcttgattacggaaaacaggacggacagtgggtcgcgaacaaatacggaggcaacgagaatcttgaggcgatcgatttctttaaacatttgaattcggttgttctgggacggaacaaaggcgctgtgatgatcgcggaagaatcgacggcatggccgaaggtgacaggattgcccgaagacgacggccttggtttcagcctgaaatggaatatgggatggatgcacgattttacggagtacatgaaacttgatccgtatttccgtaaaaatgcacatcatatgatgacgtttgcgatgcagtatgcatacagtgaaaattatattcttgtgttgtcgcatgacgaagttgttcatctgaagtgttcgatgatcaataaaatgccgggacttgggttcgataaatttgccaacctaaaagcaggctatgcgtttatgatgggccatccgggaaagaaacttctgttcatgggtcaggaatttgcacagcttagagaatggagcgaaaagagagagatcgattggttcctgctcgccgaacctgagcacagagatattcagaactggtatcgggatctgcttcatttgtataaaaacaataaagctctttatgaaatggacaatgatccggcgggatttgagtggatcaatgcggatgatattttcagaagtatttacagctttgtaagacattccaagaataaagaaaagaatttgcttttcgtctgcaactttactcctgtggaaagagaagattacagagtcggcgttccgacgaggaaaacgctgaagcttgttttgaacagtgatgaggaaaagtacggaggaaaaggggaaaaacgtccgcttacttacaaaccggtgaaaaaggaatgcgacggtcaggcgtattcgatcgcatacccgcttccggcctatggtgtggcagtgtttgagtattaa

SEQ ID NO: 578 - DNA, 1977 bp, Ruminococcus torques 1
atgttaggtaaactggcttatcgaaacgcaaaaagaagtatcaaagattatttgatctatctgattacaataacactttctttttctttaatacttgcgtttaatcttgtggcaagttccgatgaggttgcagcgctgtcatccggaatgagcacatttaaaaatgtattgatcttcgtaaatatcgtcatcgtatttgtagtatgttttttaatcaactacacgacgaaatttatgtttgaaaaaagaagcaaagaattcggaacatatatgctgctcggtatcaaaaaaacatcaatcgcccgtctgcttgtaacggaaaatatattagtaggaatctttgcatttattttggcaatccctatcggctttgtattcagtcagtttatatctgtaatcatcgtaaaactgctcaaaataccgaaaacaatcttcatctttgtaaactttgtgtctatcggaatgctggctgtttactttctgctgatctaccttttagttcttctaaatctgttaagacgaataaggaaaatgactgtacacgattttctttactttgaaaagcaaaatgaaacgaaaatgtttcacggaaacagaaaacgaaacattttatttctattgagtatcatactcggaattgccgctcttgccctttgggcttcccggtggacactggaaaaaaacggagcacaggaaacgctcacttatttaattatcagtatgtcgatactgatcgtaagtatgtacggcatttgtgccacatgcgcagacatgttattgtccgctttattgaaaagcaaaaaaataaaatacaaaaaagattacctttttacagccagaacgtttgcgtcaaaggcgcggacaatgagttttacgttcggaactctttctatgctgatcctgctttctttattatgtttaaattattcaagcatatgcaaaggagtctatcatagaagtattgaattaacagctccttacgacgttgatattttcgattatgaacagccttttgacgattttaacgaatatcttcgtgtgatagatgaagattatacgataaacgaatcaatcgaatttaatatttacaaagatcctgcccatcaaatacaaaattactacgatgttcaattttatgattttgatccggtaatgaaattaagcgactataataaattattaaaaatgcgcagcttaactccgatcgagctaaaaagcgacgaatatttccttgtcaccgaccgccagttgttatataaagtggaaggtaacaacgagatccaaaatatccggttcgcagatcaaaagctgcatttaaaaggaatcgatacaaactccttttggtatactatgaataatacaggcagatttacggtaattgttcccgacaaatatgtcagcggattagaaataagcgaaaagcatctgatcgcagacacgaaagaagatacaacatctaaattggaagaaaaaataaaaacggatttaaaccatctgctcgtcacaaaaaatgatgacaacgagacaatccgcgaatattacagagtcaatgtaagaggtactgctgtcgaggaacaaaatacaatgactgcaatgatcgcaagcctctgcctgtatattgctttcatcctgatctctgcagtaggtacaattcttgcgatacaatcgttgagcgactctgcaaaatataaataccgctacacgacactgcaaaggctcggcgtaaacgattcttctatttttcggacgatccgcagacaattacttatctttttctttgtacctgtcatttgtcctgtgattgccggattttgtatgttagcttctatgaataatgtttatcatatcatgctggaaagcagatatacttacctgctctattttataagcggattagcgattttctttttcatatacggtatttactggatcacggcttacatcggctttaaacgaaatatcaatgaggagagttag

SEQ ID NO: 579 - DNA, 3501 bp, Ruminococcus torques 1
ttgtcccgaaaggcagcttttgagttgagtaagtttacatggggaaaaggaaaacaaaaatacagatatcccctatatgatgaggaggtattaagacaaatgaaaaagaccaaaaaactggtaatgtcatggctgcttgccttttgctgtgtcatcactttggttgcgccgtctgtcgtaaatgcggcagcagatgatttcgagatcatcgatgatacagacgcacgttttgtatattcagacggtaatgcaaataacggcggatgggaatcggcgggagcaggcgacgcttccgttacagagcactggagcaacacggcaggcgcgacattggacattacattcaacggaacaaaattggagctttatggtaaaaaagctgcaaatcatgcaatgttcagcgtgagcattgacggaagcgaggcagtagaatgcgacgcctatgccgcagtgacagaaccggaggcaaaattgtttgaaagcaaaacgcttgcggcaggaaatcatacagctcatatcacggttttagaaaaaagaaatgaagcttctacagggacaggaagcgtttatggcgtacagtttgtgtatgcaaaagcatttgaggcagagattgtcgaaccggaatttccgggatatacagaagttgacgatgctgtttttacaacaaatcatgagcccttcaagatacagtacgagccggcaggcgcttggactgcgggaagcggtaacgggaatttgttctataacggaacagagcattacagcgcaaaaggcgttgatgtatcttatgagatgatctttaccggaaccggagtagagatccatgccagcaaaaatacagttcatatgaactgtgacgtttatatcgacgatgtgaaagtcggagaactggcggcacaaaatgccggagcgatgcacaaacagaaattatttgagaaaaaagatcttgcgaatacaaagcatacgcttcgtgtcgttccgaaagagggagaaagcattgaaggcaaagtaatacagcttgataagatcgttgtttttcacgatgaaattactgtgccggattcgatcgtattgaaccggacaaagctgacgatgacacccggcgcttcatcagagcttacggcgtctgtcattccgtggaatgcaaatgcgaagcttgtgtggacaagcagcgacagcagtgttgtagaagtaaacgatggaaaactgactgcaaaagagatcgatgtgaaaaagacagttactgtcacagcggcaagcgctgaagacaacagtgttttagcagaagctaagattacagtcgatccggctctggcatttatgaacgcatatgtaggcgatgaaaaacttttagagacagagcttgattatgataagctgaaagcaggaaacggaagcgtttataacggaacagcctggctgaatgatgaactgaattctaaaattgtcgtgacgacagaaaaagacgttcacaatgttcaggttacagcaagcgatttcaagaatgaaaagggacaggttttatcaaaagacaatattgatattaaatggctcaaagaaattgcggcaaaagaaggacgtaacgcacagggacagacaaaaaattatccggatgtgatctacaaaggcgggaagaaagatatcgatgcacaagacgtacagtttgcatgggtaaatatcgcgattccgaaagatacagcggcaggaaattatacaggtacgattacggtttcggcggacgaattagacaaaccgttcgagcttgcgtacaacatcgaagtgctgaaccttgtacagccggcgccggaggcaacagaactgcaagtttggcagcatccgttttcagttgcgaattattatttaggtttaggtgaaaatccgtcgggcggcatcacaaacgaggtgcgggaagatttctattttacagaaaaacattttaatttgatgagagactcgatcaaagagtatgtttcgatcggaggtcatgacgtagttgccaatgtcgtagaagaggcatggaatcatcagtcatattataacgatctttcgatggtaaaatggacgaagaaagcggacggaacatgggaatttgattatgattggtatgatgcatggatcaatttcatgatcgagtgcaaagttttagatcctgcaaacggaatcggacagatcaagtgttacagtatcgttccgtggaacaatcagatcgcttactacgatgaagcgcagggtaaagtagtgaaagaatcacacaatccgggaactgcaaagtggaaagagatgtgggaaccgttcttaaaagattttatggagcattccaaaaaaatgggatggtttgatatcacttatatttcaatggacgaaagagggctcgaccagcttgaacctgcggttgagatgatcgaatcagtgaaagacgaagagggaaaccactttaagatctcttcggcgctgaactatgcagctccggaatattatgagtttacagaccgtatcgatgatatttcgatcaatctcggaaacacaggaaacgtacagcagatgaacgatctgtcagatcaccgcagagacttaggtctgacgacaacgatgtacacatgtacgggagattatccgagtaactttatgatcagtgatccgggagacaactattgggatatctggtacacgatgacattaggaacagacggttatatgcgttgggcatgggataactatgtatacgatatgcacggcgatgcaacttaccgttactgggagccgggcgacggatggttcatttatccgatggaaagagaagcggtaggagaggactttaacgcttccttctacagcacaccgcgttatgaattgttcaaacaaggtatccgtgatgtggcaaaagcaaaatatctgttgaacagtgaaagcgcgacagcagaagaaaaaacagaattgacagatgttgtagagcatctggcaaaaccgcagaaaggaacatatcaaggttctgcggtggcggcatccgaaaaagaccgtatgctcgttcattctgaaacagagcgcgctttagatgcgacaaacgcgctggcaagaaacgttgcggagagggagaacccgaatccgaacccgaatccgaagccggaaagcgcagataaaacggcgcttaatgcggcgattaaagatgcagaagctttgaaaaaagaagattacacagcagaaagctggaaagcgtttgaggcggcgttgaatgcggcaaaagaaacagcggctgataaagatgcagctcagacagaagtagacaacgcattaaacgtattgaatgcggcagttgctaaacttgagaaggtgaaaaatccgaatcagcagcagccggttcaaccacagccggagcagacaaatccggataagacgactcctcagacaggagatcggacaagcgcagcgcttttgcttggatgcgcagttctttcaggagcaggtgtgttctttgcatatcgcagacgcagaacaataaaataa

SEQ ID NO: 580 - DNA, 2481 bp, Ruminococcus torques 1
atgcgtaatgtatgcaaaacggacgatattcgatctgatactgccgagaattgcggcgggggaacggctgaaagcagaagattttaccgcgctcggagaaggcggtttgtgtttgaactgtccggtgtgtactttcccgaactgcagtttcggaaaataggaagaaaaataaatcataaaaggaatgagaggaaaattttcggaggtagtaaaatgagaaccggtatacaggaagaattagaattgtatatgagtaaatctgtggcgcaggcatcaaacagagagatttatgaagcgttgcttttgtttgtgcagaaactggcggcaggaaaagaaagagctgcagggaaaaagaagctttattacatttcggcagagtttttgatcggaaaactgttgtcaaacaatatgatcaatctcggtatttatgatgaagtaaaagaaatgctctttcaaaacggaaaagatatatgtcagatcgaggaggttgagccggagccatctcttggaaacggagggcttgggagactggcggcatgttttcttgattcgatcgcaacactcggactgcccggagacgggatcggactgaattatcacctcggcctgttcaaacaggagtttaaagaccatcttcaaaaagagcttccgaatccgtggattgagaaacagtcatggctgacaaaaacggatgttgtctatccggtttctttcagaggattgaaagttaatgcaagaatgtacgatatcgcagtgacgggatatcatgatcagacaaacaaactgcacctttttgacatcgattctgttgatgagggaatcgtggaagacggaattcattttgataaagaagatatcgcaaaaaatctgacgttgtttttatatcctgatgacagcgatgaaaaaggaaggcttctgcgcatttatcagcagtatttcatggtaagcagcgccgcacagatgatcttggatgaatgtgtgcaaaaaggaagtacattgtatgatctgccggattatgctgtcatccagatcaacgacactcatcctacaatggtcattcccgaactgatccggcttcttgtggaaagagggcttgatatcgatgaagcgatcgatgtcgtatcccgtacatgcgcgtatacgaatcatacgattttggtagaagcgcttgaaaaatggccgatcggatatttaaaaaaggttgtgccgcagctcgttccgatcattgagatacttgatgataaagttcgcagaagattcagcgatgaatcaacagccatcatagacagaaacgatactgttcatatggcgcatatcgacattcattacggattcagcgttaacggagtggcggcgcttcatacggatatcttaaaacaatcggaactgaatcatttttataaaatctatcctgataaattcaataataaaacaaacgggattacgttccgcagatggcttcttcactgcaacccgcgtcttacggcgctgcttgatgaaacaatcaaagacgagtataaagaagatgcctctaaacttgtcaaactgcttgaatacaaagacgacgagactgttttgaaacgccttttagaaattaaaaaagaaaataaaaaagatcttgccgcgtatctgaaagagacacaggcaatagagatagacgcagatacgattttcgatattcaggtaaaaagacttcacgagtataaacggcagcagttaaatgcactgtatattattgataaatatttggagatcaaggaggggattcttccgaaaactccgatcacagcgatcttcggggcgaaagcggctccggcatatgtgatcgcaaaggatatcattcatcttatactttgcctgcaggagatcattaataatgatccggaagtaagtccttatctgaaagttgtcatggtagagaattataatgtgacaaaggctgaaaaactgattcctgcatgtgatatatccgagcagatctctcttgcgtcaaaagaggcaagcggcacggggaatatgaagtttatgttaaacggtgcagtcactctcggtacagaggacggggcaaacgtagagatacatgaacttgtaggagacgataatattttcgtgttcggagcgtcaagcgacgaagtaatcgaacattataaaaaagcggattattcggcaaaagattattataaaaagaatccgaagatcaaagcggcggttgatttcattacaggaaaacagatgatgaagatcggatgcaaagaaagtctggagcgtctgcaaaaagagctgataggaaaagactggtttatgacatttcttgattttgatgcgtacaaaaaggcgaaagacaaggcgctggcggcgtatacagatcaaaaggaatgggcgaaaaagatgcttgtcaatattgccgaagcaggctacttctcatcagacagaacgattgaacagtataatagagatatttggaaattaaccagatcataa

SEQ ID NO: 581 - DNA, 3816 bp, Ruminococcus torques 1
atgaagaagaaatgggtgagcggaatgctcgcgctcttgcttgtcggaacgactgtcggatcgatgatgccgacagaggcggtgcaggcagaagaaaacagtcagggaaagacgtattatgtcgattctgaaaacggaaaagatacaaacgacggactttctgaaggaaaagcatttcagacactgaacaaagtaaatgatcttacgctcggagcgggagaccgagttcttttgaaaaacggatcggtgtttgaggatcaggcgcttcatattaaaggaagcggaagtgaaaacgctcctattaaaatttctacatatggggatgagaaagacggacgtcctcagatcaatacaaacggtcatggacaatgggaattaaattacgggcacaaacttgacaatcagaaccataagtggcacggaacagtatcttcgtctattttgctgaaagatgtagaatatatcgaaatcgaaggactggagattacaaatgaccgggattccgcaacagatgcagagaaagataaaaattataaatacaatgacgcggaatgcatggacaggacaggcgttgccggagttgcaaaaaacaaaggaacggttgaccatatcgtattgaacgatctgtatatccatgatgtgacaggcaatgtttacaataaacatatgacaaacggcggtatttattttattgttgaaaagccggagaacgagagcgcgacgggaattgccagatataatgatgtgacgatacaaaactgctatcttgatacggtaaaccgttggggaattgcggtcggatatacatatgaatgggcaaaattcaacggcggcgctttaagtgatgagacgatgaaaacatacgcgtcctcagacgttgtgatccagaacaattatttgaataatgtcggcggagacgcgatcacgacaatgtatatcgacagaccggtcatccagtataatgtatcggaaaatgcggcggctcagattaatacgacagattatacagatccgcagccacagcttgacgcaaacggaaatccaaacggaaagacgcatacaggaggaagagtcgcggcaggtatctggccgtggaaatgtaaaaatgcggtgttccaatataatgaatgttttaagacgttaaatgcctcaaaaggaaacggagacggacagccgtgggatgcagattatggagacggtacaaattatcaatataattacagccacggaaatacggcaagtacgattatgttctgcgaaggcgaatcgatcaataatacgttccgttataacatcagcgtacatgaagatatgggaccgcttgatccggcaggaaacgcaggaaatacacaggtgtacaataacacatttgtgatcaaagaaggaatccggtcgatctggtacagagattccggcccggttacgatggaaaacaatattttctattttgacggagagcagccggcgcagattacaaactggaatccgcgtaataataaagtttattccaacaatctgttttataatgtaagttcttatccggatgataaggctgctgtgaaagtggaaaaaggaactccggttcttgcagacgcagcgtcaggtccggtaaaagctgcagaagacaaacaggcaagacggcatgaagatccgacggaaataaccgtttttgatggatttaaactggcggaaaattcgccggcgatcaataaaggaaaagtagtgattgaccgtaacggttattcaatcgatcacgatttcttcggacatgcagttacggcgacgccggaaatcggagctgcggaaagcgatgtgatcggagatctcgttcttcgttccgtagtttatcaaatcgatcaggaatcaaagacgatcagcgatataccgaaaaatacaacagtagaacagttttgcaaagattcgattgtagatacgggagtgacgatcactgttaagtcaaaagacggcaagccgttggaaaatgcagatatcattaaaggcggcatgacagtaaccgtttcctgtgaaggaaaagaggctgttgtatatacggtagttgcaagttcggataataaactgaagtctgcatattatgaagtgaaagacaaaacgatctatgtgccgtttacagagaagaatccgacaacggcaggcgagctgaaaggaaatgttcaagcggctgaaacagcggaagtatctgtagtaagcggtgaaaaaacgttgaaagatcaggaaaatatcgcagatgccatgacaatgaggatcacggcggaagacggtaagacgaacgattacacgatcaagcagaaaaatacatataactgggcgttggattatgcaggaccgcagcagggaaatgtatggtttggtcagaagaaagcggcatcaggagagtggacggagataaaagagtatgacagtcagtatccgaactggatggtaaatacatactacggtccgggaatcgacgagcaaagccattccgcaaaaccgacagaagcaacgcacggtcttctttccgctccaccgagcacaggaatttctactgctatggcgtatagagtgccgaaagacggaatagtatcattccatgtaaaagatgacgagccgtatttgagacaaaacggaaacagcggcggaacagtaacattaaaactgttagtaaatgatgaagaaaagcaaagtgttattcttgaacagagtaaagttcaggcaaaagactggaaagcgtttgataagattgaagtgaaacgcggagattatatccgtgttgcggcaatttcaaacggaaatcctacaaagccgtctgttcatgtgacaccgatcattacttatcttaacgaaggcggaacacctgcacctgaaccgactccggaattgaaagctccggttgacgtgaaagtttcggaagttaccgagacaagcgcaaaagtatcatggaagaatgcggcggacggaaaagaagcgacaggatacaacgtatatgttgacggaacaaaagtgaatgaagaacttattgcagagacaacatataacgtaagcagcttgaaagacggaacgacttactctgtagaagtgacagcgatagatgcagacggagaagagtcggcaaaatcagaaaaagttgaatttacaacagtaaagaaagttgttgtcgataaagaagcgctgaaggcgaatattgaaagagcatccgctcttctggaagagacagacaagtatacggaagagtctttaaaagcgcttgaagaagctttggcagccgcacagaaagtaaacagcgatccgaaagcagatcagacaaaagtaaatgatgcgaacacagcgcttgaaaaagcgatcaaagacttgaaagagcaggagaaaccggatcccgaaccgactccggaattgaaagctccggtcgacgtaaaagtttcggaaattaccgagacaagcgcaaaagcatcatggaagaacgcggcggacggaaaagaagcggcaggatacaacgtatatgttgacggtgtaaaattgaacaaagaacttcttacagaagcatcttgcggattgacaaatctgaaagcagagactacatattttgtagaagtgacggcggtagacgcagccggaaatgaatctgttaaatcagaaaaagtgacgtttaagacattgaaagctgaagaacagaaggaagattcgacaccggaaaataatgaaaaaccgggtgcggtacagacgggagatcatgcaaacgtatttgtatggatgatcggacttcttatatcagcgtcggcggctgtggctgtaatgttcaaaaggaataaaaatcgttaa

SEQ ID NO: 582 - DNA, 3474 bp, Ruminococcus torques 1
atgagttttgcacatttgcatgtccatacagaatacagtcttctggatggttctaacaagataaaagaatatgttgcaagagtgaaagagcttgggatgaacagtgcggcgatcaccgatcacggagtaatgtacggagtgattgatttttacagagaggcgaaaagtcagggaattaatccgatcttggggtgtgaagtttatgtcgcgccgaattcccgttttgacagagaagtgaccggaggagaagacaggtattatcaccttgtacttcttgcggaaaataacgaaggttatgctaatcttatgaaaatcgtatcaaaaggctttgtcgagggatactattacaaaccccgtgtagataaagaacttctcagaaaatatcacagcggcattatcgcgctgagcgcctgcctggcaggcgaggtgtcgagatatctgatgaaaggcttatatgacgaagcgaagaaagctgcgttggagtacagagatatctttggaaaagatcatttttatttagaactgcaggatcacggtctgcctgatcagggtcttgtaaatcaacagcttttgaaaatgtcccgggaaacggggatcgaacttgtggcgacgaatgatgtgcattatacttatgcgaaagacgaaaaagcgcatgatatccttttgtgtatccagacagggaaaaggctggcggatgagaacaggatgagatatgaaggcggacagtattacatcaagtctgaagaagagatgaaaagtctttttccgtatgcgcttcaggcgcttgaaaatacgcagaagattgcggaccgctgtttagtggagattgagttcggggtaacaaagcttcccaaatatgacgtcccggacggatatacatcgtgggaatacttacggaaactgtgttacgaaggacttgagaaacgctatgcagaacgggcggatgaacttcgggaacggcttgattatgaattgggcacgatcaaaaatatggggtatgtagactatttcctgatcgtgtgggattttataaaatatgcgaaagatcatgggatcgcagtcggaccgggccgggggtctgcagcgggaagtattgtttcctactgcctgggaattacgacgatcgatccgatcagatatcagcttttgttcgagcgttttttgaatcccgaacgtgtttccatgcccgatatcgacgttgacttttgttatgaacgcagacaggaagtgatcgactatgttgtgagaaaatacggaaaagacagagttgttcagatcgtgacattcggaacgctggcggcaagaggtgtgattcgagatgtggggcgtgtgatggatatgccgtatgcttttgtcgattcgattgcgaagatgataccgcaggagccgaagatgacgattgaaaaagcgttgaaggtaaatcctgaactgcgcaagatgtgtgaagatgatgaggaagtaaaatatcttatcgagatggcgaaaagactggaaggacttccgagacatagttctatgcatgcggccggagtcgtgatcagtcagaagtctgttgacgaatatgtgccgttgtcgagagcggcggacggctcggtgacgacccagtttacgatgacgacactggaacagctcggacttttgaaaatggattttctgggacttcgtacgttgacggttatacaaaatgcagttcttatggcgagaaaaaaagatccttcggtaaatatggacacgctggattatgatgataaaaaagtgcttgaatatatcgggaccggaaaaacagacggcatcttccagttggaaagcgcgggaatgaaaagctttatgaaagagctgaaaccgaacagtctggaagatatgatcgccggaatctctttatatcgccccggtccgatggattttattccgcagtacatcaaagggaaaaacgacgcctcttcaatttcatatgactgcccgcagttagagccgatcctgaattcgacatacggctgtatcgtttatcaggaacaggttatgcagatcgttcgcgaccttgcgggatattccctcggaagaagcgatcttttgaggcgcgccatgtcaaagaaaaaaggcgaagagatgaaacgggaacggcagattttcctgtacggtgacgaggcttccggtattccgggatgtgtaaaaaacggaattgacgagcaggttgcgaataagatttatgatgagatgcttgactttgcaaactatgcgtttaataagtcgcatgcggccgcatatgcggctgtggcatatcagactgcgtggctgaaatattattatcctgttgaatatatggcggctcttatgacatcggtgatagacaatccgtcgaaagtagctgaatatatttatgcaagccggcagatgggcattcagatccttcctcctgacattaataacggagaagcggatttttcggttgacgaagggaatataagatacgggctgtctgcgatcaaaagtgtcgggagaccggttgttagggcgatgctcgaagaacgcaggacatttggtccatataaaaatcttgaagattttattacccgtgtttcatcgaaagaaggactgaacaagagaactattgaaaatctgatcaaagcaggggcgttggatactttaggcggaacccgaaaacaattcatgagtatttatattcagatcatggatcatgtgaatcaggagaaaaaatattccatgtccggtcaaatgagtttgtttgatcttgtgggagaagaagaaaaggcggattttcagatcagaatgcctgatgtaggcgagtattcaaaagaaaataagcttgcgtttgaaaaagaggtgctcggcgtttatataagcggtcatccgcttgaggagcacgaggagagatggcggcggatgatttcggctacaacggcagattttcagtttgacgaggagctgaatagaacgaaggtgcatgacggagaaaagtcggttgtcggagggatgatcgttgacaagacggtcaagtacacaaagacgaatcaggtgatggcgttccttacgctggaagatttgctcggcactgtggaagttgttatttttccgagagattacgagaaaaatcgtcaatggcttgaaataaacgagaaagtgtttatcagcggaagggtttcggaagaagacgagaaggcaagtaagctgatctgtgagaaagtgatcccctttgagaggacaaaacgagaattgtggattcaatttccggataaagagacgtttcttgatgaagaacagatcgtttacggatacctggcagattcggaaggcgaagacgaggttattatatattgcgcaaaagaacgggcagtgaaacgactgccgaaaaaccggaatattcagatcaatgagcaggttttaagcaggttaatgaaccattttggtgaaagtcgggtaaaagtggttgaaaaagctattgaaaaccacttctaa

SEQ ID NO: 583 - DNA, 2469 bp, Ruminococcus torques 1
atgcgtaatataacgatgaatgaaggagagaaacatatgggtacaaagataatgtataatcacaaagcgattgaaaaaaagtggcgtgaaaaatgggcggaaaattcggtaaatccaagagtggatgataacggaaataaaaaacagaagtattactgtcttgacatgtttccgtatccgtcaggaaacggtcttcatgtcggacattggagagggtatgtaatttctgacgtatggagccgttataaacttcagcagggatattatattgtacatccgatgggatgggatgcattcggtctgcctgctgaaaactatgcgatcaagatgggagtacatccggcgaaatcaacggcggaaaatgtggcgaatattaaacgtcagatcaatgagatcgcagcgctttatgattgggacatggaagtcaacacgacagatccgaacttttataaatggacgcagtggattttcgtgaagatgtttaaagaaggacttgcatatgaaaaagaatttccgatcaactggtgtccgtcctgtaagaccggtttggcaaatgaagaagttgtaaatggcaaatgcgagcgctgcggagcggaagtcacgaagaaaaatcttcgtcagtggatgttgaagatcacagcatatgcagatcggctgttaaatgatctcgataagctggactggccggaaaaagtaaagaagatgcaggctgactggatcggaaaatcctacggagcagaagtggagttccctgttgacggaagagatgagaagatcactgtttatacgacaagacctgatacgctttacggcgcgacatttatggtgcttgctcctgaacatgagatggcggcatctcttgcgacagatgagacaagagaagcagtggaaaaatatatttacgatgcgtcaatgaaatcaaacgtagatcgtcttcaggacaaagagaagacaggcgtatttacgggaagctatgcaatcaatccgcttagcggagcgaagacaccgatctggctgtctgattatgtattggctgattacggtacaggagcgattatgtgtgttcctgctcatgatgatcgtgactttgagtttgcaaaaaaattcaatattcctattattcaggtaattgcaaaagacggaaaagaaatcgaaaatatgacagaagcttatacagaagcttcgggaacaatgatcaactcgggcgagtggaatggaatggaatcgtcagtgcttaaaaaagaagctccgcacattatagaagagcgcggattcggaaaagcaacagtcaactttaaactgcgtgactgggtattttcacgtcagcgttactggggagaaccgattccgatcattcactgtcctgactgcggtaatgttccggtaccggaagaggaacttccgcttacgcttccggacgtagattcctatgagccgacaggaacaggagaatcaccgcttgcaggaattgaagaatgggtaaattgtacatgtccggtatgtggaaaacctgcaaagcgtgagacaaatacgatgcctcaatgggcaggatcttcatggtatttcttgcgttatgtagacagtaaaaacgataaagaattagtgtccagagaaaaagcagacgagatgctgccggtagatatgtatatcggaggcgtagaacatgccgtgcttcaccttctgtattctcggttttatacaaaatttttgtatgatatcggagtagtagattttgacgaaccgttccacaaattgttcaatcagggaatgatcaccggaaagaacggaattaagatgagtaaatcaaaaggaaatgtcgtttcgccggatgctcttgtgaatgattatggatgcgactcgttaagaatgtacgagctttttgtaggaccgccggagttggatgcggaatgggacgacagaggaatcgacggagtaaaccgtttcctgaaacgtctttggaatctgcttatggacagtaaagaagcagacgttcagccgacaaaagagatgataaaacttcgccataaaatggtttatgatattacaaatcgtctggaaagtttcagtttgaatactgtaatttcgggatttatggagtataacaacaagtttattgaaatggcgaaaaaggaaggcggaattgataaagaaacattagaaacaatcgcggttcttctttctccgtttgcaccgcattttgccgaagaaatgtgggagcagcttggccatggagaaacaatttttaaagcaggatggccgtcatatgacgaaagtgcaatgaaagatgacgagattgaagtgccggtacagattaacggaaagacaagagctgttatcagtatttctgccgatgcatcaaaagatgaggcaatcgccgccggaaaagaagcggtagccgataaactgacaggtacgatcgtcaaagaaatttatgtaccgaaaaaaataatcaatatcgttcagaaataa

SEQ ID NO: 584 - DNA, 1947 bp, Ruminococcus torques 1
atggcttaccggaaactgattccttatctattatttcggatattatggaaaggaagaagaaaaatgtgtggttttgcaggttttgtcggtaaagtagaagatcgggaaactgttcttgtaaatatgatggatacaatcatacacagaggaccggacagtgcagggaaatatgttgatgaggatgcggctcttggatttcggcgtttgagcattatcgacctgtcttcagtcggagatcagcccctttataatgaagataaaagcatggtgcttgttttcaatggggaaatctataactatcaggaactgcgaaaagaattgatcgaggctggacatgtatttgtctctaatacagattcggaaactctgatacacggatatgagcagtggggagagaaacttgtcgatcgtctccggggaatgtacgcgtttgtgatttgggatacaaagaaaaaaagacttttcggtgcaagggatatttttggaatcaagcctttttactatgcgcagatgaatcagacctttttgtttgcgtctgagatcaaagcatttatggaacatccgaaatttgataagatttttaatgaagatgctttgggaaattatctttcctttcagttcgtaccgactaacgaaacctttttcaaaggagtattttgtcttcagcccggtcattactttatttatgaagatgggaaaatggaaatatcgcggtattttgaaccgaattttacaggaaaatatgaaaaaacattcgatgaagctgcggctgaagtggaaaaagtcatgaaggagtcggtagagaagcataagattagcgatgtggaggttgcgtcttatttatcaagcggagtggattccagttacctgacttatctgggacaagtcgatcatacgtttacagtcggatttgacgagggagaatacagtgagattcaggatgcaaaagattttgccgaaagtattcatatgaagaatgatgcgaaggtgatcacgccggatgaatactgggacagtctttcggatattcaatattatatggatgagcctgtggcggatcctgcggcggttgcactgtattttttgagtaaagaagcggcaaagaaagtaaaagttgtgctttcgggtgaaggatcggatgaattgttcggaggatataatatttactgtgaacctcttgaacatactgcttttaataaaatcccgatgccgatccggcgctttatgggaaaatttgcagaatactgtctgccgagggggatgaaaggccgtggatttcttatgcgtcatggaaagacgctggaagaacggtattttgccaatgctacgaatatatttacagagcgtgaggctgctaaaattttgaaaaagggatgcagaccggaaattcaggatgtgacaaaacctttgtataaccgggtgaaagataaggatgcggtgacaaaaatgcagtatgtggacttgcatctttggcttgttcacgatatccttatgaaaggggataagatgggcatggcgaattctttggaagtcagagtgccgtttcttgaccggaatgttctggaacttgcggaaagccttcctcttcaatataaagtgcaggcaccgcgcacgaaagttgctctccgggcagcggcggaacgcagtatcagaaacaagacggcagagaaaaagaaacttggttttccgatcccgattcgggtttggctgaaagaggaaaaatattataatcgtgtgagagcgatgtttgcatcttctatggcgaaaaaattctttaataccgatctgcttatgaagatgctggaagatcacagagacggaaagaatacgaatgaaaaagcagatgacagccgcaaaatctggacggtatatattttccttgtatggtatgaccgcttttttgaacatgggaaaccggtgcatccttccatgacagcaggtaaataa

SEQ ID NO: 585 - DNA, 2445 bp, Ruminococcus torques 1
atgcatatttcatatacaaaacaggcggcaaatgcagtcagatatgctgcgaagaaagcaaaggagatgaagcatccttacataggtacggaacatctgcttctcggactgcgggaggagttttcgggggttgcgggacaggtgcttgcgcaaaacggcgttgagacagaaaagatcatgcagcttatggatgaactgatcgctccccgggaggagatgcccgcatcgcagaaaccgaaagaaagtccaaggcttcgctatatcctcgcgaacagtgagaaggaagcgcatcgtctccgtacagccgaggtcggaacggagcacttgcttttgtcgatgatacgggatgtggactgcgtcgccgcaagaattttgatcacgctgaatatcagccttcaaaaacttttaaaagatattttaaatgcatcgggagtcgatccgaaagattatcaggatgaacttcaggacgagtcgagaggaagcggctctgtgatcgagcagtattgtacagatatgacggctcgggcagaggagggaaaacaagatcccgttgtaggcagggaagaggagatgtatcgccttatgcaggtgttaagccgcaggacgaaaaacaatccctgtctgatcggagagccgggagtaggaaaaacggcggttgtggaaggtctggcgcagcgtatcgcggcaggcgttgttccggaaaaaatgaaagataagcggatttatacgcttgatcttccgggaatgatcgcagggtctaaataccggggtgaatttgaagaacgtatgaaaggtctgatctcggaagtagagtccaacggaaatattattttgtttcttgacgagatccacacaatgatcggagcgggaggagcagaaggggcgatcgatgcatccggcatcttaaaaccgtctcttgcaagaggggaacttcagttgatcggagcgacgacgatcacggaataccggaaatatatcgagaaagatgcggctctggagcggcgttttcagccggtatcggtagaagaaccttcgaaagaacagtgtcttgagatattgaaagggttgaaaggaagatacgaatcgcatcataaggtgctgattagagacgaggcgctggaagcggcagtttcgatgtccgagcggtacattacggatcgtaaccttcccgataaagcaatagatgtgcttgacgagtcatgttcaaaagtcagtctgaaaggatataaagtaccggaaaacctgacggctttggatcttcgcctgaaagaactggaaaagcaaaaagaagagagtattaaaaacggttgttttgaagaggcttcgcttttacagaaagagcaggaggaggcagagaaaaaatcggagcagctaaaaaaacgttttcagaaaaaaacatcttcttctcagccggaagtgacagaagaagatatagcggaagttgtttccgcatggacaaagatcccggttcaaaaacttgcggaaagcgatacggatcgtcttaagaaactggaaagtgtcctccaccagagggtcatcggtcaggaggaagctgtgaaagcagttgcccgtgcggtaaagagggggcgtgtaggattgaaagacccgaaacgcccgatcggttcgtttctgtttttaggacctacaggcgtcggaaaaacagagttgtcgaaagcgcttgccgaagcgatgttcggcaatgaagaatcgatgatccgtgttgatatgtccgaatatatggagaaacattccgtctctaaaatgatcggatctccgccgggatatgtcggacatgaagaaggcggtcagctcagcgatcaggtgcgtacacatccttattcggtacttttgtttgatgagatcgaaaaggcgcatcccgatgtgtttaatattcttttgcaagtattggacgacggacatattacggactccaaagggcggaagatagatttttccaataccgttatcattatgacatcaaacgcgggagcaaaagcgatcatagaacctaagaagcttggatttgcggcaaaagatgatcctgcaggcgattataagcgtatgaaacaaaacgtgatggatgaagtaaaacagatctttagaccggagtttttaaaccgtattgatgagatcatcgtattccatgctctcgagaaaacgcatatgaaaaagattgttacgcttatgtgccgggattttacaaaaaggatcgaagatcagatggatatccgcctgactttacgggagtcggcaaaagcgcttattgcggaaaaaggaacggatgcaaaatatggcgcaagacctcttcgccgcgctctgcagacagaattggaagacaaacttgcggaagcgatcctgaacggagaagtgaagcggggagactgcattgaggcgggaactgtgaaaaaagagattcgcttcattcggaaagaagatcgtttatag

SEQ ID NO: 586 - DNA, 2394 bp, Ruminococcus torques 1
atgaaaaagagcagaggtatattaagccttattctcgtggcagcactttcagtcctgctcggtgtgactacgatccgcggattggattccgaaggaatgggcgcagcgaaaaatattaatttgggactggatcttgagggtggagtcagcattacatatcaggtaaaaggcgacaaaccgtcacaggaagacatggatgacactgtatataaaatgcagcgtcgtgtagagcagtacagtacagaggcacaggcatatcaggaaggtgacaaccggatcagcatcgagatcccgggcgtagaagacgcgaatgcaatccttgaagaattaggacagccgggatcactgtatttcattaagcacaaagatgctgatggaaatgagaactacacacttggagcagaaggttatgtattgaataaaacgatcgatgaactgaaagcgaacggttctatcgttttaacaggatcggaagtgaaatccgctacggcaggcgcatgggacgatcagaagacaggtaagaaaatgtatggggtagatcttacgctgaatgcagaaggaacagatgcgtttgcggcagctacaacagaagcatacaacaacggaaacgatacgatcgcaatctattatgacggagaattgatcagtgttccgagtgtaaatgcaatcattgaaaacggacaggcacagatcacaggctctgcatcatacgaagaagcggataatatcgcatctacgatccgtatcggaggtctgaatctggaactggaagagatcagttcaaaagtagtcggcgcacagctcggtgaagaagcgatcagtacaagtcttaaggcaggagcgatcggtcttgcagccgtatgtctgtttatgatctttgtgtacctgcttccgggatttgcatcaagtatcgcgcttgtcatttatgtcggcttgatcttacttctgttaaatgcgtttgacatcacgcttacacttcctggtatcgcaggtattatcctcggtatcggtatggcagtagacgcgaacgttatcatttttgctcgtgtgaaagaagaattgtcagcaggagcgtctgttcattcagcgcttcgggcaggatttcataaagcgatgtcggcaatccttgacggaaatattacaacattgatcgcggctgcagtattgtggcttagaggaagcggtccggtaaaaggatttgcacagacattggctcttggtatcgtcgtttcgatgtttacggcgcttgttgtaacaagactgctcgtatattctttctatgctatcggcatccgcaatccgaaagtatacggcagagtaaaagaagagagaaaaccgatcgattttctcggaaagaaaaaagtgttctttgtcgtttctatcgcactttgcctgagcggatttgttgttatgggaatcaattccgcaagggacgtgggagcgctgaattacagccttgattttgtcggcggtacggcgacaacggtaacgtttgacaaagagtatacattagaagaagttgacagtcagatggtgcctgaacttgaaaagatcacaggcgataaaaacgtacaggtacagactgtaaagggaacaaatcaggtagtgtttaaaacacagactcttgaccttgaaaagagagaagcttttgaatcttatatgcagaacgagtttggcgtaaaagaagagattgccacagaaaatatcagttctacggtaagttccgaaatgagaatggatgcggtgatcgcagttattatcgcgacgatcttcatgcttttgtatatctggttcagatttaaagatattcgttttgctacgagcgcggtagtggcgcttctgcacgacgtgcttgtcgtacttgcattttatgcgatcgcccgtgtttccgtgggaaatacatttatcgcatgtatgctgacaatcgtcggatactctattaatgcgacaatcgttattttcgaccgtatccgtgaggagatgaagaacagttccagaaacacagatctgaaagatcttgtaaatcgctgtatcacacagacgctgacaagaagtatttatacatcgctgacaacatttgtcatggtggcggttctgtatgtgatgggtgtaagttcgatcaaagaattcgcacttccgcttatggcgggaatcgtttgcggagcttattcatctgtatgtatcacaggcgcgctctggtatgttatgaagaccgggaagaatgcaaaagttcaggctgcttccgtaccggcgaaacaggttgaaagtgtaaagacagagtcgtcagaagaaagctcatcggacggaaatgttcaaaaagcagcaaaatcaaaaacaaaaaagaaaaaaagagaagataaattttcgttaaaagattgtttgaaacgaaaatga

SEQ ID NO: 587 - DNA, 2562 bp, Ruminococcus torques 1
ttgaaacaatatgaagttacaggtatgagctgtgcggcatgcagtgcacgtgtagaaaaagctgtatcaaagattgaaggagttacgtcatgttctgtaaatctgctgactaattctatgggagtagagggggctgtcgatgcacagacagttattgaagctgtagaggcggcgggatataaggcggcggagaaagaaagcaggacaggacaggaagcaggcaggatggaaaagagcggagaattaaaagataaggaaacgcctgagatgaaaaagcgattgatcgcctctctttgttttttgattccgttaatgtatctgtcaatggggcatatgatgtggggatggaaagttccggaaattgtgagcgagaatcacgtggcaatggggatcatacagcttctgctgacaacagccgtaatggtgatcaatcagaagttttttatcagtggagtcagaggactttttcataaagcgccgaatatggataccctggttgctcttggcgcaggcgcgtcttacggctacagtatttatgctctgtttgcgatgacagatgcgcagatgcgtgggaatgcggcagaagtaatgacatatatgcatgagttttattttgaatctgcggcgatgatcctgacattgatcacagtcggtaaacttctggaagcaaggtcaaaaggaaagacgacagatgcgctgaaaggtctgatgggtcttgcgcctaagacggcgactgttgtgcgcggcggcgaggaagtaaaaatcgggatcgaacaagtgcaaaagggagatctgtttgtcgttcgtccgggggaaagcattccgactgacggtattgtagtcgaaggaagcggagcggttgacgaatcagcgcttaccggcgaaagtattccggttgataaaaaagagggagattgtgtatcgggcgcgacgataaaccagtccggttttttgagatgtaaggcgaccagagtgggagaagacacaactttgtctcagattatccatatggtgggagatgcggctgcgacaaaagctccgatcgcaaaagtggcagataaagtgtcgggagtgtttgttccggttgttatggcagttgctgttttgacgattattgtatggcttgcattcggagaaacgatcggttttgctcttgcacggggaatctcggttcttgtgatcagttgtccttgtgctctcggtcttgcgacgccggttgcgattatggtcggaaacggtgtgggagcaaagaacggaattttatttaaaacagcagtttctcttgaagaaacggggaaaattgatgttgtagtgctggacaaaacaggaacgatcacaaaaggaagaccgacggtgacagatattttgcccggttcggcttttagtgagtcggaacttctgacgtatgcatacattcttgaaaagaaaagtgaacatccgttagcgcatgcaattttgaaaaaggcagaggaagaagcaatccagacgaaagaagaagcgaaaaactttacggcagtttccggaaatggtttgacgggagagataggcggcgataaatttttcggcggaaacttgaaatttgcagaaggaagaactgttatttcggaagcggtaagaaagcaggcggaaagttttgcatcagaaggaaaaacaccgttatttttcggaaggaatgaggaactgatcggcataatcgccgttgcagacattataaaagaagacagtccgcaggcagtcagagaattgaaaaatatggggatcaaggtggtcatgctcacaggcgataatgagcgtacggcaaaagcgatcggagagcaggcgggtgtagatgaagtgattgccggtgttttacctgatggaaaagaggatgtgatcaaaaaattaaaagaagaaggaaaagtggcgatggttggggacgggattaatgatgcgccggctcttacgcgggcggatgtcggaatcgccatcggagcaggaacggatatcgctattgatgcggcggatattgtgcttatgaaaagcaggttgagcgacgtgcctgccgctgtgcgcatgagtcgggcagcgcttcgcaatattcatgaaaatcttttctgggcatttttttataatgtgatcggcattccgctcgcagcgggaatctggattcctatcttcgggtggaaattaaatccgatgtttggggcagcggcaatgagtctgtcaagcgtatgtgttgtaagcaacgccctgaggctgaatttgtttaaattatatgatggttctaaagatagaaaaagaagtcaaaaaaacaagaaaaattctgaagaagaaaaggagaataaaacaatgaaaaaagtaatgaaaatcgaaggaatgatgtgcggacactgcgaggcgagagtgaaaaaggttcttgaagcgctggatggagtggaacaggcggaagtcagtcatgaaaccggcacggcagttgttgaaatgacagaagaggttgctgacgaagtacttaaaaaggcagtggaagatcaggattataaagtgttggggatgtcaataacttatgaaaatgtcactttttaa

SEQ ID NO: 588 - DNA, 2157 bp, Ruminococcus torques 1
atggaaaattcaaaaggacttgtgaccatccctacagatctcgacgttgttcccgagactttggaactgatgaagcgctggggagcagatgcgatcagagactgtgacggtacagattttccggaggcgctcaaagacgcagacgcggaaatttattctacatattatacgacaagaaaagacaatgagtgggcgaaggcaaatccggaagagatacagcagatgtatcttatgacgccgttttatacggctgattccgagagtctgtcgattgagatcatgaaaggtctttatcctgacatgctcagtccgaatacacgggatgacattaagcgttggtgggaggttgtagaccgcacgacaggaaaagtcgttccgacagacgagtgggattataatgaagaggaaggaaaggttacgatcaaggcagttccgttccatgagtatactgtgagcttcctcgcctatatcatgtgggatccggtgcatatgtacaatgccgtaacaaatgactggaaagatgtagagcatcagatcacctttgatgtccgtcagccgaagacacatgagtatacattgaaacgtctgagaaaatttattgaggatcatccgtatgtaaacgtacttcgttttacaacatttttccatcagtttacacttgtatttgacgagcttgcccgtgagaaatatgtagactggtacggatattcggcgtcggtaagtccgtatatcttaaaacagtttgaagaagaagtgggatatccgttccgcgcggaatatattatcgatcagggatattacaataatcagtatcgtgttccgagcaaagaatttcaggattttcaggcgttccagagaagagaagttgccaagatcgtaaaagagatgacagagatcacgcacgaatgtggtaaaaaagcaatgatgttcctcggagatcactggatcggaacagagccgtttatggaagagtttaaaacacttggtattgacgctgttgtaggaagcgtaggaaacggttcgacgcttcgtctgatcagtgatatcgaaggagtgaaatatacagaaggacgtctgttgccgtacttcttcccggatgtgttcaacgagaacggagatccggtcaaagaagcaaaatataactgggtgacagcaagaagagcaatccttagaaaaccgatcgatcgtatcggatacggcggttatcttaaacttgcgcttcagttcccggaattccttgattatgtagagcaggtatgcaacgagttccgtacgctttatgcaaatgtaaaaggaacgacaccgtactgcgtgaagaaagtcgcagtgcttaactgctggggcaagatgagagcatggggatgccatatggtacatcatgcactgtatcagaaacagaactattcatatgcaggaatcatcgagtcgctgtcaggagcgccgtttgacgttgtatttatcaacttccaggatattctggataatccggcgatccttgacgatatcgatgtgatcatcaatgtcggggatgcagatacggcgcatacaggaggagaatggtgggaaaacccgaagatcatcgaagcgatccgcggattcgtttacaacggcggaggaattatcggtgtcggcgaaccttccggtcatcagtatcagggacatttcttccagcttgctaacgtattcggtgtagaggaagaaacgggcttcacactcggatacgacaaatacaactgggatgagcatgaacacttcattttggaagattctgaagaagtagatttcggagaaggcaagaagaatatttatgctcttccgagtgcaacgatccttgtgcagaaagaaaaagaagtacagatggcagtaaacgaattcggaaaaggacgcgctgtttatatcagcggacttccgtacagcttcgagaacagccgtgtactttaccgtgcagtgctttggagcacacacagcgaagatgagctgaacagatggttcagtacaaattataatgtagatgtacatgcttatccgaagaacaacaaatactgtgttgtaaataatacggatgagccgcagcagacaacgatctaccgcggagacggaagcagctttgagcttgctcttgagccgaaccagatcatctggtatgagatcgcgtaa

SEQ ID NO: 589 - DNA, 1950 bp, Ruminococcus torques 1
atgatacttgcatgtcataatcttaaaaaatcattcggagaccgaatcattgtcgataccggatcttttcatatagaggaacgtgaaaaagcagctcttgtcggggtaaacggcgccggaaaatcaacaatcttcaaaatgatcatcggagaagaaccttctgacggaggagaaataatccttgcaaaaggccgctcaatcggttatcttgcccaacatcaaaacctgattccaaacggtaccatttacgaagaacttcgatctgccaaagcagacatcatcgaaatggaacaacagcttcgctcaatcgaacacgaactacaatcattatccggagaggaattaaatgcccgtctcgaaacatacaaccgccttcagtcgcaatttgaatctcaaaacggatatgcgtgtgaaagtgagattatcggtgtgttaaaaggacttggatttaccgaagaagaattttcaaaaaaaacagatactttatccggtggacagaaaacccgtgtcgccctcgggaaacttcttcttaccgatcccgacatcctgctcctcgacgagcctacaaaccatttagatttaaattcgatctcatggcttgaaacttatttaatgaactataacggcgctgtattcatcgtatctcacgatcgctttttcttgaatcgagtagttacaaaagtaattgaaattgaaaacggcgctctttctatgtatatgggaaattaccgcgcctactctgaaaaaaaacagcagatccgtgatgcgaaactaaaagaatatttcaatcagcagcgtgaaatcaaacatcaacaggcagtaatcgaaaaacttcgctctttcaatagggaaaaatccatccgccgggcagaaagccgtgaaaaattattagaaaaaatcaccattgtagataaacctcaagaggcagtccgggaaatgcatttttctctggaaccgtactgtgtcagcggaaacgatgtactgacagttgagcatctttcaaaacagtttgatacccaactcctttttcaagatgtcagttttgagatcaaacgcggggagcatgtagctgtcataggagataacggaacaggaaagacaacgcttctaaagatattaaatcaagtgatcaaagccgacaatggctctttcactctcggagccaaagtacagatcggctattacgatcaggaacatcatgttcttcatgatgataaaacgatatttgaggaaatatccgacgactaccctcatcttactaatacagagattcgaaatacattggctgcattccaatttacgggagatgaagtattccaagtaatccattcattaagcggcggcgaaaaaggaagagtatcacttgcaaaacttatgctttccgaagcaaatttcctaattcttgacgaacctacaaaccaccttgacatcgcctcgaaggagatacttgaagaagccctgaacaattacaccggaacgatcctctacgtttcccatgaccgttactttatcaacagtactgcttccagaatactggaacttgtcaatcagacttttgtaaattatatcggaaattatgactactatctcgaaaaaaaggatgaactgacgcaaacttacgcctcaagtcagatacagaggcaagtttccacttctcaaaacggcagtgaaacagttcctgccgatggagcttttttatcagattccaaattgagctggcaagaacaaaaagaacagcaggcaaaagaacgaaagagaaaaagcgaactcaaaaaaacagaagatgaaatcgcacttctcgaaaacagaaacggagaaattgattttcaaatgacattggaagaagtatattctaactccgtgaaatgtcaggaactttcaaccgagcgaactaagaacgaactccgtcttgaagaattgtacgaaaaatggggagaacttgccgaataa

SEQ ID NO: 590 - DNA, 2559 bp, Ruminococcus torques 1
atggcttccaagactacaaaaggaagaaaaaatacaagatcaaagaaaaagacgagaacgaaagcgaaaagcagcaatgcaaaaaatacagaacttgcgggggaaattacgatacttgttatattgacagtgtgcattctgcttgttttgagtaattttggtattggcggaattgcgggggaggcagtttcttctgtactatttggtttgtttggatatatggcatatgtattgccgtttcttgtttttgcggccgccgctttttttatttcaaacagaggaaatacacatgcttatataaaaatcgcggcaggagtatttttgttcttatttttgacggcaatactggaattgatatttaattcttatacgccgggaacaaaactgatttcatactatactgctgccagtgagcatcataatgccggaggtttgaccggaggctgtatgattagtatgctctgccctttgatcgggaagataggaacatatgttgtcttagttgttttatcggtgatatgcatcatattgattacagaaaaatcattgttagctccgatcggccgaaaaagtaaaagagcatatgaggatgtgcgaaggaaacgtcaggagacggcagttttaagagcaaagcaaaaggaagagtcaaaaacactgtctgagagtcggaaatcgggacaatctttgaaaaaagaagaaaacgagccggagaaaaggatcgatcataaagtgtccggtgtttcatttgcaacgactcttatgtctgaagcagaaataccgaaaaaaggcagaaggaagaataaatcgccggatgtgtgcgaattgatacctgataacgaagcatttgtcattaatcgtgaagaaccttttatggaagcagaacctattcggcaagaggggaaagaacagcagtatgaggctttgcagcagacagatacattcacgcctttagaagaaaaggcagaagaggatcttcagaatcagaaaaatacgtcaggaagaaaaaacaaaaaagaagattcccaagcagtggcaagggaaactcagaacgtggccgatgcggtgagaatagaagagcagaaggaacatcctgtttatcatacacctccgatcagtcttctgaaaaaaggaaggaaagccggtggagattcagatgcgcatcttagagctacggcgcttaagttagagcagacattacgcaatttcggagttggcgtacatgtgacgaatgcaagttgtggaccgtccgttacaagatatgaactgcagccggagcaaggggtgaaagtaagtaagattgtcggtctttcagatgacattaaattaaatcttgcagtggcggatcttcgtatcgaagctccgattccgggaaaagcggcagtgggaattgaagtgccgaacagtgagaatacagcggttatgcttcgtgatcttttggaatcaaaagaatttcaggcaagcgcttctcccatttcgtttgcggtcggaaaagatattgcgggaaaagtagtcgtttcggatattgcgaagatgccgcaccttcttgtggcaggagcaaccggatcgggaaaatcagtttgtatcaatacgttgatcatgagtattatctacaaagcggatccggaagaagtcaaactgatcttagtcgatccgaaagttgtggagttgagcgtatataacgggattccgcatctgatgatccctgttgtaacagatccgaaaaaagcggcaggtgctttgaactgggctgtagcagagatggagaagcgttataaactgtttgctgattataacgtgcgtgatctgaagggatttaatgaaaagatagaacaaggtcagacaggagaggatattcagaaaaagcttcctcagatcgtaattattattgatgagctggcagaccttatgatggttgctccgggagaggtagaaggtgctatttgtcgtcttgcacagcttgcgcgggcggcaggactgcatttgatccttgcgacacaaagaccatctgtcaatgtcattaccggtcttattaaagcaaatatgccctctcgtattgcattttcggtttcgtcaggtgttgactcaagaacaattatagatatgaatggcgcggaaaaactgctcggtaaaggggatatgcttttttatccgtcaggatatccgaaacccgttcgtgtgcaaggttcattcgtatcagataaagaagttcaaaatgtagtcgattatctgatcaatcacagtgaaagagtttcttataataatgaactggaagagcatatggtcactaatattgtgtcatcgggaaatggaatgcaggcaggtgaaaacggtgatgaccgtgatacatattttatagaggccggaaagcttattatagaaaaagaaaaagcatctatcggaatgcttcagagaatgtttaaaatcgggtttaaccgggcggcaaggattatggatcagcttgcccaagccggagttgtaggtcctgaagaaggaacaaaaccgagaaaagtattaatgacaaaggaagagtttgaaaactatttacaaaagggaaattag

SEQ ID NO: 591 - DNA, 4920 bp, Ruminococcus torques 1
tatgaaataacgaaaaaggagcgggaacattttatgaaaaagctgaaactctttaggaaaatcaaaagcatattgagcattttgctcatatcactacttatcatacctctatgcagcggtatcggaattcatgccaaggaaaaaaacacagaatcaaacgaatataaaatttatccgattcctcattctgttgtatatgataacgaacaatttgtgatgtcagatagagttcatgttgtcttcgaggaaggtatagataaagctacacagaactttttggaagaagttataacagactatgggaaaacagttgtacattctgaagagatcgtcaacggagaaactacgatcctgttgggaataaaaggttccaatggaaaagcggacagctatatcaataaaaatacaacgattaaaacgtctgatcttttcaatcgaactgattcatatatacttagcgccaaagaaaatattatctcaatcgtaggaaaagataccgacagtacatttttcggtatcgctacgttacagatgatgcttacatcttatgaagatccagcccttcgcagcgtacagatcgaggatttttctgacatacaatatcgaggatttattgaaggcttttacggagggtgggattataaatcacgggaaagccttatgagatttgcacgtgatgttaaaatgaaccattatatttatgcatcaaaaactgatccttatcatacatcaaaatggggagaactttatccgcaaagcgaaatcgatcagatacaaaaacttgtaaaagtaggtgaagagacaaaatgttactatacatggtccgtacatatttcgggatttttcaccaatttagatacatcgaatgaaaccgcctataatgaacggtatcagaaactacttgcaaaattccgtcagctttatgacgcaggcgttagaaaatttgacattttaaatgacgacttcggacaaggaactcatgaagatgtagtaaatcttttaaataagctgacaaaagaattcattattccaaacaactgcaagccgatcacttactgtatgcagggatataacaaagcatggtcaaaagaggctgaattaagtgcattaaaaaaacttgacaagtcaattatcctatattggacaggtgatgacgtaaactcgccgatcacacaggaaacaatcgattatgtttcagagaaaacaggacacaaagtttgtttctggctgaattatccggtaaacgaacatggaaaatcaggactttatcttggagatatcacacattacgcccgcgatggcataacaggacttacaggagctgtctcaaacccttcccgctttgcacagagtaataaagtcggtctgttccagcttgcatcactattctggaacaatactaattacactgcaaacgcgcaaactgtttggcaggatgcattccgttatcttgaacctgaagtacaggacgcttactttaaaattgcatctaatgttgcaaactgtcctcgttccgtacgtgtaccgcaaggctttccggaatcagaatatctgaaagaaaagcttgaaaatgttacagctaaaatcagtaatggagagaacttgaaaaatgataaagaaacggcagctttaaaatcggaatttgaatctattcttgctgcaatcgaaacatttagatcaacatgtgacaatgctgatttaaaatcagaattagatccatggctgaaatcactgcaagatatcgcttcaggcggaaaggcaattatcgaaagtatcattgctattcaagaaaaagacatagatacagcttgggaaacgtttgcaacagcaggcaaggcgctacaaacatggaatacatatccgacagcagaaggagtaaaagaaggcgcagaagcaggaagtaaacgtatccaaccgttcgtatcgaaagcagccgcaacggcaaaaaataaattaacaccgtttttcgatcctgataatacgaatgtaattccttcgttttatgcagttcttgcaggtgtaaaacgaacagatgatactgtttccgcaaaattatttgacaaagatccatcaactgccggcgaatggaatcaaaaccaaaagataggagattactatggcgtagatttaggtcgtgttatccctgtaacagatattacaattcttcagggagcatcagaaactgatcatgactatttccacaatttcgttttagaatattctgaaacaggtgaagacggttcatgggtcacaattcaggagtacaaagaaacagatgaatcacataaaatagaaaaaacagggttaaacataaatgcacgctatgtgcgtctgcgtcttaccaagacaggaacgacaactccgaacaaagcaaattattggacaaaagtacgcgaatttacagtaaataagaaatttactgacggggaacgtatttatacaaatattgaaaaattaaaagagactccgatccacatttacgaaaacgaatttcgtataagagacattaaggatttagaattaaaaccgaatgaatatgtcggtatcaaaatgacctcccttgtctcagtgtctgatattttttccgaatcagacgaatttgaaaaagcaaaaatacaatattcaacaaatggaattgaatggacagatgcgaaaaatttcaaagggccacaaccgatgcgatatgtccgtcttgtcaatcagacaaatgaaacgctaaaaggatcattgacaaaactaggtatttccgtaaataatcttaagatcacaccgaagatgagcgaaacaagttttacaaatccgcttaaagaaggtacgtgggagaatatgtttgatggagattttacaacccatgcctggacgaatcagggtcaaaataatggcggatacattattatagacctcggaacttcaacaccgctttatgatgttacaatcgtcacagcggatggaaaacctcatttatacgatgcagatatacaaatctcctctgataaaaaagagtggaccacgatcgcgtctgtaaaaaatgacaatacaaaagtggaacctccctatcgttatgtaagagcaaatgcccagggagctaagagcagatatcttcgtattctcgtaacagatgacgttatcggtaaatatgataatccgttcctttgtatcaaagaaattgaatttaacaaaaatattgaagaaaatacaagtacatatccgattgcttcgagtgcagaaggtaatcttgaaaaatgtatcgatcaggatctgtccactgtatttacaacagaaaacaaaactgccggatggctggaatataaactgacagacaatacaaaattaaaatcgttctctattttgcaagatgtacatactatttccgaagctaatgtaaaggtacgaaccggaactgataaatggaaagacttaggtacatttgataagggaacaaaaacttttgatgtatcagaatatgacaatattttcgcgattcgacttgaatgggcagagggaaaagcgccttctatatatgaaatttatacaaacgaagatgaaaaacaaaatacagatgatatcggaatctatgtagaacaaatcatcgatacagaagcagattccgaaaaaccaaagcctgaacaacctgaaatcccggattcagaaaatcttgctataaaccgtccggtagaggtatcaggaaccgagcttgacagagatcaaaaagattttgccgtggacgggaaccgtgagacaagatggaacagcaattacatcaaaggcgatcatgcatctgaagaagcatggatcatcgttgatctcggtgaagaaacaaatatcatcgaatcacttactgcagagtattttaatttagtttatccgacagactatgacgttctcgtatctgctgataaagaaaactggatcactgcaaaaacgataaaaaacgaaccgaacggagcagcccatccaacagatgaaatttcacttgatcaaccaatcatcggaaggtatgtcaaattattattccgtgaattaaacagtgctgctgtcggaaactgtgtaggtttagaagagcttaccataacaggaaagaggatatcctccgaaacagaattaaaagaatatatgccgatcagcgatattaaaatcgacaaaggtacgtcacaagaagaattaagaaagctgcttcctttaattatcagtggaaagcttgcattaaaagacagtgataaaatactggacttggcatcattatttgtaaactgggatctttcagaatatacttctgctgaagatacgatcctcactttaaaagggaatttgatcggtgcaggaaaagcaactggagacgagatttccctaaatgtgatcataggcaccggatcaacagaacctcctgttgaccctgaaggtcctaccgatccggaaggtcctactgatccggaaggtcctaccgacccggaaggtcctaccgacccggaaggtcctactgatccggaaggccctactgatccggaaggtcctactgatccggatacacctgattcaggaaagattgaacaattaaaacaggaattagctctactcattgaaactgctcaagcaaaagtggaatccggtaaatacacagacgaaacagtcaaaatacttaaagagcaaatcataaaatctgaggcgcttttaacagacaacgtcactgccgaacaacttgaacagcaaatcaatagtattaaaaaatcaatcaacggattaaccgaaaaaaaagccgacttagaaacttctgaccggccaaatcaaaacatcactcattcagaaaaaagtacagcagtaaaaacaggtgactcaactcatataatacctctatttctgctgatgatttgcaccggattttccttgatcctattcaggaaaagaaatacttataataaataa

SEQ ID NO: 592 - DNA, 1749 bp, Ruminococcus torques 1
ttggaaaaagagataggagaaattatgaaggtactattagcggcagtaaatgcaaaatatattcattcaaatcttgccgtccacagcttaaaagcatatgcgcgaacttatacggaagaaatcgaagttgcggaatatacgatcaatcagacgtttgatgcgatcttgcaggatatatataggagaaaaccggacctattgggaatttcctgctatttgtggaatattgaatatgtaggacagcttttgagagaactgccgaagattcttccggatacaaaaatctggcttggaggtcctgaggtatcttacgatgcgaaggctgtgctggaacagtatccgaaagtagaaggcgtgatgtgcggagaaggggaagagacgtttgcggaactgctccgtgtttatcatgaagaaaaaggggcgctttgttccggagtaaaaagagatgaactcttttctgatattccgggaattgcttatagaaataaggacaaagctgtaatccaaaatgattttcgtcctgttattgatttgagcacgattccgtttgtctatgatcatattgaagattttgagaacaggatcatctattatgaatcgagcagaggatgtcctttttcatgcagttactgcctttcctctatcgacaaatgtttacgtttccgggagatagagctcgtaaaaaaagaacttcagttttttatcgacaagaaagtacctcaggtgaaatttgtggatcggacgtttaattgccggcatgatcatgcgatggcgatctggacttatattcatgagcatgataacggaatcacaaattttcattttgaagtttccgcggatttattgaatgaaaaagagatcgcgttgatcaatcgtatgcgtccgggtctgatccagcttgagatcggtgttcaatcggcaaatgagattacgatccgggaaatcaacagaacgatgaaaatcgatgttttgtcaacgattgttgacaaaattaaaaaaggaaacaatgtgcatcagcatctcgatcttatcgcaggattgccgtatgaaggatatgaaagcttcggaaaatcatttgaccgtgtatataaaatgaatccggagcagcttcagcttggttttctgaaagttttaaaaggatctgttatgcatgacagggcgcaggaatacgggattgtgtatcaggatcgtgcgccgtatgaagtcctttctacaaaatggcttacttatgcggaggtcatccggttaaagcagatagaagagatggttgaagtgtattataacagcgggcagttttgctgtacgatggcggcattagagcaagaatttgcatctccgttttgtatgtatgaatgtctggcggcatattatgatgaaaaaaatgcatttgccgtaagtcattcacggatcggaaggtatgagatcttatatgattttatcgtgaaaacgtgtaaagaaagatcggaacaatatatggaaatgttgacattggatatgtatttgagggataatgtgaaaaaacgtccggaatttcttagagaaagcggagtttcatcggatgaagcggcggcattttataaaaaagaagagaaagagcggacctatttgaaagcatatgaaggatacgacagacgtcagatgagaaaaatgactcatttggaacgaattgacgggaaaacagtgttgtttgattataaaaaccgagatccgctcacaggaaacgcggcgatttattatctgtcagagtaa

SEQ ID NO: 593 - DNA, 2337 bp, Ruminococcus torques 1
atgacattgaaagaacttggcatcggacagaaaggaattatcttatctgtcggaggaagcggagcactcagacaacattttctggatatgggattgatacggggcgcagaagtgacagtcgtaaaatatgcgcctatgggcgatccgatcgagttgaaaatacatgggtatgagctgacgatccgtttggatgatgcagagaaaatagaagtaaaagaaataaagtcagaagaaaaagagaaagaaagacggaacaaggtgaaacgttctgcacatcccggatacggtgaaggcggaaagtaccataagaaagaaacagaaaatccgcttaaggatgatgagacgttgacgtttgccctggtaggaaaccaaaattgcggaaagacgacgttgtttaatcagttgacaggggcttcgcagcatgtcggaaattttccgggcgttaccgtagaccgcaaggacggcgtgatcaaagggtacaaaaatacattaatcacagaccttccgggaatttattctatgtctccttacagcagtgaggagattgttacacgagaatttttgttaaatgaaaagccgaaaggaatcattaatatcgtcgatgcaacgaatatggagaggaatctctatttaacgatgcagttgatggagttagatatgcctatggtcgttgcattgaacatgatggatgaattgagggaaaacgggggaagcgttcatgtaaatgaaatggaagagtttctcggtgttccggttgtaccgatctccgctgccaaaggagagggaatcgaagagcttgtgaaacatgcggtgcatgtggcaaagtatcaggaaagtcctcaaaaacaggatttttgtgcggatacggaaagcgggatccacagaggacttcatgcagtcatgcatttgatcgatgatcacgcacaaaaagccggaatccctcttcggtttgcggcaagcaagatcatggaaggcgataaaaagattaccgagaaattggatttaagccggaatgaaaaagaaatgctcgagcacatcgttgttcagacggaagaggagagcggttttgacagagcttcagccgttgccgatatgcgattctcttacataacggaagtgtgtgagacggcggttgtaaaaccgcatgagagtaaagagcgtctcaggagtaaacggatcgaccgcatactgacgggaaaatatacgggaatcccggcctttatcgcgattatgggaattgtattctggctgacatttaacgtgatcggagcgggattacagtcgcttttggaaacgggaatcggatacttgacagaaatcacagatcaggcgatgacatccgcgggagtcaatacggcggttcattccctcgttattgacgggatttttaacggtgtgggaggagtccttagtttcctgccgatcatcgttacattgtttttcttcttatctttgctggaagacagcggatatatggcaagagtagcttttattatggataagctgcttcgtaagcttggattgtcgggaagaagtatcgtgccgatgctggtcgggttcggatgtaccgttcccggggtgatggcgagcagaacgcttccgtcggaaagagacaggaaaatgacgattttgctgactccgtttatgagctgtacggcaaagcttccgatctatgcattcttttcggctgtattttttccggactatgccgcgcttgtgatgatcggattgtatgttcttggtattgttatgggaattatcatggcccttttgtttaaaggaacgatgtttaaaggggagcctgttccgtttgttatggaacttccgaattaccgtcttccgggaatgaaaaatgtcggacagttattgtgggaaaaagcgaaagattttcttcagagagcttttacggttattttcgcggcgacgatcgtgatctggttcttgcaaagctttgatacaagcctgaatatggtgacagattcaaaggacagtattttggcaatgatcgcgggagctctttcaccggttttcgcaccgcttgggtttggggactggcgtatatcgacggcgcttgtaaccggatttatggcaaaagaaagtgttgtctcgacgctgacggtgttgttcggcactacggaagcgcttcttggaacgatcacggcggcaggagctgcggcgcttctcgtattttgcctgttgtatactccctgtgtggctgcggttgcatcgatcaagcgggagcttggcggaaaatgggcgttttttgttgtcatcggccaatgtgtgatcgcatggcttgcggcattcgcagttcatacagttgcgatgcttttttaa

SEQ ID NO: 594 - DNA, 4602 bp, Ruminococcus torques 1
actgttatcagtgtaaaagaatatataggagctgttgatttggaacaggtaaaagacgataaaaaattttttcatgtatttccgacgttgagagcagacgatgatgtccgtttgctgttttcagatgtggaagttaagaagatcacgacgaactcgcgacgtgattttcttaacatatatattttcagcagacatctcattcagaagaagcagatttttcagatggaacaatgtatcaaagatcagttatttgccaaaacggctgttgcggtgcatattgtggaggaatatatgctctcgggacagtatactgcagaagcgcttatgaatgaatacagggagagtatcatcctcgaattgaaagaaaaaagtatgcttgcatctaatatgtttgcacaggcagatatccgctatgaagcggaaaatgtagtctgcctggaactgctcgatacgattgtttcggcagggcgaaaagaagagatagtggatctgttaaaggaagtgtattcagaaagatttcatattccggcagagatccgtgtagattacaaagagcctgacagaacaggaagcagggaatatgatgaacagagaatccaacaggagatcaatgcgatctttgagagacgggcaagacagcgcggggaaacgcctcaggcagaaggagaagagaagaaagatcagataaaaagaacttcatctgaaaatgcggcggataaagcatcggtatcatcccgagacgggaaaggaacatcggcggcaatatcaggaggagtgaaaaagggagaatttaaaaaaggtgaattccgaaagaaagatttttaccgtcctgttaagatcggtgacgatccgaatctgatttacgggcgtaattttgaagatgagcctatttctttagagcaggtgatcacagaaatgggagagatcacagtacacggtaagattatcagttttgatacaagagaaatccggaatgaaaagacgatcattatattttctgtgacagactttacagacacgatcacagtgaaaatgtttgcgaaaaacgaacaacttcctgaaatcttaggggaattaaaaaaaggagcgttcgtaaaagtcaaaggagttacgacgattgataaatttgacggagaacttacgatagcttctgtaacaggaattaaaaagatcggtgattttacggttcaaagggaagatttaagtccaatcaagcgggtagaacttcattgtcatacgaaaatgagcgatatggacggtgtgtcggaagtaaaagatatcgtaaaacgtgcgcatgactggggacatcctgcaatcgcgatcacagatcacggtgtggctcaggcgtttccggacgccaatcattatattgaaacacttgataaagacgacccgtttaaagttctttacggtgtggaaggatatgttgtggacgatctgacggagattgcagtaaacgcaggcaatcagacgcttgacgatacttatattgtctttgacatcgagactacagggtttagttcaatcaaagatgcgatcatagagatcggagccgtaaaagtgacggacggaaagatcacggatcgttttagtacgtttgtgaatccgaaacggccgattccgtttgagatcacaaacctgacaagcatcacagacgaaatggtgatggattcaccgacaatagacgttgttttacctcagttccttgagtttgcaggagacggtgtgcttgtcgcgcacaatgccgggtttgatgttggatttatcgaacagaattgccggtcgcttggactttcggatgagtttgtatatctggatacagtagcgctggcacgtgtacttttgccgacgttgtcaaaatataaattaaatatcgtggcgaaagcgttgaatatttcccttgagaatcatcaccgtgcagtggatgatgcagaggcaactgcggaaatatttgttaaatttacagaaatgctgaaaaaggatcaggtcggaactttaaaagaagtgaatcgttacggggaccggaatgtcaatgcgattcggaaaatgccgacacatcatattattattttggcgaaaaatgatatcggccgatataatctgtaccagttgatctctcaatctcatatgacttactacgcaagaagaccgagaataccgaaaagtcttttgaacgagcacagggaagggctgctgatcggaagcgcctgcgaggcgggagaattatatcaggcagtgcatgaaaagcgctctgcccaacagattgcgaggctggcggaattctatgattattatgagatacagcctgtcggaaacaatcagtttatgatcgagagtgaacgtatagcggatgtaaattcaatagaagatctgcaaaatatcaacagggagatcgtggagctcggagaaaaattcggaaagccggtagtggcaacatgcgacgtacattttttaaatcctgacgatgaagtgtaccgaaggattattatggcgggaaaaggatttgacgacgcggatcgtcagcctccgttgtttcttcgcacgacagatgagatgctggaagagttttcctacctcggcgcggcgaaagcgagagagattgttatagataatccggtgaagatcgcgggtatgattgaaaagatctctccggtcaatccgaacaaatgtcctccggttatcgaaaattcagatcaggaactaagggatatctgttacaggaaagctcatgagatgtatggagaagatcttccgaagcaagtttccgcacgtctggaaaaagaactgaattccattatttcaaatgggtatgcggttatgtatatcattgcgcaaaagcttgtttggaagtcaaatgcggacggatatcttgtaggttcgcgaggatcggtcggatcttcctttgttgcgacaatggcgggaattacagaggtaaatccgttaagtccgcattattattgttcaaaatgccattatagtgattttgagtcggatgaagtgcgttcatttgccggcggatgcgggtatgatatgccggataagaagtgtccggtatgcggagaacagcttgtgaaagcgggatttgatattccgtttgagacattcctaggattcaaaggagacaaagaaccggatatcgacttgaacttttccggagattatcaggcaaaggctcataaatatacagaagttcttttcggtgaaggacatacatttaaggctggaacgatcggtactctggcagataagacagcgtatggatttgtccggaactactatgaggaacatgagcaaagaaaacgaaaatgtgagatagaaagagtgaccgaagggtgtacgggaatccgaagaagcacaggtcagcatccgggaggtatcgtcgttcttcctcacgggcatgatatcaatgaatttactccggttcaacatccggcaaatgatatggaatgtggaattacaacgacacattttgattatcattccatcgatcataacttgttgaagttagatattctgggacatgacgatccgacgatgatccgtacactggaggactatattacatcggatgctatggaaaatgaatacaatgcagatcatccgtttattgcgaccgaaattcctcttgatgataaggatgtgatcgaactgtttcatggaacagaagtgttggggattaagccggaagatattgacggatgtaagatcggaagtctcggaataccggaattcggaacggactttgttattcaaatggttcaggatacgaaaccgcagacactttcggatctgatccgtatttccggattatcgcacggaacgaatgtgtggcttggaaatgcacaggagcttgtgaagtcgggaaaggcgacgatttcgacggcgatttgtacgagagacgatattatgatctatcttatcaacaaaggagtagaaagtgctcttgcgtttacgattatggaaagtgtgcgaaaaggaaaaggactgaaaccggaatgggaagaggcgatgaaagcacaggatgtgccggattggtatatttggtcatgtaaaaaaattagctacatgttcccgaaagcacatgccgccgcttatgttatgatggcatatcggatcgcatactgtaagatcaactatcctcttgcatattatgcggcgtatttcggcatcagggcggatgcgttttcgtatgcgcttatgtgtcagggaaaagaaacgttgaattatcatataaaacagtataaaagtaaaggggatcagctaagcaagaaagagcaggacgtgctaaaagacatgaagatcgttcaggaaatgtatgcccgtggatttgagtttgttccgattgatatttatagggcgaaggcaaagatgtttcagatcgtagacggaaagctgatgccgtcgcttgcaagcattgaaggaatgggggataaagctgccgaggcagtggaagaggcggcgaaagacggggcgtatctgtcgcttgacgacttcaggcaaagaacaaaagtcagcaagactgtgattgatctgatggcggagcttggattgtttggagatcttccgcagagtaatcagttatcgctgtttgattttacatga

SEQ ID NO: 595 - DNA, 2244 bp, Ruminococcus torques 1
atgaacagtgaatcacagatcataagaacggaatattcggatcttatgaaaaaatcatatattgattatgcgatgagcgtaattatttccagggcacttccggatgtaagagacggactgaagccggttcagcgccgtacgctttatgatatgtacgaactgggaatccgctatgataagccgtacagaaaatgcgcgcgtattgtcggagatacgatgggtaaatatcatcctcacggcgacagttcgatctacgaatctcttgttgttatggctcaggagtttaaaaaaggaatggtacttgtagacggtcacggaaacttcggttcgatagaaggtgacggcgctgcggcaatgcgttatactgaggcaagactgacgaaattcacgcaggaagtctgccttgcagatctagataaagatgtggtagatttcggaccgaattttgacgaaacagaaaaagaaccgcttgtacttccgatgcgtgtgccaaacctcctcgtaaacggagcggaaggaattgcggtaggtatggcgacaagtataccgcctcataatctcggagaagtgatcgatgcggtaaaggcatatattaaaaacgattcgatcactacaaaacaactgatgaaatacataaaagggcctgattttccgacaggcggaattgttgttaataaagatgatctgatcaatatatatgaaacgggacagggaaagatcaaagtccggggaaaagtagagacagaagaattaaaaggcggcaaaaagcagcttgtgatcagtgagatcccatacacgatgatcggagcgggaatagggaagtttttaaatgatgtagccggtctggtagagacaaagaaaacaacagatatcacagatatttcaaaccaatcttccaaagaaggaattcggattgtgttggaattaaaaaaaggcgcagatgtagaaaatctaaaaaatatgctttataaaaagacgcgccttgaagacacattcggcgtgaatatgcttgcagttgcagacggaagaccggaaacactcggacttaagaagatcattgagcatcatgtagattttcgatttgaactggcgacgagaaaatacaaaacacttcttgcaaaagaacaggaaaaaagtgaggtgcaggaggggttgatcaaagcatgtgatgtgatcgatcttattattgaaatccttcgaggcagtaaatctgtaaaagatgcaaaagcatgtcttgtaaatggcgtaacagataatattaagtttaaatcttctatttccaaaaagatggcggtgcttttacgctttacagaacgtcaggctgctgccatcctcgagatgcgcttatatcgcctcatcggtctggaagtacaggctttgatcgcggaacatgaacagacggtgaagaatattgcgcgttatgaagatattctcaataattatgattctatggcgcaagttattgtggaagaacttgaatcgtttaaagaagaatatgcaaaagcgcgccgtacagtcattgaaaatgctgaagaagccgtttttgaagagaagaagatcgaagaacaggaagtcgtatttttgatggatcggttcggatatgcaagaatagtagacgttgccgtttacgaaagaaataaggaagcggcggatagtgagaataagtatattgtccattgtatgaacacggggaaaatatgtatttttaccaatagcgggaaaatgcaccaggtgaaagtaattgatcttccttatggaaaattcagggataaaggagttccgatcgacaatgtcagcaattactccagttctgatgaacagattgtctcggtatacgattccgagcagatgagatttgccatgcttttgttttcaacggcgcagggaatggtaaaaaaagtcagcggaagtgaatttcaggtggcaaaacgaacaattctggctacaaaacttcaggaagaagattctctggtcgatgttcgggttgttaatgaaaataagcatgtcgttcttcagacaaagaacgggtactttttgagattcccggccacggaagttcctataaagaaaaaagctgcagtcggtgtcagaggtatccgtcttcagaaaaaagatgaactggaaaaggtatatctttttgaagaaggaacggaaacaaagattctatataatgaaaaagaggtctccttaaatcgattgaaaacggcgaaacgtgatggagcaggaacaaaagcaagaaaatag

SEQ ID NO: 596 - DNA, 3594 bp, Ruminococcus torques 1
atgggcgtgaaatggacagaacagcagcaaaaggtcatagatctgcgaaatcgtaatattcttgtatctgcggcggcaggatcgggaaagacagccgttctcgtagaacgtattattcaaaagatcacagatgagcaaagtcctgtcgatgtggacagacttttgattgtgacatttacagaagcggcggcagcagagatgaaggacaggatcagagaagcgatcgagaaaaagctggaagaaaatccgggaaacgtacatctggagaggcaggctacgttagttcacagtgcgccgatcacgacgatacacagtttttgtctgtctgtgataagggaacattttcatgtgatcgatcttgatccgggatttcggatcggagaagacggagaattaaaacttttaaaacaagacgttctcgatgaattgcttgaagagtgttattccaaaggagaggaagagttcctttcctttacagagcggtttggaacagggaaaaatgaccggaagatcgaagggatcattttaaaattatacgaatattccggcagttatccaagaccggaacagtggcttgaccgttgtgctgcggtatatacagaagaagaggcggcggaagcgatgatacggcgggcaaaagaacacgttcttattcggatcgaagaaccggaaaaactgatccgcagaggattgaaaatatgtgaggagccggatggaccgtatatgtatgcggatatgctggaagaggatcttcgtggaatagagaagataagaaaatgcagtgattttgcagaaatgtatgacgcggctgatcggtttgtatggaaaacgctttcgagaaaaaaagatgacagtgtatcggctgaaaaaagagagtccgtaaaggcgttgagagaacaggcaaaaaaggcgattgccggggtgaaggaaacttatttttacgcgccggaaagcgtatggaaagaggacatggtttcggcgggagagtctgtgaaaacgctcgtatctttggtaaagctgttcgcagaaaagtttgcggaaaagaagcgcggcagaaatatgatagattttaacgatatggaacggtttgcgcttgatatactgactgaagaaaaaaacggagaacttgttccgtctgccgtagccggagaatatgcaaaacagtttgaagaaattatgatcgacgaatatcaggacagtaattttgtacaggagacgatcctgacaagcgtatcgggacaggcagaaggaaaaagtaatatttttatggtaggcgatgtaaagcagagcatttacagcttccgtctttcaagacctgaactgtttatgcaaaaatataacacatacagtttagaagacagtgacagacagaggatcgatctgcataaaaacttcagaagcagaggagaagttctggacagtgtcaattatatcttccgacgtattatgaaaaaagaaatgggcggaatcgaatatgatgacagcgcggcactttatcttggggcgaagtttccgaaaacagaagaaattgaggcaaaacgatacatatcgtcagaatgtgaaagaaacacagatcttttcaagacggagcttttgatcttaaaagaccgcgataaagaagcggaaaacgtacgtcggtcagaagcgaggatgatcgcgcgcagaattaaaagtttgatgcgcggcggggttgtgtcggataaaaaaacaggggaatatcgtccggtgcagtataaagatattgtgattttgacaagaagtgtgaaaggatgggcagaagatttttcggcagtccttgcagaagaagggattcccgcatattctgtaagcagggaagggtattttgaaacttatgaagtgagcgtattgcttgattatcttaaaatactcgataacggaaggcaggatctcccgcttgcggcggttctggcgtcgcctttgggaaatcttctgacagaagatatggcaaagatcagagtcgcatatcccgacgtaccgtttcatgaaagcgcgcggatgtacgcgtcggaagaagcacaggatccggtcttgaaagatcgtctgatgagatttttcagtcaggtggatcatttcagaaaaaaagtgtcgtatactccgattcatgatctgttgacggagattatagaagaaacaggtttcggtatatacatttcggcgatggaaggcggagtgcaaagagccgcaaacgtagagatgctggtggaaaaagcaaaggcgtttgaaggaacaagctacaaaggattgtttcattttgtgcggtatatcgaacaactgaaaaaatatgacgttgattacggagaagccgggatcatggatgaacaggcggatacggtaaggatcatgagtattcataagagtaaaggtttggaatttccggttgtttttgcggcaggtatgggaaaacaatttaatacacaggatacgaaaagcagcatgatccttcatcctgaatggggcattgggattgataagatcgatctgaaacggaggacaaaagcgcctacatttttgaaaaagctgattcgggaagaggcaatgtatgaaatgtgggcagaggagatgcgcattctgtatgtagcgttgacaagagcaaaggaaaaactgatcatgacaggggttttgccggatcgtttcattatgcgctccggcaaagacggagttatcacggcaggtgcaaaatcatatttcgactggatcataccggctctttggtctgaagaggaggaggcggcgttagaagatgcgcctgtctgcatttttcagtatacaggaaatgacataggagcagatattttacaggtgaagtcagaacagttggcgcttgacgtattgaaacactgggatgtgacaaaagtgtatgatccggaaatacgaaaatgtctggatgaacaggcagattacgtttatccgtattattcggaaggcggtatgaaaatgaagtttaccgtatcggagctgaaaaaaagaaaggcgctgcaagaagaagcgggagaggaaatgtataaagaaccacagacggttcctcttcttccccgttttataaaagaggaagaaactctttccggcgcttcacggggaagcgcatatcacaagtttttagaactgcttgattttgcaaaagaatacgaagcagatgatctggaagcagaggtggaaaggcttgcggaagatggacgtttatcgagggaaatggcagaatgtattgagacagaagatatgatgcggtttcttcggactaagagcggagtgcggatgttacaggcggcaaggaacagaaaactttataaagagcagccttttgtgatcagcgtgaatgcatcggagatctatcagggagatctgtccggggaaaagatattagtgcaggggattatcgacgtttattttgaagaagaagacggacttgtcgtgcttgattataagacggatcaggtgaaaagcagaaaagaacttgcggaaaaatatcatgcgcagcttgaatattatgcacatgccctgtctcagcttacgggaaaaactgtaaaagagaagattatttattcgtttactttaaaagaggagatcatcgtatga

SEQ ID NO: 597 - DNA, 2130 bp, Ruminococcus torques 1
gcatggcgagaggaaagaaatacatgcaaaataactacatatcaaggaggcggcagcatgaaagtttacagaacagacgaaattagaaatgtggtattgctcggacacggcggaagcggaaagacgagtcttgttgaagcgatgctgtatgtatcaggcgttacgaaccgaatggggaaagtgacagaatctaacacggtcagtgattttgataaagaagaacagaaacgtggtttttcgatcagcacaagtcttgttccgatcgaatgggaaaaggcgaagatcaacattcttgatacaccgggatattttgattttgtgggagaagtggaagaagcggtaagcgcggcggacgcagcggtcatcgttgtttccggcaaagcgggagttcaggtaggcacggagaaagcctgggagctgtgtgataagtataaccttccgcgaatgatctatgtgacagagatggacgttgacgatgcaagtttccgtcaggtagtagaagatctgactacccgttacggcaaaaagatcgcgccgcatttccagccgatccgcgagaacgaaaaacttgtcggatatatcaatgttattaaaaatgcaggaagaagatatacggagatcgggcaaagagaagagtgcgagattcctgattactgtaaaccgaatcttgagattttgagagactctcttatggaagctgtcgcagagacaagtgaagagtttatggagcgttatttcaacggcgaagaattttcggtagaagagatacgctctgcaatgcgtacggaagtgatggacggagatatcgttcctgtcgctatgggatcaaacgtgcaggcgcaaggcgttgcgaatctgctttctgacattgtaagattcttcccgagtccggataaaagaaaatgcgcaggtattaatcgcagaacaaacgagatttttgaaggcaattatgaattctcaaaagcaaagaccgcatatgtatttaagacgatggtcgatccgttcattggaaaatattcattcgtaaaagtatgctccggagtgttgaaaggcgatgatattttatataatgcagacgcagacgcagaagagaaacccggaaagatttacacaatgtgcggaaataaaccggcggaagtttccgaactgtttgcaggagatatcggggctatcgcaaaactcggcagcacacgcacgggcgatacgctttctacaaaggcaaatccggtatcttatgcgaaaacagattattctgttccttacacatatatgaagtatacggtgaaaacaaagggcgatgaagataaggtttcacaggcgcttgcaaaaatgacggcagaggatgttactctgaagtcggtaaatgacagtgagaaccgtcagacgcttctctatggaatgggagatcagcatctcgagatcgcagcaagcaaacttgcggcgagatataaagtggagatcacgcttgagacaccgaaagttgcattccgcgaaacgatccgcaaaaattcggatgtagatatgaaatataagaaacagaccggcggccacggacagtacggacacgttaagatgaaatttgaaccgtctcacgatcttgatacaccgtatgtatttgaagagtgcgtagtcggcggagcagttccgaaaaactatttcccggctgtagaaaaaggattgcaggaatcggttcttaaagggcctcttgccggatatccggtggtcggtgtaaaagcgactttgtatgacggatcttatcatccggtagattcttcggaaatggcgttcaaaacagctacaacccaggcgtttaagaaaggatttcttgaggcatctccggtacttcttgagccgatcgcttctttgaaagtgactgttccggacgattatacgggagatgtgatgggagatctgaataagagacgcggacgagtgcttggcatgactccgatcgcaggtggaaagcaagtgatcgaagcggacattccgatgacaggattgttcgggtattgtacggtgcttcgctccatgacaggcggaagaggaacatacgcatatgaatttgcaagatatgagcaggctccgtctgatgtacaggagaaagagatcgcagcaagagcggaagagtaa

SEQ ID NO: 598 - DNA, 1395 bp, Ruminococcus torques 1
atggcagatgtattgaaaaaagttcctgtcagagaacaggatgcaaaagtacgagcaacaaattttgaagaagtttgtcttggttataatatggaagaggcgatggaagaagcttccagatgtttgaactgtaagaatgcaaagtgtattcagggctgtccggtttctattgatattcctgcatttattcaggaagtgaaagaaggaaacatcgaagaagcatataaagtgatcggaaaatcaagtgcgcttccggcaatttgcggacgagtatgtccacaggaatcgcagtgtgaaggaaagtgtatccgcggaattaaaggtgagccggtttcaatcggaaaacttgaaagatttgttgcggattatgcgttggatcatgatattaaacctgtcggtgcagaagagaagaacggacacaaagttgctgtaatcggttccgggccgtcgggtcttacatgtgcgggagatcttgcaaagcttggatatgatgtgactgtatttgaggcgcttcatgagctcggcggagtgcttgtatacggaattccggagttccgtctgccaaaacagaagattgttgcgaaagagatagagaaagtaaaagaacttggcgtaaaatttgagacaaatgttgtgatcggaaaatccacaacgatcgatcagcttatggaagaggaaggatttgaagcggtctttattgggtccggagcaggacttccgatgtttatgggaattccgggtgagaatgcaaacgaagtattctctgcaaatgaataccttacgagaagtaatctgatgaaagcatttgatgattcttacgatacacctattgctgccggcaagaaagttgctgtagtaggcggaggaaatgtagcgatggatgctgcaagaacagcacttcgtcttggcgcagaagtacatattgtgtacagaagaagcgaagcggaacttccggcgagagttgaggaagttcaccatgcaaaggaagaaggcgtaatttttgatcttttgacaaatccgaaaaagattaatgtagatgataacggaaatattacaagtatgacagttgtaaagatggaacttggagaaccggacgcttccggaagaagaagacctgtagagattgaaggctcagagtacgatattgaagtcgatactgtaatcatgtctttaggaacttcaccgaatccgttaatttcatctacgacaaaaggtttggatgtaaaccgcagaaagtgtatcgttgccgatgaggaaaacggacagacatcaaaagaaggtgtgtttgcaggcggcgatgctgttacaggtgccgctacggttatacttgcaatgggagcaggaaaggccggagcaaaaggaattgatgagtatttgaaaaataaagaaaagtaa

SEQ ID NO: 599 - DNA, 2058 bp, Ruminococcus torques 1
atggcagtgaaaaaaggaacattatcgatcgacagcgaaaatatatttccgatcataaagaaatgggtgtattcggatcatgatattttcgtgagggaacttatatcaaatggatgcgatgcggttacgaagctgaaaaagcttgatatgatgggagaatatgaacttcccgaagattataaggcaaagatcgaagtaattgtcaatccggaagaaaagacgatgaaatttatcgataacggtcttggtatgacagccgaagaggtagaagagtacattacgcagatcgcattttcgggagcgacacagtttcttgaaaaatataaagataaaacgacagaagacgatatgatcggtcatttcggacttggattttattctgcgtttatggtggcggatgaagttcagatcgacacattgtcttataaagaaggcgcatctgccgtacactgggcaagtcagggaggtacggaatatgagatgcaggaaggaaataaagagacggtcggaacagagatcacactgtttttaaatgaagacagtcttgcgtttgcaaatgaataccgtgcaagagaagtaattgaaaaatattgttcttttatgcctgttgaaatcttcctttccaaagcaaatgcacagccggagtatgaaacgatcgatgaggaggacgtgcttgacacagacgaagtcgtagagcatattacggaagaagtaaaagaaggcgaagaaggagaaccgaaaaagaaagcgaagatcgtgaaacgccctgtttctttgagcgatactcatccgctgtggagcaaaagtccaagcgagtgtacaaaggaagaatacattgatttttaccgcaaagtgttcatggattataaagagcctttgttctggattcatttgaatatggattacccgtttaacttaaaaggaattttgtattttccgaagatcaatacggaatatgaatctatcgaaggaacgatcaagctgtacaacaatcaagtctttatcgcggacaatatcaaggaagtgatcccggagttccttatggtcctcaaaggtgtgatcgactgtccggatctgccgcttaacgtatcaagaagcgccctgcaaaacgatggattcgtcaataaagttgccgattacatttctaagaaagtggcggataagctgacgggaatgttcaagacagacagagaaaattatgagaaatactgggatgacatcagcccgtttatcaaattcggatgtctgaaagatgaaaaattcggcgagaagatgaaagattcgatgatctataaaaacttggatcacaaatatctgacattagaagatattataaatgaaagcaaagctgcaggaacagaagaagagacagccgaagaggcggcagcggaaacagatgcgcagaaagatgtgcagacagatacggacgatcaggataaagagcctgaaaaaacgtcggtttactatgtgacagacgaagttcagcagagccaatacatcaatatgttcaaggcacagggtcaggatgcgatcgtgctgacacataatattgattctgcgtttgtgacttatctggaacagaaacatgaagacgtcagatttttaagaatcgatgccgatgtacatgagtctttgaaagatgaagttgcagaagacgagaaagaatctttcggaaaaatggcagacagtctcgtggaaatcttccgaaaagaactaaatgatgataagctcgatgtgaaagtggaaaaacttaaagacgataaagtggcgtctatggctgttttgtcagaagaaaaccgccgtatggaagaaatgatgaaaatgtacggtatgagcggaatggatccggctatgttcggcagcaaggcgacacttgtactcaacgcaaaccatccgcttgtgaagttcctgacagagaacaaagaaagcgagaatgtaactgtcatctgtaaacagctttatgatcttgcaatgcttgctcataagcctttaagcccggaagaaatgacggcgtttgtacaaagaagcaacgagatcatgcttctactcacaaaataa

SEQ ID NO: 600 - DNA, 5934 bp, Ruminococcus torques 1
atgaaaaggaagctttcaaaagcaggcgggaaagcgttatctgtcgcacttgcgatggcgactgttgtatcggcagctcctttctctgtagcggccgaggataacgttgctttggcacagacacaggaaacggagggaaatgctttgcgtttgtggtatgatgaagaggcgcccaattcgtatacggggtgggagcagtgggctcttccgcttggaaacagcgcgattggagccagtgtgtttggcggtgttcagacagagcgaattcagttgaatgaaaagtcgctttggtccggcggtccttcagacagccgaccggaatataacggcggtaatattgaatcaaaaggtcagaacggcaaggttatggcacaactgaaagagaaactgaaaagcggacaagggtttgacagtaatcttgcaggacagcttattggagtcagtgatgacgccggagtacagggatacggatattatttaagttatggcaatatgtatctggattttaaaaatgttacaaagaataacgtttcgggatattcgcgcgatctggatcttcgcacggcggtagccggagtgaattatgatctcaacggagcgcactatacaagagaaaacttcgtaagctatcctgacaacgttcttgtaacacgtctgactgcaacagacggcggaacgcttgattttgacgttcgtgtagaaccggatgaggaaaaaggcggaagtcaaaaccagccgggagcagattcttacgcgagaacatttgacaaaaaagtatccgacaatgcaatcgcgatcgacggacagcttacagataaccagttgaagttcagttcttatacgaaggtaatcaaagatgacggaacggcggggcagatcaaagacgactcgaaaaacggtaagatcacggtaagcggcgcgaaagcgattacgatcattacttccatcggaacggattataaaaacgattatccgaaataccgtacaggcgagacaaaagaacagctcgctgctttggtaaaaggatatgtatccggagctgaggcgaaagtaaaagccggcggatatgagacgttaaaagaagatcatgtaaatgattacgatcatattttcggaagattagatcttaacatcggacaggcagtgtctgacaagacaacggataagctgttggaggcatataaaaaaggaacggcttccgaaacagaaaaacgttatctggaattgatgctcttccagtacggacgttatctgacgatgggatcatcgagagagactcctgtgaacgaagacggaacgaagaatgaaagaagagcaactcttccgtcgaacttgcagggaatctgggtcggagcgaataactccgcatggcattcggactatcatatgaatgtcaatctgcagatgaactactggccgacatatacgacgaatatggcggaatgcgcagaaccgctgatcgactatgtagattcgctcagagagccgggacgtattacggcgaagatttacgcgggcgttgagagtacggaagcaaatcctgaaaatggatttatggcgcatacacagaacaacccgtacggatggacgaacccgggctgggtatttgactggggatggtctccggcaggcgttccgtggattcttcagaactgttgggaatattatgagtttacgggagatacagagtacatgcagactcatatttacccgatgatgaaagaagaagcgacgctctacgatcaaatgttgatgcgcgataatgatggaaagcttgtatctgttccgagttattcaccggagcacggaccgagaactgcaggtaatacatatgagcattcgttgatctggcagttatatgaagatacgatcacagcggcagagactttgggagttgacgaagcgaaagtcgcacagtggaaaaagaatcaggctgacttaaaaggaccgatcgaggtcggtgccagcggacagatcaaagagtggtataacgagacaacgttaaatacagatgagaacggtaatcaaatgggacaaggatatggtcatcgtcatatttcccatatgctcggattatatccgggagacttgatcgctcagagcgacgaatggctggcggcagcgaaagtatcgatgcagaatagaactgatgaaacgacaggatgggcaatggctcagcgtgtcgcaacatgggcgagacttgcagaaggcgataaagcatacgacgtattgtccaaaatggtcacgagcggcaagatcatgacaaacctgtgggatacacacgctccgttccagatcgacggaaacttcggttacacagcggcagttgcggaaatgcttgttcagagcaacatgggtcacatcgacctgatgcctgcagttccgaaagcatggggaacaggtaatgtgaaaggtctgcttgcccgcggtaattttgcggttgatatggcatgggcagacaacaaactgacagaagcttcgatccactctaataacggcggagaagcggttgttcagtacgcaaatctttcacttgcaactgtaaaagacagtgacggaaacctcgttgagatcacaccggtgacttcagatcgtatttccttcaatacagaagcaggaaagacatatacgatcactgctatccctgataatacattagctgcagctcctacaggtcttaaggtaacgaagatcaaagacggagagacagttcttacatgggatgcggtcaaagccagaacagaagtatcttataatgtataccgtcagattgaaggcggcgagtgggtacaggttcagacagaactgaaagcgacagaatggacagacacagacgcttgggatgtgctcggaacattgaagtacaaagttacggctgtgatcgacggaaaagaaagtgagttcagttcggaagcaacggtagatgactgccgtaacatgatcggcatgatcgacgatcaggacgaacgtatcaaatatacaggaagctggggcaactggatcagccaggaaggaaactacggcggttcagtgaaatacttagaagacccgacaggaacagagacagcggaacttacattctgcggaacgggtatcgaagtattctcctgtacacaaaacgacagaggtaaagttgaaatctctatcgacggagaagtatgggcaacagcagatacttattcggcaactcaaaaaagacaggcaaaaatattctctacagaagagcataaagataagacgcttgaatacggaatccatacggttaaagttcgggcgatgggcgagaaaaatgcatctgcaagcagagataaagtagagcttgacgcgtttaacgtattgaatacagaagcggcgcgggttgaaaaagtagaggtagcatctgcaagcggaatgacaacagtaagcaaagccggatcgacgcttcagatgaaagtggcagtaactcctgcagaggcgatcaataaaggtgttacgtggtctgttacaacaaaatcaggcagcgcggcagctacgatcgatgaaaacggacttctgtcaacaggaacggcaaacggcgtcgtgacagtaaaagcgacatcgaaagaaaatgccgaaatctcaggcacatgcgagattacagttgcaatcccggatgtgacagcgcagtcagagattatcgaggactgctcggatgataagaactccaagaatccgaagatcacatggagtgaaacaggctgggataatccgtacaaaggagaagctgataagcaccacggcggaactaagacggagacaagtacagaaggagcatggtttagctatacatttacaggaacaggcattaagttctatgctcagaaaaataatacacaaggcaaatttactgtagaactggatggacagccggcaggcgacgcagttctttgggaagaaaaatcaggcggatcaccgcagcagtgcgtatttgaaaagacaggtcttgaaaatacacaacatacgattaagtttacagcggcaagtgatcatggcaataggaatgtaaacatcgattaccttgaagtgtttgctccggcagcagcttctgttgacaaatcggcgcttcaggctgcgatcgagaaatacagcggtctgaataaagacgattacgcagaaagtttatggaatgaatttaagaaagcgtatgacgatgccgttaaaggaatgaatgacgacaagacgacaaaagagcaggctgataagcttgcggcagacttgaacgtagcaggtgcaaagcttgaagcggcagaaattccggctccgacgattccggaagatgcaaaagcaactgtaatgggagttacaagtacagaagcaactgtttcatggacgaaacttccaagggcagagtcttataaagtatatgctgtagaacatgcaggaacagcaaaagcgctgaaagcaattacagatactgttccggaaaatgcaggagaacctgtaacaacagcagaaacaacggtacggtttacgaatctgaaaccgggtacatcttatgtatttatgatcgtaggagtaaaccacaataaagtagagtcggaaaaagctctttgcagcgagccgttcacgacagtggcggcggcagatgaaaaagctccggcacaggtaagtggaatcagcgtagtaaaagaaggtgaaaaagatgtgaagatcacatgggctccgtcagaagatccggaaggaagcgaagttacatatattgtatatgtagacggcgtgatcgtatctgaaagcgataagacagaatatacattgaaaaacgcggatgaaagcaaagactacagtatccgtatcgtagctgtagatgcatcaggaaacaaagctgtacctgcagtaattaacctgacggtagacgactggaatgcaaagacagttgtaggcgtagagaaacctgccgatcttaaagtgaagaaaggaactgctgctgataaactggatcttccgaaaacagtaaatgttacactggaaggcggtcgtgttgcagatgtacttgaagtaaaatggacgacagataattacaaagcagatcagatcggaacacagacgctgtcaggagaacttcagaagaagaaaggcgttaagattcctgataagtttaagacagtaacgatcaacgtaattgtagaagagagcgaagtaaatccgccgcagccggaagacaaagtagttacaaaagtagaagaacttactgatcttacggttgagttcggaacttcagttgagaaacttgctcttccgacagaagtaaaagtaacattagataacgagacagaagacaaactgtcagtagagtggaacacagatgcgtataaagcagacgaagcgggaacgtacgaactgacaggaacacttcaggcaaaagaaggaattaaacttcctgacaacttcaagacagtaacgatcaacgtaactgtagaagaaaaaggcggagaagtagacccgccgcagccggaagacaaagtggttatagcagtagaaaaacttgctgaccttactgtgaaattcggaactccggcagagaaacttgcccttccgaaagaagtgaaagtgacacttgataacaaggcgaaagataaactgtcaatcgtatggaacacagatgtgtataaagcagacaaagcaggaacatataaactgacaggaacacttcagacaaaagaaggaatcacaattccggaagaattcaggaaagtaacggtcaacgtgactgttgaagagaaaggaaaagttcctccgacatccggcaaagaggaaggaaagaacaattccggtgcggtacagacaggcgacgataagaacgtatggcttccgatcgcgggtcttgtggctgcaatcgccgttgtggcggcagttcttattatcaaaaataaaagaaaaaataagaacaaaaataagaataaagttttcataatataa

SEQ ID NO: 601 - DNA, 1515 bp, Firmicutes bacterium CAG:227
atgagcagaagagcgaaaatggttctggataaagagttccagattgcaccgattgataagagaatttatggttcttttattgagcatttaggaagagctgtatatgagggaatctatcagccaggtcatccggcagcagatgaaaatggatttcgtaaagatgttatcgagttggtaaaagaacttgatgttccgattattcgttacccgggcggaaattttgtatctaatttttactgggaagattctgtaggtcctgttgaggaaagaccacatagactggaacttgcatggagaagtcttgagaaaaatgaaattggtctgaatgaattctcaaaatgggcagaaaaagtaaattctgatgttatgatggcagtcaatcttggtacaagaggaatttcagatgcctgcaatcttctggaatactgtaatcatccatcaggaacaaaatatagtgacatgcgaattaagcacggagtaaaagacccacacaacattaaagtatggtgccttggaaatgaaatggatggtccatggcagattggacataaaacaatggaagaatatggacgtcttgcagcagaaaccgcaaaagcaatgcgcctgattgacccgagcattgaactggtatcctgcggaagttctttccgtgacatgccgactttcccagactgggaagcaacgactctgtcccatacttatgagtatgtagattatgtttccatgcatcagtactatggaaacagagacgatgacagcaatgattatctggcacagtctgatgatatggatgatttcatccgtacggttatctcaacctgtgactatgtaaaagcgaaaaaacgtagtaaaaaagtgatgaacttaagctttgatgaatggaatgtatggttccactcaaatgcagctgatgatgatatcacagaaaatcatccatggcaggtagcaccgccaatgctggaagatatctacaactttgaagatgcactgttagtcggtttaatgctgattactcttatcaaacacgcagaccgtgtaaaaatggcgtgtctggcacagttagtcaatgtaatcgctccgattatgaccgatgcagcaggtggcgcatggaaacagactatcttctatccatttatgcatgcttccaaatacggacgtggcgttgcactgcttccagttatgaacagcacaaaacatgcaactgcaaaacatgatgaaatcacagacgttgaatctgttgcagtttacaacgaagaaaaagatgaagtaacaatctttgcagtaaatcgtaacttagaagaagacgtagaacttacaacagatgtaagaagctttgaaggctaccgcatattagaacacatcgttatggaaaacgaagatctgaaagcaggcaacagcctggccggagaaaaagtttatcctgtaaatggcgatgagagaagcaaacttgacggcggagtgctgacaagcgtaatcaaaaaagcatcctggaatgtgattcgtctgggtaaataa

SEQ ID NO: 602 - DNA, 2193 bp, Firmicutes bacterium CAG:227
ggaggaaaacgtatggcaattacagtaaaagacaaaatttttaacctggaaacaaaaaacacactttatcagatgaaggtggatcgcttcggagtactcaatcatctctggtatggagaaaaaacagattgttgtatggattatcttctggattatccggacgcaggattttccggaaatatctatgaagcagaaaatgaaagaacctattctttaaatactctgccacaggaatacagcaccagcggagttggagattttcgaatctctgcaatttctgttactcatgaagatggaagtaatgctttagacttaagagtcagggaatatcagattaaaaaaggaaaatatgagattccagggcttccggcagtgtatgcaaaagaagacgaagcagaaacattagaaattactttgaaagatactgcaacggaagcagaggtgattttgaagtatggtgtgtttgaaaaagaagacgtgattacaagaagtgtggtggtaaaaaattcagggaaaacaccgattgtaattaataaagtgcatagtatgtgtctggatattccgtatggagactgggaatggatgcatttttatggcagacatactatggaaagacaggcagaacgagttcctgttttgcacggaatttcagagagcagcagcagcaggggaacttccagtcatcatcaaaatccggctgttctgctttgtgaaaaagattgtacagagacaaatggtcactgcatcggagctgcattgatgtacagtggaggatttcaggcacaggtagaaaaagaccagttagaacagatccgtctggttatgggaatccacccagacacatttgaatggatcttagaagccggagaagcgttctacacaccggaagtgattttatcttgttctacaacaggatttgcaaaattgtctcagaatttccatcacatcatccgaaatcatgtctgccgtggaacataccagttaagcagccgtccggttttgattaataactgggaggcaacttactttgactttaacgaagaaaagattttaaatattgcaagacaggcttctaagcttggaattgatatgatggtacttgatgatggttggtttggaaagagagatgatgattgttccggacttggagactggtttgtcaatgaaaagaaattaaatggcggattaaaagccctggttgagaaaatcaatgcaatgggtatgaaattcggactttggtttgaaccggaaatggtatccgaggacagtgatttgtaccgtaatcatccagactgggcgattcagattccgggaagaaagccgatgagaagtcgttatcagttagtattagacatgtcaaatccagaagtggtggattatctttatggtgtaatgagtgcgattttaagagaaaatcatattgaatatgtgaaatgggatatgaaccgcagtatcagtgactggtatacagctacactttccagaggacgccagatggaaatgccacacagatatgtgctgggactgtatgaattgcttgaaaagctgacatcagaatttccggatgtattgttcgaaggatgcagtggcggaggcggaagatttgatgccggaatgatgtactactgcccacagatttggtgcagtgatgataccgacgcacatgaaagaacctttatccagtatggtacaagtttcttctatccaacttcaacagtaggttctcatgtttccgcagtgccaaaccatcagacaggacgaattacctcaattgaaaccagaggtgtggttgcaatggcaggaagctttggatatgaattagacttaaatcagctttcagaagaagaaaaaacagttgttgcaaaacaggttacccattataaagaatatcaaagtttgatttataacggtgattattatcgtttggcaaatccatttgaggatgggatgtcagcatggtcctggatatcagaagataagaaaatcatattggttcagggtgtattgttccgtgcgaaaccaaatgtattaagaaagactctgcgtctgatgggcttagaagctaagaaaaattataagattgccggaacagaagaggtgtacacaggtgttgctttgatgagtggaggagttttacttcaaagagcggttggagatgatgtctcttttgaaattgtgctggaagaaatttaa

SEQ ID NO: 603 - DNA, 2109 bp, Firmicutes bacterium CAG:227
atgagagacagaaaaaaagcaagagaacgggcagaagcactggtttcacagatgacagtagatgagatggcaagtcagttaaaattcgatgctccggcaattgaaagacttggaattcctgcatataactggtggaatgaaggacttcacggagtagcaagagccggtacagcaaccgtattcccgcaggcaatcgcaatggcggcagcgtgggatacagatttaatgaaggcagaggcttctgttatttcagaagaagcacgtgcaaaatataatgagtctataaagcatggagacagagacatttacaaagggcttactttatggtctccaaatgtaaatatcttccgtgacccaagatggggaagaggacatgaaacttatggggaagacccgactttaacatccagacttgcagttccatttatcgaaggactgcagggtgatggagaatatttaaagacagcaggatgtgcaaaacattttgcagttcattccggaccggaagcacttcgtcattctttcgatgcaaaagcaaacaagaaagatatgtatgaaacctatcttccagcttttgaagcctgcgtaaaagaagcggatgtagaagcagtgatgggagcttacaaccgtacaaacggagaaccgtgctgtgcaagtgaagaactgatggaacatattcttcgtgaagactggaaatttgaaggtcattatgtatcagactgctgggcaatccgtgattttcatgaacaccatatggtaaccaaaaacggtgtagaatcttcagcactggcattaaataaaggctgtgacttaaattgtggctgtacttatctgtgtttaaaagaagcattaaataaaagactgactacaaaagaaaaagtaaaagaggctgcaatccgtctctttactacaagatttttgcttggaatgttcgacgagactgaatttgataagattccgtatacagcagtagaatccaaagaacatctggaactttccagaaaagcagcagaagaaagcattgttcttcttaagaataatggaatcttaccgctcaaaaaagaagaacttaagattatcggtgttatcggaccaaatgcagataacagaagctctctggatggaaattatcatggaacagcttcccgttatattacagcacttgaaggaattcaggattatgtcggcgatgatgtaagagtcatgtatgcaaaaggaagtcatttatttctggataaagaagaagcgcttgcacaggaagatgacagaattgcagaagcactcagcgtagcagagcatagtgacgtggttgtactatgtattggtctggacgaatcacttgagggagaagagggagataccggaaatgcttatgcgtccggagataaagagaatcttgaatttccaaagagtcagcagagactgatgcatgcagtattagaaaccggtaaaaaagtaattgtatgcaactttaccggaagtgccatgaatctttctgaagcagaagaaaaagcagaggcagtcattcaggcatggtatccaggttcacagggtggaaaagcactggcaaatatcttatttggcgaagtttctccaagtggaaaactgccgattaccttttatcgtaccttagatgaactgcctgatttcacagattattctatgaaaggcagaacttatcgttatctgactgaagaaccattatatccatttggatatggtttaagctatggggatgtgcaggtggaaaaagcagaatttgcaaaagcacctgaaaaagagcaggatgctgaaattcgcgttaccgtgaaaaatcattctgaagtagcaacaagagatgtagtagaagtgtatatcaagaatcaggattccaagtatgcaccggtaaatccggctctgtgcggatttgcaaaagtttctcttggagcaggggaagaaaaagaactgaccattacagtttcaaaagaagcttataaagtcgtaaatgacgaaggagaaaagatttttgattcttcttccagtattctctttgtcggaacaaacggtccggataagagaagcgaagctttaacaggaaagacaacaaagcagttagtaattaactggtaa

SEQ ID NO: 604 - DNA, 1257 bp, Firmicutes bacterium CAG:227
atgaaaaaatcaatgtttactctgcttatgacaggagtgctgtttgtaggaggggcagtaccggtacaggcagacagcgagaagtatcaggtggatgaaattaagtccattcaggatggaattgtttcctgggaaaaagaccagatgggaattgatgggaaaaatcttctggatggcgtagtactggagagtgcgggaacttcagcaggagactggcttgcatttacagtcagcagaatggaacagccggataatcaaaatggttatcttagtgcactgcaggaacagatagaaacactgtatgaagatgatattacaaaaacagtggaagaacagcacatgaatccgacagatttttaccgggaaattttgacaataaatgcctgtgggggagatgcccttgcttttggcacagataaagataaaaaagaaatcaatctggtagaagatgggatttttgactgtgtgtttgaaaatcaagatcctggagtacagggcgcaaatggttatatctgggcactgcttgcattagacagtaaagattatgaagaaccggaagatgctgtctggaatcgtgaaaaattagtggatgcgattctggaaaaagagcaggaagatggaggattttcactttccacagatggagattccgatgtggatatcacagcaatggcactcacagcactggctccgtataaagatgaggaaaaagtaagtacggcaattgaaaatggattttcctggctttccagtcagcagcaggcagatggagcaatgccatctatgggtgtagaaagtgtagaaagtacagactggacgctgattgcagtatgcagtaatgacatcaatccattagaagatgcccgtttcttaaaagaggaaaacagtctgttagacggaatcttacagtttcggacagagaatggaggaatggctcattctctggcagaaaatgaaaatgcaccagatgcgatggcaggatatcagacgctttatgcgcttgaaagttataaaagatatcagcagggagaaaataccctgtttgatttaacggatgcgcagagtgtagataacagtgcaccacagcaggagacttctaagctgggacagatggcgggaatcctgattgcgctggctgtgcttatcctgattgtggttgttgtgcttgtaatccgaaacagtcataataataaaaaacaaaaagaagtaaaattaaaaaaagtgcaggaagcagaagaacaagatgactggaattaa

SEQ ID NO: 605 - DNA, 1593 bp, Firmicutes bacterium CAG:227
atggaaaccattacatttgaagaactcggcttatgtcctgaaattgaaagagcagtccgttttatgggatttgaggaagcttctccaattcagacaaaagcaattccggctattatcagcggaaaagatattatcggacaggcacagaccggaactggaaaaaccgctgcatttggtattccacttcttcagaagatagacccgaaaaataaaaagcttcaggcaattgtactttgtccgacaagagagcttgcaatacaggttgcagatgaaatccgtaatcttgcgaaatatatgcacggaatcaagattcttccaatttacggtggacaggatattgtgaaacagattcgttctttaaagaacggaactcagcttgttatcggaactccgggtcgtgtgatggatcacatgcgcagaaagactgtaaagatggaccatattcatacagttgtgcttgatgaagcagatgaaatgttaaacatgggatttcgtgatgatattgaaactattttaagtggtgttccagaagaacgtcagactgttttattttctgcaacaatgccaaaaccaattttggaaatcacaaagaaataccagaatcatgcagaactgattaaagtaaccaaaaaagagctgaccgttccgaatatcgaacagttttattatgaagtaaaaccaaaaaataaagaagaagtgttatcccgcttattagatatttattctccaaatctttctgttgtattttgtaatacgaaaaaacaggtagataatctggtaacagctttaatcggaagaggatattttgcagccggattacacggagatttaaaacagtctcagcgtgaccgtgtgatgcagagtttccgtaccggaaaaacagagattcttgttgcaacagacgtcgctgcacgaggaattgatgtcgatgatgtcgaagctgttttcaactatgatttgccacaggatgaagaatattatgtacatcgtatcggtcgtaccggacgtgccggaagaggcggacatgcattttcttttgtcagcggaaaagaaatgtataaattaaaagaaattcagagatactgcaagacaaagatttatgcacagaaagtgccgtctatcaatgatgttgcaaacactaagatggaacatatccttgcaaaggcagattcagtaattgagcgtgaaaatctttctcttatgttagatgctatcgaagaacgtgtcaatgcgtctgattatacgacaatggatatggcagcagccctgcttaaaatgtatatgggaatggtaaaagaagaaaccgaagaggaagaaataacagattttggagataccggtgcagaagaaccgggaatggttcgtctgtttatcaatattggtaaaaaacagaaaattcgtccaggtgatattttaggcgcaatcgccggtgaaagcggaatgcctggaaaattaatcggaacaatcgatatgtttgataaatatacctttgttgaagtaccaagagaatatgcctcagaagtcttaaaagcaatgaagagtgcaacaatcaaaggaaatcatattgcaattgaacctgcaaatcgtaaatag

SEQ ID NO: 606 - DNA, 1188 bp, Firmicutes bacterium CAG:227
atgaaaacaattcgggtagaagaattagaacagttaagtgcagatgagattcaggtgattgacttgcgtccggaggaagaatacaaaagaggaagttttccgggtgcagtaaatctgccgatggaagagtttgattcacgatatgaagaagtgctggaaaaagaaaaaccaatttactttatctgtcataccggagagagaagtaaggattatattgaaacagcgacaaaagccggatacaatgcttttaatgtagaaggtggatatcgtgcttatctgcgtctttctttaagtcgttttctggaagaagatacaaaagaaagcaaagaagaaaagacaaaagaaattgagagaagtattattaagaaatttcggaaatccatctggcgtccatttacaaaagccttaaatgaatatcaactgattcaggagggagataaggttgcagtctgtatctccggtggaaaggattccatgctgcttgcaaaactgattcaggaattaaaacgtcatggaaaaattcattttgaagcagtttttcttgtaatgaatccaggctataatgaagataactggaaaattattcaggataatgcagatttacttggaattccacttactgtatttgaaagtgaaatttttgatacggtagcaacaatcgaaaaaaatccatgttatttatgtgcacgtatgagaagaggctatctgtattctcatgcaaaggcattgggatgtaataaaattgcactgggacatcattttgatgatgtaatcgaaaccattttaatgggaatgttatacagcggaaaagtagaaaccatgatgccgaagctgcacagccagaattttgagggaatggaattaattcgtccattatacatggtaaaagaagatgcaattaaagcatggagagattacaacggactgcattttatccagtgtgcatgtcgttttacagaaaactgcgtcagttgtggcggaggcagaggttcgaaacgtgatgagatgaaagaactggttgcgcagtttagaaagaccagcgatgtgattgaaaccaatatttttaacagtgtccgtaatataaatttaagaacggttatcggttatcacaaagacaaagaagcttacaattttctggatgattatgatttgcgcggaagtaaaaagagtgacagtcaggaagagtaa

SEQ ID NO: 607 - DNA, 2145 bp, Firmicutes bacterium CAG:227
atggacattattttagctttgaccaaagaactaaatgtggaaaagtggcagatagaggctgccgtaaaattgatagatgaaggaaatacgattccatttatttcccgttaccgaaaagaagtaaccggtgctttaaatgatgaagtgcttcgtaatttaaacgacagactgacttatcttagaaatctggaagagaagaaaactcaggtgctttccagtattgaagaacagggaaagctgactgaagaattaaagaaacagattttagaagcgcagacgctggttgtggtagaggatttatatcgtccataccgtccgaaacgtcgcaccagagcaacgattgcaaaagaaaaagggttggaacctcttgcaaacattattttattacagatgacagacaaatcccttgaagaagaagcgaagacatttgtctccgaagaaaaagaagtggcaacagtggaagcggctatttccggtgcaaaagatatcgtagcagaaagtatttccgataaagcggactaccgtagtgaaattcgtgagcgtactttcaggaaaggcatgctcgtttcaactgcaaaaaaaccggaagagatgtctgtttatgagaaatattatgaatatgaagaacgtgtggaaaaaatgccgggacaccgggtgcttgctattaatcgtggagagaaagagaagtttttaggtgtaaaaattgaagctccgacagaagaaattttaggatatcttcaaagagagattattacaagaaaaaatccaaatacacaggatgtattaaaagaagcaatcgaggatagttataatcgtctgattgcacctgcaattgagagagaaatccgaaacagcatgacggaaaaagcagaagatgaatccattaaagtctttaagaaaaatcttcagcagctgttgatgcagccaccaattgttgggaaagtagtgcttggatgggacccggcgtttcgtaccggttgtaaacttgcagtggtagatgaaaccggaaaagtcttggatacggttgtgatttatccgactgcaccgaccactcctgctaagatcgcgtcggcaaaagaaactctgaaaaaattaattaaaaaatacaatatcagcctgatttctcttggaaatggaaccgcttcaagagaatccgaacagattattgtggaacttttaaaagaaattccggagaaggttcagtatgtaattacaaacgaggcaggagcttctgtatactctgcaagtaaactggctaccgaagaatttccaaactttgatgtaggacaaagaagtgccgcttccattgcaagacgacttcaggatccgcttgcagagctggtaaaaattgacccgaaatctataggtgtcggacagtatcagcatgatatgaaccagaaaaaattaggggaagccctgtctggagttgtagaggactgcgtgaataaagtcggaattgatttaaataccgcttcggtttccctgcttgaatatatttccggtatcagcaaagcgattgcaaaaaatatcgtagcataccgtgaggaaaatggacgttttgagagtcgaaaagaacttttaaaagtaccaaaattaggaccgaaagcgtttgaacagtgtgcaggtttccttcgtattacagggggaagcaatccgcttgatgcaaccagtgtgcatccggaaagttatgaagtagcagaaaaatttctggaaaatatgggaacaactgcagaagatattttcaaaggtcatggtgcattttatgtaaaagattatagaaagatggcagagtctcttggaacgggagaaatgacccttcgtgatatcgtaaaagaacttggaaaaccaggacgtgacccaagagaagaaatgccaaaaccggtgcttcgtactgacgtgcttgatatgaaggacttaaaagaaggcatgattttaaaaggtacggtgcgaaatgtaatcgactttggtgcatttgtagatatcggagtacatcaggacggactggtacacatttcacagatgacagaccgatatatcaaacatccacttgaagcagtcagcgttggagacatcgtggaagtcaaagtgttaagtgtggatgaaaagaaaaagcgaatttcccttactatgaaaggaattcagtaa

SEQ ID NO: 608 - DNA, 1410 bp, Firmicutes bacterium CAG:227
atgcataaaatgtggtatcctaaccacgataacacaaaaatttttaacaatacaagggttaatgaaattatgatgaatatacgaagattaatagccatctggagcggtcgtctgattaaaaccgcctgccagattaccggaaaacagggtgttacgctcgccggaaaagtcgcactctccatttatccgccaatcttaaaagaactggcagccgaagtgcgaaaagacacttttattgtatgtggtacaaacggaaaaacaactaccaataacctgctttccgattttctcgtctcaaacggaaataaagtggtctgtaatcacaccggttctaatatgttaaacggtgtagtatctgcctttgttttaagcgccagattaaatggacacttagatgcagattatgcctgtattgaaattgatgaagcttctactgtccgtgtgcttcctcatttcaaaccggactacatggttttaaccaatctgtttcgtgaccagcttgaccgctatggagaaattgatatcactatgaatctgctctcccgcgccatgaaaatggcaccaaatatgaagcttttagtcaatgccgacgattccctttctacttacctggcaatggataataaaaatccatataccacttacggaatcagcgaacaggtattcaaagaccagaattccaaagagatccgtgaaggtcgtttctgtaaacgctgtggtcacaaaatggaatacaaattttatcattacagccagctcggggattattactgtccgaaatgtggattcaaacgtccaaaaccggaatttgatgcttcccacattgatatgtccgacggacttgcttttgatgtaaaagcctcccatatcaaagccaactatcgtggattttataatatttacaacattcttgccgtatttggcgcagcttccatggcaggaatcccaacaaaaaactttaataaagtgcttggagattacactccgcagtttggacgaaacgaacagttttttatcaatggcacgaaagttatgttaaaccttgccaaaaatccggctggatttaaccagaacatcggtgcagtcatgactgataccagtccaaaagacattattattctgatcaatgataacagtcaggatggaacggatgtctcctggctctgggatgttgactttgaccgtttaaaagatgccaatgcaagctctatcaccgtaacaggaattcgaggagcggatatgcgtctgcgtctgaaatatgttgacattgcttctgatttagaaaatgatattgaaaaagccattgaatccaaaattaaaaatggcacaaagaatctttatgtactggttaattacaccggactttactctacacacaatattttaaagaaaatggagggaaaaaagtaa

SEQ ID NO: 609 - DNA, 1443 bp, Firmicutes bacterium CAG:227
gtgaaaaagattttatttgtggcatcagaagcagtgccttttataaaaacaggagggctggcagatgttgtaggggcattgccaaagtgttttgacaagaacgaatatgatgtgcgggtgattattccaaaatatatgtgcatgaaagaagaatataagaatcagcttcagtatgtaacacatttttatatggatattggttaccgcagagagtatgttggaatcatgcagatggtatatgagggaatccagtattactttatcgataatgaatattatttttcaggttatcagccttacggagatattcgatttgatattgagaaattctcttatttttcaaaagcagctttatccattcttccggttattgacttcagaccggacttgattcactgtcatgattggcagaccggattagtgcctgtattcttaaaagaccgtttccaggatggtccgttctatcagggtatcaaaactgtcatgactatacataacttaaaattccagggaacttgggatattaagacaatccgtgatttaaccggacttccggcatattactttactccggataaactggaatcttataaagatggaaaccttttaaaaggcggtctggtttatgccgatgcaatcacaaccgtaagtaatacttatgccgaagagattaagacagaattttatggtgaaaaactggatgggctgatgagagcgcgtgcaaatgacctgcgtggaatcgtaaacggaattgattatggtgaatggaatccagagacagatcagttgatcgcaaagaattacaatgcgaaaacatttcgtaaggaaaaagtaaaaaataaaatagagctgcaaagagaacttggtttaaatcaagacccgaaagccatgatgattggtattgtctctcgtctgactgaccagaaaggttttgacctgattgcttatgtgatggatgaattatgtcaggataatattcagttagtggtacttggtacaggggaagaacagtatgaaaatatgttccgtcactttgcatggaagtatcagggaaaagtatctgcaaacattttctatgataatgcaatgtcccataaaatttatgcttcctgcgatgcattcttaatgccgtctctgtttgagccatgtggtttaagtcagttaatgagccttagatatggaacgattccgattgtaagagaaactggtggattaaaagatactgtagaaccatataatgaatatgaaagtaccggaaccggattcagcttcacaaactataatgcacatgaaatgctggcgaccattcgttatgcagaagctgtttactatgacagaaaacgcgaatggaacaagctggtcgaccgtgcgatggcaaaagatttctcatggggaaattcagcaaaacagtatgaagaaatgtataattggttaatcggttaa

SEQ ID NO: 610 - DNA, 1245 bp, Firmicutes bacterium CAG:227
atgaaaattgtggatgtagtttgctcaaaagcaagaacaggatttttctttgatgaccagagagccatcaaaaaaggtgcagtagcagatggtgcggcttattttggagaaaccgtaacaccgggatttaaatccgtaagacaggcaggagaagcaatctctgttatgttaatccttgaagacggacagattgcgtggggtgattgtgcagccgttcagtattcaggagcaggcggaagagaccctctcttccttgcagaagatttcattccgattatcgataaatatatcaaaccggaactggttggaaaagaagcagacagctttaaaggactttgtgaaatggtagaaaaccttcaggtagaaggaaagagacttcacacagcaatccgttatggtgtcagccaggcgattcttgatgcagtagcaaaatctacaaaacgtctgatgtgcgaagtagtagcagacgaatatggtacaactgtatctgataaaccaattccaatctttacacagtccggtgataaccgttatgataactctgataagatgattttaaaaggtgcagccgttatgcctcatgcattaatcaataatgtaaagacaaaacttggcgaacatggtgaaatcttaaaagaatatgtagaatggttgagagatcgtgtattaaaacttcgccatgatgaaagttatatgccggtattccatatcgacgtatatggaacaatcggtgcaatcttcggagtagataactttaccgctatggcagattatcttgcagaacttgaagaagctgcaaaacctttccatttaagaattgaaggaccgatggatgcagaagaaagagaaaaacagatgctttgcttaaaaggcttaagagaagaagttgataagagaggcattaatgtagaattagttgccgacgaatggtgtaatacattagaagatgtaaaatatttcgcagacaataaagcaggtcatatggctcagattaaaacaccagaccttggtggaatcaataatatcgtagaagcagttctttactgcaaagaaaaaggatttggagcttaccagggtggtacttgtaatgaaacagaccgttctgcacaggtttgcgtaaactgcgcaatggcaacacagccagaccagattcttgcaaaaccaggtatgggtgtagatgaaggttacatgattgtttataatgaaatggaaagaattattgcgcttcgtaaagcaagaagttaa

SEQ ID NO: 611 - DNA, 1518 bp, Firmicutes bacterium CAG:227
gtgaaaggagatttttttaaaatgaaagcatcaaaaaattataagttttggtttgcaacaggctcacaggatttatacggagatgagtgcttgagaaaagttgcagaacattccagaattatcgtagaagaattaaataaatcaggagtacttccttatgaagttgtattaaaaccaactttaattacaaacgaagtaatcagaagaactttcaatgaagcaaatgaagatgaagaatgtgcaggcgttattacatggatgcataccttctcaccggcaaaatcctggattttaggtcttcaggaatacagaaaaccactgcttcatctgcatacacagtttaatcaggaaattccttatgataccatcgatatggacttcatgaacgaaaatcagtctgctcacggagacagagaatatggtcatatcgtaagccgtatgggaattgaaagaaaagttatcgttggacattggagcgacaaaaaagttcaggaaagaattgcttcctggatgcgtacagcaattggtatcatggaaagcagccatatccgtgttatgagaatcgcagataacatgagaaacgtagctgtaacagaaggcgataaagtagaagctcagattaaatttggctgggaaattgatgcatatccggttaatgaaatcgcagaagcagtttcagcagtatccaaagctgataccgatgctttagtagaagaatactacagcaaatacgacattctcttagagggaagagacccggaagaatttaagaaacatgtagctgcgcaggctcagattgaaatcgggtttgaacgtttcttagaggagaaaaactatcaggcaatcgttactcattttggagatttaggatccttaaaacagcttccgggtcttgctattcagagattgatggaaaaaggttatggattcggtggagaaggtgactggaaaacagctgctatggtgcgcctgatgaaaatcatgactgccggaatgaaagatgcaaaaggaacttcctttatggaagattatacttataatttagtaccgggaaaagaaggtatcttagaagcacacatgttagaggtttgcccgactatttctgatggtccaatcagcatcaaagtaaatccgttaactatgggtgacagagaagaccctgcacgtttagtatttacatctaagacaggttcagcaattgcaacttctttaattgaccttggaaatcgtttccgtctgattatcaacgaagtagactgcaagaaaacagaaaaaccaatgccgaaacttccggttgcaactgcattctggacaccaaaaccagatttagctacaggtgcagaagcatggattttagcaggtggagcacatcataccgcattctcttatgatatcacagcagaacagatgggagactgggcagcagcaatgggaattgaagctgtttatatcgatggagaaacaagaatcagagatttcaagagagatttacagcttggaagcctgttctacagataa

SEQ ID NO: 612 - DNA, 2661 bp, Firmicutes bacterium CAG:227
atgaagtacaatggtttatcagacaaggaagtcgaagagtccagaaagcaacatggctcgaatatgattcctgattcagaaccaaccacattttgggatgaattcaaggaaacttttagtgatccgatgattaaagttctgttagcaattgcagcccttatgattgcaatgtttttctttgggtatgctgagatttatgaaccattaggaacgattgttgcagttttaattgttgcgtttgtgtcagcaaagacaggtgttgccagcgatacaaaatatcgtgagttgaaagaaagtacagagaaagataaatgtaaagttcacagaaacggtgtaattaccattattgatgtggacgatgttgtagtaggcgacaaggtacttcttcagtctggtgataaaattccggcagatggtatcttaattgatggttctcttcgtgtcgataactctgcgttaaatggagaagcagaggaatgcaagaaaacacaggcagatgaatcattccagcttgcagatgaaatcacaggagataccttcgtagataaacattctcttttccgtggtgcaattgtatttgatggagagggaattttggatgtcagaaaagtcggcttgaaaacaatgatgggaaaaatggcagaagagatgcaggaagatgagccggattccccattaaaagtaaaacttgcgaaacttgcaaaacagatttctacctttggatatattggtgcaattgtaattgcagtgctctattttgcttattttattgttttggccggaggtccgtccgcttattttgcagagggatttgaaaatgttttaaaagatttaattcaggcggtttctcttgcaattgtaattattgtctgtgcagtacctgagggacttcctcttatgatttctctggttttgatgcaaaatacaagtaagatgcttgaccataatgtacttgtccgtaaagcccagggtattgaaacagcaggttctttaaatattttattcagtgataaaacaggaacgattacaaaaggacgactggaagttgttgagttcttctttggagatggaaaatcggttgctcttagtgagttaaaaaatcatggaaaagtaaaagggcttgtggatcttgcaattggaaagaatacgcagtctatgtttgatgcatctcataaagtaattggtggaaatgcgacagaccaggcattgatgaaatttatcggagaatctactttccgtgcacttgaaagtgataaagagtgtataattacacaacagcagggatttaactcttctaataaatttagtcaggctagaattgaaagtcttggaaagacattttataaaggagctccggaacgtttattgggagccgcaaagcattatctggatgcagacggaacagtaaaaccgctggatatggatgtagtaaataaaaagattgatgagttggcagtaaaagcaatgcgtgtccttgcttttggatattcagagagaactatgacggaaaataaaatcaatgatgatgttgtaattattggtttagttggaatccgtgatgatgttcgcccggaagcaaaagaagcgattgcagaagtgcagggtgcgggaattcaggttgttatgattactggtgaccgtctggaaacagccgttgcaattgcaaaggatgcgggtctgttaaaaaataaagatgataaggcactttcttctgcacagttaaatgagatgagcgatgatgaagtaaagaaaatcattcctcatattcgtgtcattgcaagagcacttcctacagataaatccagaatggttcgtctgtgtcaggaaatgaatcttgttgtgggtatgacaggagatggagtaaatgactctccggcactgaaacgtgcagatgtcggatttgcaatgggaagtggaacagaagctgcaaaagaagccggtgagattgttattttggatgataactttaagtccattaaagatgcaattttatacggaagaacgatttatcataatattttgaaattctgtaaattccagcttgtaatcaatgtgacggcagtagtggtcagtgcgattgcaccgttctttggtgtagaagaaccgttaaaagtaactcatttactgtttgtaaaccttgttatggatggtttgggcgcaatcatgcttggaaatgaaccggcacttgagaaatatatggatgaaaaaccaagacgcagagatgaaagcatcatcagtaaacagatgatgggacagattttaacaatgggtctttggcttacggttgtcagttttgtgtatttgaaagcaccgttctttaaaaatttatttgaaaacgaagaacagcatttaacaggatattttgtattattcatcgtaagtgctttgtttaatggatttaatgtaagagatgacggagctgaaattttcaaaggactggatttaaatccaggattcttaaaagtgttctttgcaattattttagtacaggcagtgattgtaaatgcaggtttgattccatttgtcgtatttgattggattggtgaaatgttcagttgtgttccatttggaattaagggctggattgcagcgattcttttagcggttactatgataccggtagatttaatccgaaaagcaattgtaaataaaaaacattaa

SEQ ID NO: 613 - DNA, 1326 bp, Firmicutes bacterium CAG:227
atgctaaatcctgtaatcgtagcagtaatcttactttgtgtattatgtctgctgaaaattaatgtattactctccatgctcgtatctctgactgtagccggtcttatcgggggtttgccggttgtcagctccggagatgaagtgagcattatgagctgcgttatcgacggattcagttctaacgcagaaacagccttagcatacgtattgcttggtacatttgcttcttgtatggcatacaccggcattacagaaatcttatctgttaaaattgcaaaaactgtaaagggtaacagatggcttttactgggaatcttattaatcattgcatgtgcatctcagaatatcattccgattcacattgcatacatcccgattcttgttccaccattactgagtatgatgaacaagatgaaactggacagacgtggtgttgcatgtaccatagcatttggtcacaaagcaccgtatatcgctcttccattcggatttggtctgattttcatgacaatcatccgagacaacatcaaccagaatgcagtagactttggatggaaaataacaattggtgatgttacaaaagtaaactggattcttgcagttgctatgcttatcggtcttgcaattgccgtattcattacatacagaaaacctcgtgaatatcaggatatcaaattagagggacagcatgaattagaaagcctgaaattagaatacaaacattggattacacttttagcagcactcgtaatcgtaattcttcaggttaaatttggttctcttcctgtagcagcattcggtggacttttagttatgttcatattcggagctgtaaaaattaaagatattgatgaacagtttaacggcggtatcaaattaatgggctttatcgcattcgtaatgcttatagcaggtggatttgcgaaagtcttaaacaacacaggtgctgtagaagaactggttgacagtgcaatcagccttatgaatggaaatacatgggttgcagcaactatcatcacattaatcggtcttttagtaacaatgggaatcggtacttctttcggtacagttcctgtacttgcagtactttacgttccgctgtgtcataagatgggattctcaccagcagcaactatcatcctgatgtctgcagcagcagctcttggtgatgctggttcaccggcttctgatacaacactcggacctacatcaggtctgaatgcagatggtcagcatgaccacatctgggatacttgcgtacctacattcctgcactttaacattccgttaatgattgcagcaatcgtagcagcacagttcgtataa

SEQ ID NO: 614 - DNA, 2040 bp, Firmicutes bacterium CAG:227
atgaatggcaatatcaagataaagggacagcttaagctgtatatgcagtggccggttatcatggtacttttactcctgcttatggatttgtgtattttccgcatcagtataaagggcggagtgattgcaacctgttttatagcggtgtatcttgcgatagcagtttttcagtatcataatagtcgggctgatatactcaatgagctgatttcttttgccacacagtatgggcaggtacagaaaagtctgttacgtgattttattgtaccttatgctttagtggatggcagaggaagaatcctgtggatgaatgaggcattttcacagttgagccagaaaccggtcaaataccacaggtcgattacaagcatttttcaggaaattacaattgaacgtctgccaaaggatgaatcttcagaggttctgtttcagtttgaaaacagagattacagagcttcgatgcgtaaaatttcaattgaggcaatgttagaagattcgggtttgattgaatcggatgcagataattttctgacggcaatttatatttttgatgagacagatgtaaatcgttataaaaaagaacgcgatgaagagaaactggtgacaggacttttatatctggacaattatgaagaggcgttaaacagtgtggaagaagtccggcgttcgctcttagttgcgttgatagagagaaaattaaataaatatttctccgagatggatggtctggtgaaaaagttagaaaaagataagtttattctgattttatgccagcgttcgttagaagagttaaaagaaaaacggtttagcattctggaagaggtaaaaagcattaatatcggtaatgatatggatgtcacaatcagtattggaattggaattaatggggcaaactatgtccagaattatgagtattcgagaattgcaattgatttggcgcttggacgaggtggagaccaggttgtcataaaagaccgtgatactatgatttactttggtggaaagtcacagcagatgggcaagacaacacgagttaaagcgagagtcaaagcacatgccttaaaagagtttatggtagcgaaagataaagttgtggttatggggcacaagatttctgatgtggattcaatcggtgcgggaattggaatttaccgtgcagcgaaatctttgaataaacgggctcatattgtagtcaataatccaaccatgtcggtgcgtccgattattgaaaactttattaataatccggaatacgatgagcacatgtttgtaaacagtgcagaggcaaaagaaatcgtagataacaatacggtagtcgtagtcgtagatacgaataaaccaagttatacggaatgtgaagacttattgtcaaagacaaaaacgatagtggtattagaccatcaccgtcagggtgcagaggttatttccaatgctgtactgtcttatattgagccgtttgcttcgtctgcctgcgagatggttgcagagattctgcaatatttttcagatggaattcgaatttataatatcgaagcggatgccctttatgcaggaattgtaattgatacggataacttcacttcaaaaacgggagtccgtacttttgaagcagctgcatttttacggcgctgtggcgcagatgtaacccgtgtaagaaaaatgttccgtgatgatgtcagctcttatcgggcaaaggcagagacagttcggacagtggaaacttacagggattcgtttgcaattggaatctgcccaagcagtggactggatagtccgactatcgtagcagcacaggctgcaaacgaactgttagatattgatagtataaaagcatcatttgtattgacggattataacaatttgatttatattagtgcaagggcaattgatgaggtaaatgttcagctgattatggaacggctgggaggtggcggtcatattaacgtggctggtgcacagttgaaagatgcaacggtaaatggagcaattattcaattgaaagatacaattgaccagatgattaaggaaggagcaatttaa

SEQ ID NO: 615 - DNA, 2109 bp, Firmicutes bacterium CAG:227
atgccagagcgggaggttgatatggcaaagtatttagtgatagtggaatcgccggcaaaagtaaagacaataaaaaaatttttaggttccaattatgaagtcatggcatcaaacggacatgtaagagatttgccgaaaagccagttggggtttagtgtagaaaatgattatgaaccaaagtatataacaattcgcggaaagggtgacattttagcagcacttcgaaaatctgcgaaaaaagcagataaagtttatcttgcgactgaccctgaccgtgagggagaagcgatttcatggcatctttcaaaggcattgaagttagatgataaaaaaatgcgtcgtattacctttaatgaaattacaaaaacagcagtcaaagcttctattaaagaggctagagagattgatttaaaattagtggatgcacagcagaccagaagaatgttagaccgtatggttggatatagaatcagtccggttttatgggcgaaagtaaaacgtggattgagtgcaggacgtgtgcagtctgttgctcttcgtattattggagacagagaagaagaaatcaatgcatttataccggaggaatattggactttagaggcacagtttgcggtaaaaggtgagaaaaaaccgctgactgcaaaattttatggaaaaaaaggacagagaatcaatattcattccaaaggagaactcgatgaaattttaaaaaaccttgagggtgcaagctatgaggtggatgaagtaaaaaagggagagcgtaccaaaaaagcaccatttccatttactaccagtaccttacagcaggaagcctccaaagtgttaaacttctcgacacagaaaaccatgcgtcttgcacagcagttatatgaaggaattgatatcaagggaaatggaacagtcggtgtgattacttatctgcgtacggattcaacccgtatctcggatgaagcccagaaagcagcacaagagtatattacagaacagtatggagaagaatataccaaagtaactgagaaaaaagatagtaataagaagaaaattcaggatgcgcatgaagcaattcgtccaaccgatattacaagaaccccgatttctttaaaagagtctttaaccagagaccagttccgtctgtatcagttaatttggaaacgttttaccgcaagtcagatgcagcctgcaaaatatgaaaccacttccgttaaaattaaaggcggagagtattattttacaacatctgcatcgaaattaaaatttgatggtttcatggcagtttatgtgcaggaagatgatgaaaaatcagataagacggttttgacaaaagggctcgatgagacgagtgagctgacatttgagaaatttaacgaacagcagcattttactcagccaccggctcattatacagaggcgactcttgtaaaaacattagaagaacttggaattggacgtccaagtacctacgcaccaaccattactacgattattgcaagacggtatgttgcaaaggaaaataaaaacctttatatgacagaaattggtgaagtagtcaataatattatgaaaacttctttcccaagtattgtagatgtacattttacggcaacaatggaagaactgctcgacagtattgcagaaggattgattgagtggaaaacggtaattcgcaatttctatccggatttggatgaggcagtaaagacagcagaaaaggaacttgaagaagttaagatagaagatgaggtaactgacgtaatctgtgaacagtgcggaagaaatatggtaatcaaatacggaccgcatggaaaatttctggcttgccctggatttccggaatgtcgtaataccaaaccatatctggaaaaaatcggagtaccgtgtccaatctgtggaaaagaagtagtaatgcgcagaagtaaaaaaggacgccgttattatggctgtgaaaacaatccggaatgtgaatttatgtcctggcagaagccatccaaagaaaaatgtccaaattgcggtggatatatggtagaaaaaggaaacaaactggtctgtgcaaatgaacagtgtggatttgtgaaaatacagccgaaagacaaagtcgaagaggcttaa

SEQ ID NO: 616 - DNA, 1710 bp, Firmicutes bacterium CAG:227
atgagtgaagaattcaagaatgaatttgatgaaaataaagaaacagagacagataatgtaaatatgcaggaagaaacagagactgtttttgaagataatgcatctgagacggaaaaaacaacaaatgaaagtgcagtgacacaagaaccgggaaatgcgccaacaccggaaaatccggtttatgcaagagcataccagccgcatgaacagcgggagtccacaaaagaagagtggtatcaggaagcacagcaggaacagaaacagcagcaaagttataatgcttatcagtttactgctccggaatcaaagaagccaaacagatccggaaagaagttaaacggacaaggcagaaaatttggcacagtcgttgcgacagcggttgtgtttggtctggttgcaagtgcagtttttcaggggacaaattatgtgggaagtaaattaaatccacagggaaaaaaatctgttcaggtacagtctacacagacaatcagtcaaaataaatcatctgattcagaagaaagtgtatcaggaagcactgagggaacttcaagcgtaagtcaggttgcccaaaatgcaatgccgtcaattgtatcgattgtaggagtcagcgttcaggagattccacagatttatcagtactttggatatggacaacagcaggaaactcagagcagtggttctggaattattgtaggacaaaatgataccgagcttttgattgcaacaaataatcatgtagttagcggaacaaattctcttaccgtgtgcttcacaaatcaggacggaagtgcagtaaccggaaatggtgacgtggaaaagaccagtgccgaaggtgaaagcggcagcacaaatcaggatggtcaggacagcagtttggatgatgttcaaagcggcgcggtatctgcacagattaaaggtacggatgcagataatgatcttgctgttatttcagtaaaattggaggatattccggaagatgtattaagtgagattaaagtggcaacaattggagattctgattcccttcagatgggtgaacaggttgttgcaattggaaatgcacttggatatggtcaatcagtgacaagtggttatgtcagtgcattaaaccgtcaggtaagttcagatgatacagatggaacttttattcagactgatgcagcaattaaccctggaaacagtggtggtgcacttttgaatatgaaaggtgaactgattggtattaactctgcaaagattgcttctgatgaagtggaagggatgggatttgcgattccgatttcaaaggcagaaccaatccttgatgagatgatgaatcaggaaacccgttacaaagtagaagatgaagataaagcagcatatattggaattacctgtgaaaatgtaaccagtgatgtcaaccagatgtatggaatccctcagggagtttatgtagatactgtagtagaaggtggaccggcagaagaagcaggaatcaaaaaaggtgatgtcattactaagattgatggtactgcgattgatgcatacaaagatttggtagacagactggaatactatgaagccggagaaaccgtagaattagaagtttaccgtgcacaggatggagaatataacgctcagaaaatcagtgtgactttaggagcaaagaaagatgcgccgagcacaaattcttcttctaatcagcagcaaaatgaaaaaaataataaatag

SEQ ID NO: 617 - DNA, 984 bp, Firmicutes bacterium CAG:227
atggaattggaaagaacaccaatttatgagatttttgacagaaaacagtcgggaaatcagctctatatcatgagagaagatttactgccattttcacttggaggaaataaagtaagaattgcgaatgccttttttgaagatatgcagaaaaaaggttgtgatattatgattgcttatggaaatgtgcgctctaatttatgcagggtgattgcaaacgaatgtttcagaaaaaagattccctgttatatgatttgttcatttgaagagggcgaaagtgaggaaaaagagacaagcaacagccatttgatgcagatgcttaaggtaaaaattgtaaaatgtagaaaaaatcagattgcaaagacagtagaggcaacgatgaatcggttaatacaggaaggacacaaaccgtattatatctatggaaataaatttggaaccggaaatgagggagtttctgcttctgcttatgcaaaagcttatcaggagatcttgaattttgagaaaaaccaagggattttctttgattatatttttcatgcatcgggaacaggagcaacacaggcaggtctgacttgtggacatcttttggcgagagataaaaagcagattgtcgggattttgatttcctcaagagagtatgaacgtgcggtttcgattattgaaaccggaataagagaatacttaaaaggacttggaaaagagttttccatggaagaccaaaaagaaatccatctggcaagtgagtatacaaaaggtggatatggacagtatgatgaggaaattgagcagtgtatccgtgaggagtttgccttaaatggagtggcaatggatggaacttataccggaaaagcatttcttggaatggaacactatatcgaagaacatcagatttctggaaaaaagatattattcattcataccggaggaacacctcttttctatgactggcttggtacacaaaaaaaagatttaggaaggttataa

SEQ ID NO: 618 - DNA, 1410 bp, Firmicutes bacterium CAG:227
atgattaaggtgtacctgtcgggggtgcacctttttttattagctaaacatcttcaaacaaaagcttatcaatcaaatgcgaaaggagaatcaaccgtaattatggaatacacaacacagatggatgccgcaagaaaaggcattatcacaaaagaaatggaaatcgcagcaaaaaaagaaaacatggatgtcaaagaattaatggaatatatggcaaaaggtcaggttatcattccttgtaacaaactccatacttcaatcgaaccaaacgctatcggttctatgctcaaaaccaagatcaatgtaaaccttggaatttccagagactggaaagacatggatatggaaattgaaaaagtaaacaatgcagtcaaaatgggggctgaatctatcatggatttaagttcttacggagatacccgcaccttccgtaaacgtcttaccaaagaatgtccggctatgatcggtactgttccgatttatgacgcagttgtttattatcacaaaccattaaaagaaatcacttccaaagaatggattgatattgtgcgtatgcatgcggaagatggagttgactttatgaccattcactgtggtatcaataaagccaccgcaggacgtttcaaagcaaaccgtcgtcttaccaacatcgtttcccgtggtggttctatcatttttgcatggatggaaatgaccggtgaagaaaacccattctatgaacattatgatgaaattcttgacatttgtcgtgaatacgacatcactatgagtcttggagatgcctgccgtccaggatgtttaaaagatgcttctgatatctcccagattgaagaacttattactttaggcgaactgactgcacgggcatgggaaaaagacgtacaggttatggtagaaggtcctggccatatgccaatgaaccagattgccgcaaatatggaaatccagaaaactatctgcaagggtgcacctttctatgtactcggacctttagtaacggatattgctccaggctatgaccatatcacagctgcaatcggtggtgcaatcgctgctgcatccggagcttccttcctctgctatgtaactcctgcagagcatctgcgtctgccaagccttgatgatgtaaaagaaggcatcatcgcttccaggattgcagcacatgccgcagatattgcaaaaggcgtaaaaggtgccatcgaatgggatcaccagatgagccttgcaagaaagaaattagattgggaggaaatgtttgatatctgtattgacccggaaaaagcaagacgctaccgcgccgaagccaaaccggaaaaagaagatacctgcagtatgtgtggaaacttctgtgctgtaaaaaatatgaaccgtatcttagatggggaaattgtaaatatttacgatgaatga

SEQ ID NO: 619 - DNA, 1551 bp, Firmicutes bacterium CAG:227
atgaaacagaatgatattgttatcgtattagcggcatttgcagcttacctgatattaatggtagttgtcggtgcggtttatatgaagaaaacaaaaaactcggaagattatttccttggtggacgtggactgagcggatgggtggctgctttgtctgcacaggcatctgatatgagtggctggctcttgatgggattgccgggaaccgtttatgcacttggaaccggtcaggcatggattgctgtcggtttgtttttaggaacggtgtttaactgggtctgtatctcttctcgtctgagacggtatacaattgttgcaaataattcattgacacttccggcttattttgaaaaccggtttcgcgataaaaaacgtgtattacttttagtatcttcgattgtaattgtagtattctttctggtttatacggcatctgctttatcagccggaggaaaattatttcattccgtatttggaattgattatcacattgcacttgcaattggagcagttgttattcttgcttacacgtttatgggtggttttatggcagtttgtgtgaccgattttattcagggaagtctgatgctggttgggctgcttgccgtacctgtgcttgcgtattgttttattggaagtggaaatttaaatgccatgttagatgaaagccaggtcattggcggacatcaggcatatttaagcatgacaagaaatggagaaagttcttattcttttatcgaaattttctctcagcttgcatggggactgggatattgtggaatgccgcatattttgacccggtttatggctgtaaagaatcaaaaagaattgaaaaaatcaagagttattgctattatatgggtagcactgtctctctttgcagcagtggcaatcggtgtgcttggacgagcttatctgtatccggttattttaggaacggaaggtcaggcttccgcagaaagtgtatttattgagatgattacgaagatatttacacaggatttacgtctgccgtttatcggtggagtattcttatgtggaattttggcagcaatcatgtcaactgcggattctcagctcttagtcaccgcatcttcggtttcaaaagatatttataaggatattttaaaacctcaggcagatgaaaaaacagtattaaaagtaagtcgtgttaccgttatcgtggttgcagtgctggcatttgcaattgcatggaatccgaacaacagtattatgggactggtatcaaatgcatgggctggtcttggttctgcatttggtccgattgtactgatgtcattgttttggagaagaacaaattttgcaggcgcagttgccggaatcgtgtcaggaggattaaccgttattatctgggattatattccgttcattaatggacagactctgggtactgcaactggtttatactctcttgcaactggttttgtaatcagcattttgtgcattgtgattttcagtttgtgtacaaaagctccggagaaagaaatcttagaagagtttgacagagtcaaaaaaatgaaagaagagtaa

SEQ ID NO: 620 - DNA, 1731 bp, Firmicutes bacterium CAG:227
atgaaaacagtattagttgcaattaatgcaaaatatattcattccaatctggcggtttatagcctgcgttcttatgcaagaacctttggttatgaaccgaagttattggaatttacaattaaccagcaaaaagaccagattttaaaaggaatctatgaggcaaagccggacttgctttgtttttcctgctatatctggaatctttcttatgcagaagagattatagaggacatcaaaaaaatcctgccaaaggttacgatttgggcgggcggaccggaagtgtcttatgacgcacccaaatttttaaaacgacatccggaagtagatggaattatgtgtgccgagggagagaaaacactgacagaattaataagctattatgaaatcggaaaaagtcagggaaaatccttagatggaatcaatggaatcgtgtatcaggaaaacaagacgatccatcagacaccgcttagagatatcatgaatatggatgatttagtttttccttatgaagatttaaaagatttcgagcataaaattatttattatgagagcagtcggggctgtccattttcctgcagttactgtctctcttcaattgacaaaaagttaagattccgcagtttttctctggtggaaaaagaactggaatttttccttgcgcacaaagtaccgcaggtaaaattcgtggaccgtacctttaactgtaagaaaagtcatgcgatggcaatctggacttatatcaaagagcatgataacggaattacgaattttcattttgaggtagcagcagatttattaaccgaggatgaaattgctctgattcagacgatgcggccaggattgattcagcttgaaatcggtgtgcagtccaccaatgaaaagacccttgcggaaatccatcgaaagactgattttgaagaaatcacaagaaaagtaaaagcggtacaaaaaggagagaatgtacatcagcatctggacttgattgcaggacttccttatgaaaattatgagagttttggacattcctttaatgatgtctatgcgttaaaaccggaacagcttcagcttggatttttaaaagtcttaaaaggttcttatatggcagaggcagcggaaggatatggctgcgtgcataaggcaaaaccaccttatgaagtgcttggaacacgctggctctcttatgaagagattttaaagctaaaaggcgttgaggaaatggtggaagtttactataacagcggtcagttccagaaaaccatccgtgctatggaatacttatttgaaacggccttttcgatgtatgaagaactggcagatttttatgagaaaaacggttataacgaggtttctcataccagaatccgtcgttatgaaattttacaggaatttttacaggaaaaagaagcaaatctggaatattttaaacagcttatgatttttgacttatatgcaagagaaaatatgaaaacaagaccgcagtgggcaaatgatttgtcagcttataagatgcagattctggatttttataaaaaagaagaggaaaatccggagctgttaaccgattatcagggctatcaggcaagacagacgataaagatgacgcacattgaagtatttacttatgatgtcataaatgaaaacgaagaaaaaggtgcttatccggtcttattcgattataaaaagagaagtccgctgacaaatgatgcaaaagcggtttttgttcaattgtaa

SEQ ID NO: 621 - DNA, 1719 bp, Firmicutes bacterium CAG:227
atgaaagggacagaattgtttgtaaaggcattacaaaaagagggaattgattttctttttgcttatccaggaggatatgcgattgatatttttgatgaattatataagcaggattccattcaggtaattctgccacgtcatgagcaggggttggtacatgcagcggatggatatgcaagagcaactgggagaaccggagtctgtcttgtaacaagcggacctggagcaacaaatctggtaacaggaattgcaactgccaattatgatagtgttccgcttgtttgttttaccggtcaggtaccgacaagcttgattggaaatgatgcatttcaagaagttgatattgtagggattacaagaagtatctgtaaatatgcggtaacagtaagaaaaagagaagatcttggaagaattattaaagaggcattttatattgcaaataccggaaaaaaaggaccggttgtagtagaccttccaaaagatattatgttagaagagggcgatgacctttatccaaaagaagtaaaaatcagaagctataagccaagcaaaggtgttcatatcgggcagcttaaaaaagcaaattccctgctttcacaggcaaagaaaccattatttttaatgggtggcggagtcaatatttccggtgcaaatgaagaagcaaaaaaacttgcagagctgacacaggttccggttattacaaccattatgggaaaaggggcacttccaaccaatcatgaactgtatattggaaatgttggaatgcatggatgctatgccgcaaatcacgcaatcagtgaatgtgacctgttgttttcaattggaacacgctttaatgaccgtattaccggtaagattgatgagtttgcaaaaaatgcaaaaattgttcatatcgatattgatgcggcttcgatttccagaaacattcaggttgatatcccgattgtagccgatgcaaaagaagcaatgacagcacttttaaaacatgccaaaccatgtgctaccaaagactggcttgaagagattcgtggatgggaaaaagaacagccacttggtatgaggaaagataagggaatcacaccgcagaagattattgaatgtatgaatgaagaatttaaaaaagcggttgttgtaacagacgttggacagcatcagatgtgggtaacacaatatctggaaatggatgaaaacaaaaaacttttgacttccggtggtcttggaacgatgggatatggacttccggcagcaatcggtgcaaaattcggttatccggatacccctgttatctgtgtttccggtgatggcggagtacagatgaatattcaggagcttgctaccgcaacagcttacggacttccggttattctctgtatctttaataacagttatctgggaatggttcgccagtggcaacagttattttatggaaaacgttattcctctacctgtaccagaagaagaaaatcttgcagtgctacctgcaaaggacctggagaacagtgcccaaaatatcagccggattttgtaaaattagcagagagttatgaagcttatggaatgagaattgaaaaagaagaagatatcaaaaaagcatttgaatttgcaaaagaacatacagatgcaccgaccatacttgaatttatgattgacagcgatgagctggtacttcctatggtacaaggcggacaggcacttgactgtatgattttggactgctaa

SEQ ID NO: 622 - DNA, 1386 bp, Firmicutes bacterium CAG:227
atggcaatcgaatatcttggcttaagtgaaatcaacggccctctggttgtgctcgaaggggtgcaggatgcagcctttgatgaaattgtagaatttaaagtagatgacggtacaaaaaaaatcgggcgtattgtagaaatttatgaggataaagctgtcattcaggtatttgaaggaacagaaaacatgtctctgttaaatacccatacaaaattgaccggacacccgatggaagtagaattatctccggacatccttgggcgaacttttaatggaatcggaaaaccaattgacgaccttggtccggtgattccggaaatgaaattaaatattaatggtctgccgttaaatccggtcaaacgagagtatccgagaaacttcattcagacaggtatctctgcgattgatggtttgacaaccctgattcgtggacagaaacttccgattttctcaggaaacggacttccacatgatcagcttgcagcacagattgtaaaacaggcttctcttggtggggacagtgatgagaaatttgcgattgtatttgcggcaatgggcgtaaaatatgatgtagcagaatttttccgcagaacttttgaggagagcggtgttgcggaccacgtagtcatgtatctgaatctggcaaatgaccctgtagtagagcgattgattacaccaaaggttgcacttactgcggcagagtatctggcatttgagaaaggcatgcacattttggttattcttactgatattacttcttttgcggaagcgatgcgagaggtttcttcttcaaaaggagagattccatcaagaaaaggttatccgggttatttatacagtgaactggcaaccctttatgaacgtgcaggaattgtaagaggtggaacaggttcggttacacagattccgattcttacaatgccaaatgatgatattacgcatccaatccctgacttaaccgggtatattacagaaggtcagattgtactcgagcgtcagcttcatgggcaggcaatttatccgccgattaatgtccttccatccctgtctcgtctgatgaaggatggtatcggtgaaggttatacgagagaagaccatcaggatgtagcaaaccagctgttttcctgttatgcaaaagtaggagatgccagagcacttgcatctgttattggtgaagatgaactttcaccgctcgataaaaaatatctggaatttggaaatgcatttgaacaacagtttgtcggtcagggaccggatgaaaacagaagtattcaggaaaccctggatctcggatggaaactgcttggaataattccaagagatgagctcgaccgtattgacacgaagatactggataaatactatcatccggaagagaatgcataa

SEQ ID NO: 623 - DNA, 1722 bp, Firmicutes bacterium CAG:227
ttgattttcattttttgcttctttcttgttttttctatcatctttttgaaaaaaatcgaacccactctggaaaacaaacagtttgaacactttaccgattctatttttacttccgaactttcttctaatactttaaatctgcattatacgcttgcacatcccgagaaatttggaatcaaggattataaaatcagtcttggctcaatgaacgaaaaagctcattctaattcattttctagattaaaatccaatcaaaaacgcctgaaaaactttcactatcaaaaactttccaaagaaaaccagctgacttatgatattctctctctggaattttccacgcagctttccggtgaaaactttttctggcttcaagaacccttaagtcctcatctcggaatttcttcccagcttccgattctgcttgccgaatacaccttccgcacaggaaacgatatcaaagactatttttctctgctctcctgcctccccgactattataacgaactggcagaatttgaatctcaaaaagcgaaacgtggactctttatgagtgatgcttctttggagcgcctgcttacacagtgtcagaccatgctctcctcggattatcttgcttctgcttttaaagataagattaattcacttcaaaatgctgatacacttaccaaaaaacaggcagattcctatctaagcctccatgaaaaattaatccatacctgcgtgattccttcctatcaatcactttcagaaaagctttctgctctaaaaggcagtgaaaaaaatgacagagggcttgccggttttccagatggtactgcctattatcactatctgattcaaagtcaggtcggagattttcgcagtaccaacgaaatcgaagaacggctttttacccagcttgcccttgattaccgccagatgcagactctgctctcccaaaatccatcccttgcacaaaatttttctgttttttctctttctgccacaccagaagaaatgctttcctatctaaacaaagccatgcagacggattttcctgatttagacagtcccaagtacgaagtgaaatatgttcccacctcaatggaagaattttccagtcccgctttttatctgactccacctgcggataccttaagtccaaataccatttatatcaatcgaagttcacaggtaaatcctgccgaactctttaccacacttgcccatgaaggctttccgggacacctctatcagactttatattatggaaagcaaaatcctgcccctatccgtaatctgctcggatgcagtggctatattgaaggctgggcgacttatgtcgaatccatttcctacggctatgccgcctcctattttaaagtcgaaccagaacttttacagcttttatggcaaaaccgctccatcagtctctgcctgtattctctgctcgatattaaaatccatgaatacggctggaccttagctcaggttacacaatctttgcatggattcggcattgcttctgatgatacctgcaaggaaatttaccaatacatcattgaaaatcctgccaattatttaaaatactatctgggatatctgaattttatggatttaagagacttggccgagaaaaaagccggtgataaatttgataaaaaagagtttcatcgatttatattagaaaccggacctgctccatttccggttatagaaaagtatgtgctggagaattattaa

SEQ ID NO: 624 - DNA, 1428 bp, Firmicutes bacterium CAG:227
atggtggaaaaccaaataaggagaattactgtgaagaatctttggaaatttgtaaaaacttcaggtatctattttataggtacagtattacataaattgattacgttcttcctgcttccgatttataccaaatatatcgacaaagcagatcttggaacgtatgaccttgcaactgcttacattaacttcttgtgttcgattctgtttctggatatctggagcggaatcatgcgttttgcctttgaatatgaaggagaagagcggaaaaagccgattaccagtggaattgcgattttcaccggttctacggtactttataccatcgtgttatttggagcaggatgtatctttgatatcaagtatcttccacttatctatctgtatggtattatgatgaacattcagactttagttggatatcttgcaagaacctatggaaaaaatgcgttatataccacatctggtctggtcagctcttttgtaactgtagtatgtaacattttatttattgtatatttccgcatggattacagtgcactgtttatctctgcctgtatcggatatctggtcaatatcgtagtgcttggatggggaatcaagttgccaaagctgatttctgtgtcagcctttgataaagatttattcaaaaggatgctgattttctcacttccgctttgcatgaattctgtggcatattggtttttaacttcctataaccgtgtcgcaatttcaaatgttttatcagtcagtgaaaatggtctgtattcgattgccggaagattttcttcgtttattacgttgtttacgacctgctttaatatggcatggcaggaaatgtcttattcaagagaagcacagaagcagacgaatcagggagaattttataccactgctttaaattcttatatcaagtttttatgtatggggcttttaatgctgattcctgcaatttcagttatcttcccgattatgattaatgaatcttatgcggacgcaaaacagttggtaccgtattatctgcttgcaaccattgtttcctgcatcagcagtttctttggaaatatctttactgcaattaagaaaaataatgtattgttttataccacagtggcaggaagtgtggtaaatgtagtcagcgtgcatctgctattaccgattgttggggtacagggagcaagtattgccctgtttttaggttttatggtaaataatacgattcgtgcttatctgctgaaaaaagaaattcaggtttcaatcgatttgaaattcattgttgcatgggcaattgtttacattggagtaagttatatttatctgcatgcaaatgccatcatcaatgtgttaactgtttttgtgggaggattgttgactttatttgtattccgtaaggaattaaaggagattttaggtacaataaaaaacagataa

SEQ ID NO: 625 - DNA, 1893 bp, Firmicutes bacterium CAG:227
atgagtgaattcaaattaaccacagtagaagaattcgaagctgctactgagagactcctggagacaggggcaaaagttggcgcggatgcttggcagttccgtgtaaaaaatcagactccgcactgtaagtttggtgaagaaggtgtctgctgtcgtatctgttctatgggaccatgtcgtattacaaaaaaagcaccgagaggaatttgcggatgtgacgtacacggtatcgttggacgtaattatctgaaatttacagcaggtggttctgcaacacattccgaccatggtcgtgaaatctgtcataccttatatgaatcatcagctgatggatgttatcaggtaaaagatccggaaaaactgattcgcattgcaaaagaatggggtgtagagacagaaggaaaagatatctacgacttagcacatgaagttgcagaaatgggtctttgggaatatggtaaaccatttggaacacagagattcttaaagagagctccgcagtcacagcaggaattatgggaaaagaacgaacttgcaccaagagcaatcgaccgtgaggtttcatgttctttacatatggctcacatgggatgttcctctcttccggaagcattaatcaaacagtccatccgtgcaggtttatctgatggatggggcggttccatgatgggaacagagttctctgatgtcctgtttggaactccaaagccaattgatacagaagcaaaccttggtgttatggtagaagaaaacgtaaacatcgttgttcatggacatgacccgagtctttctgaaatggtttgtgaatatgcagattctccggaaatgattgcttacgcaaaagaaatgggagcaaagggaattacagtatccggtgtatgttgtacatcaaacgaagtagctatgcgtcgtggtattccgatggcaggtaacttcttacagcaggaaaacgttgtacttacaggtgcttgtgaagcaatcgtagtagacgtacagtgtattttcccggcactcggacctttaagcaaatgtttccacacaaaattcatcacaacatctccgattgcacagatgccggattctgaatttatccgctttgatgcaaaaacagctggtgaaaaagcaaaattaatcgttaaaacagcaattgaaaacttcaaaaacagaaaaccggaactggtacatattccacagttaaaacagaaagcaactgtaggatactctgtagaagccatcatcaaatgcttagacggtgttgcaaacagccaggttgatgaaatgggaacagtaaaacctctgttacagtgtgtaacatcaggtgttcttcgtggagcagttgcaatggttggatgtaataacccgaaaatccgtcctgaccttgcacatatcgaactgatgaaaaaattaatcgcaaatgatatcgtaattattgcatccggatgttcagcacaggcagctgcaaaagccggtcttatggacaaacgtgcaaaagatatctgtggtgatggattaaaacgtgtttgtgaactggcagatatccctccagtccttcacatgggttcctgtgtagatatcagccgtatgatgattcttgcttctgaactggctaaatgtgccggtacacatgtttcacagcttccagttgttggatgtgctccggaatggatgtctgaaaaagcagtttccatcggtaactatgtaattggtacaggtatcgatactttccttggtgttgacccttatgtttctggttccagcgaaattgctgaaatcttaacaaatggcacaagagagtgggtagaagcagcatttactgtggaaaaagatattgataaacttggagacgccatgatcgcacgtatcgaagaaaaacgtgcagcgctcggaatttaa

SEQ ID NO: 626 - DNA, 1701 bp, Firmicutes bacterium CAG:227
atgaaattatcttatttatcagactcaggaccgcataacctgtttctgataatgaaacaacagcaggaggaaaatgtgatggcagtaaaatatgtatttgttacaggtggtgttgtttccggtctcggaaaaggaatcaccgccgcatctttgggacgcttattaaaagccagaggctatcaggtcaccatgcagaagtttgacccttacattaatgtagatccaggtacaatgaatcccatccagcatggtgaagtattcgtcacagacgacggtacagaaactgaccttgaccttggacattatgaacgctttattgatgaaagccttgataaaaattccaatgttacaaccggtaaaatttactggtccgttcttcaaaaagaacgacatggggattacggcggagggactgttcaggttatccctcatattacaaatgaaattaaaagccgtttctaccgtgcaaaatttcctgatgaagagcgaatcgctattatcgaagttggcggtacggtaggtgatatcgagagtcagccattcttagaagcaatcagacaatttcagcatgatgtcggacatgaaaatgctatcttaattcatgttactctgattccttatttaaaggcatccggagaattaaaaacaaaaccgacacaggcaagtgtaaaagagcttcagggaatgggacttcagccggacattttagtctgccgttccgaacatccaattggtcaggatattaaagataaaatcgctttattctgtaatgtaccgcaaagccacgtattacagaatcttgatgtagaatatttatatgaagcacctcttgccatggaaaaagaaaatctggcacaggttgtatgcgaatcactaaaacttccttgtccacaaccggatttggatgactggaaatcaatggtaaacgatttaagacatcctcagacagaagtagacattgcaattgtcggaaaatacattcagcttcatgacgcttacttaagtgtagtggaagccttaaaacacggcggtatcgcaaatcatgccaatgtccacatccactggattgattccgaacatcttaccatagaaaattatgaggaatctttaaaaggactcgacggaatccttgttcccggaggttttggaaccagaggaaccgaaggaaaaattcttgccgttcagtatgcaagagaacacaaaattccattcctcggtatctgtcttggtatgcaggttgcaattattgaatttgcaagaaatgtcctcggatatcacgatgcaaacagcattgaattaaatccggacacccttcatccagtcattgctcttatgccggaacaggacggaatcgaagacttaggcggaaccttaagacttggttcttatccttgtaaattaaaagaaggaacaaaatcctacgaattatatggaaaacaggatattgccgagcgtcacagacaccgctatgaagtaaataatgactatcgtaaacagcttgaagaaaatggaatgagtcttgtcggactttctccggacggacgaattgtagagatgattgaaattaccgagcatccattcttcgtcggtactcagggtcatccagaattaaaatcaagaccgaatcatgcacatccgctatttaaaggactggtgcaggcggctgccacatataaaaaggaaagaggtcaatcattatga

SEQ ID NO: 627 - DNA, 1392 bp, Firmicutes bacterium CAG:227
atgattgaggtgaagagaatgaaaacagaaaatgcttggaaaaaatatgccgataagaaaccagtctttgatttctgcgagggctataaagaatttatgtctttatgcaaaacagaaagagaatgtacagatgaaattataaaacaggcaaaaaaagccggttttaaaaatcttgatactgttattgaaaaaggagaaactttaaaaaaaggggataaggtgtacgccaacaatatgggaaaggcactggctctttttgtaattggagaaaaaccaattcaggaaggaatgcgtatccttggagcacatatcgattctccacgtttggatttaaagcagaatccgttgtatgaagaagcagaacaggcattgcttgatacacactattatggcggtgtgaaaaaatatcagtgggtgacacttccaatggcacttcatggtgtagtggtgaaagaagatggaacaaaagtaaatgtggtaatcggagaatccaaagatgaccctgttgtcggaatttcggatttattgattcatctttctgcaaaacagatgcagaaaaaagcgacagaagttattgagggagaaaatttgaacgtactggttggaagtattccgttagagggagaggagaccgaaggcgtaaaagaaaatattctttctatattaaaagaaaaatatgaaattgaagaaaaagattttgtatccgctgaattagaagttgttccggctggagaagcaagagactttggattagacagaagtatgattatggcttatgggcaggatgacagagtatgtgcttatccgtcttataaagcgattgaggcagttacagaggcagaatatacttctgtatgtttgttggtagataaagaggaaattggaagtgtaggagcaaccggtatgcattccagattctttgaaaatacggtggcggaagtgatgaatgcgtgtggaacttacagtgaactgcttgtgcgcagagcattaaaaaattcctgcatgctttcttctgatgtcagcgccggatttgacccaaattatccggaagtgatggaaaagaataactgtgcatttttaggtcacggattaacctttaataaatataccggctcaagaggaaagagcggttctaatgatgcaaatccggaatatattgcaagattgcgtcgtgtgatggacgagcaaaatgtttctttccagacagcagaacttggaaaagtagatgttggaggcggcggaactatagcctatattcttgcagcatacgatatgaatgtaattgacagtggagttgccgtattaaatatgcatgctccgtgggaaattgcaagtaaagtggatatttatgaagcatataagggatatcaggcatttctgacgaatctgtag

SEQ ID NO: 628 - DNA, 1059 bp, Firmicutes bacterium CAG:227
atgacgtatgtattaccggaaaaattaaaagacttaaatccttatgaccctgtaacggaggattttcggattcatcttgatgcaaatgagagtttctgtgaagtaccggaaaacatcaggcaggaaattttaaatgcggtttctaatgttgcatttaaccgttatcctgacccgtacgcaagaaaattatgtgaaaaagcaggtgcatattatcatgtagacccgaaacttttaactgccggaaatggttcggatgaattaatttctctggtagtaccgtattttctggacgagggtgatacgatgcttgtcgcagtaccggatttttccatgtactggttttacgcaccgtttcacaaaatcaaagtagaatcccttcaaaaagaaaacagcatgaagacttctgcagaagagattttacagcgtgcgaaagagaaaaatgcaaaactgctgattttttccaatccgtgtaatccgacttctcttggaatcggacgtgatgatatcataaaaattatcgagggtacagatgcgctggtgattgtggatgaagcttatatggagtttgaaaacgaaagtaattccgtcttaaacgaagtagaaaattatgataatttaattattttaaagacctgttcgaaggcatttggaatggcagcaatccgccttggaattgcagttaccaacgaaaagctgacaggaattttacatgcaatcaaagcaccgtataatgtcaattccgtgacacaggcaatcggatgcgtattattttctcacccggaatatctggcttcctgcattgatgctttaaaggcatccagagacgagttatatcaggcggtgaaagcgatggaagataaaaaaacagaaatcgaaaccgtctacgagacgagtacaaactttatttttatgaaggtaaaacgtgcaaaagaagtgtttgaagcattaaagcaaagaggcatttcgattcgatttatgaatggctatcttcgagtaaccgcaggaacaaaagcagaaaataaagaagtgatggaagcactttgggaactgattcagtag

SEQ ID NO: 629 - DNA, 1137 bp, Firmicutes bacterium CAG:227
atgagcgatgaatttaaagaatttgatgtgacaccgacacttacttttggggtagaggaggaaaaacctgccccgaaagagccggaaaaaccggctgacccaaatatgacggaagacgtattgtcggcggaagaacgccagatggtggaaaatttttccaagcagattgatatccgcaattctgctgcaatcttgcagtacggagtgggaacacagaaaaaaatggcagatttttcagaagaagcactcgcaaaagtaacaacaaaagaccttggagaagttggtgatttgcttgaaaatgttgtgaaagaactgaagagttttgatgcggtggaagaagaaaaaggtctgtttggaatttttaaacgtggcacgaataaaattcaggcattaaaaacgaagtatgccaaagcagaaggaaatatcgaacagattgtgcagacactggaaaaacatcagattcagcttttaaaggattcagcgactatggataaaatgtatgcgctgaatttgaattattttaaggaactttctatgtatatcttagcaggaaagaagaaactgcaagaagtgcgagaaggtgagttaaaagaactgactttaaaagcacagatgagcaatctgccggaagatgcacaggcggcaaaagatctggattcaatgtgccagcggtttgaaaagaaaattcatgatttggaattaacccgtatgatttcgattcagacggcaccgcagattcgtctggtgcagggaaatgataccttgatggcggagaagattcagtctacacttgtcaataccattccactctggaagagtcagatggtgctggcacttggagtggcacatgcatctcaggcagcaaaggcacaaagagaagtcaccgatatgacgaatgccctgcttcgcaaaaatgcagagacattgaagatggcaaccattgatgcggcaaaagagtctgagcgtggaattgtggatatcgagacattaaaacatacaaatgagaatttaatcagcacctttgatgaaattatgaatatccagaaagagggtcatcagcagagaatggaagcagaagctgagatgaaccgcttagaagaagaattaaagaagaaactgttggaaataaaccattaa

SEQ ID NO: 630 - DNA, 1725 bp, Firmicutes bacterium CAG:227
gaggaagtaaatatgaagttaagtaaacttgtaggagacagatttaaagaaagaccgtctgactgtgttatcgacagtcatgcactgatggtaagaggcggttacatgaagtatgtggcaaacggaatttattcccagtatatgccgcttcgtcgtgtatgccagaaaattgaagcaattatccgtgacgagatggataaaatcgatggacaggaagtacagtttccggttgccctgccggcatctttatgggaagaatccggaagatatgaaagcgttggaagtgaactgcttcgtttcaaagacagaaacggaagcaaaatggtacttggtatgacccatgaagaggcagcggttcagttagtaagagaatatggacagacttacgcaaaatatccatttatgatttatcagttccagacaaaattccgtgatgaagcacgtccaagagccggtctgatccgtgtacgtgaatttactatgaaagatgcgtattctttccacacatctcaggaagatttggaagaatattatgacaaatgttatcatgcttatgaaagaatttttgcgagagccggaattccggaaacaatcgcagttgcatctgactctggtatgatgggtggaagcctttctcatgaatttatgcttttgactccggttggagaagattccattgcagtatgcccggaatgtggttacaaagcaaatgtagaggcagcagaaaacattgtagaaaatgaagctgaagaatatcaggaattaaaactggtgagcactccaaatatgcatacaatcgaagaagtatgtgaattcttaaacagctcagcagaaaaatcctgtaaagcggtagtatatcagaaaaattccaatgatgaatacgttgtattatttatcagaggggacttggaagcaaatgaaacaaaactgacaaacttcttaaaagaagaaattcatccggcagaaattaccttagaaagtggattacatccaggatttatcggaccttacaagatggatgcaaatgtaactgttttatatgacagttctttaaaaggtggatgcaatctttgctgtggcggaaatcaggatgattatcattacacagggctttgtatggaaagagatcttccggatgcagaatatcatgatttcgcaaaaatcgtagatggcggaatctgcccatgttgtaagaaaaaagcaatcaaagtatcaagaggtatcgaagtcggaaacattttccagctcggaacaaaatatactaagagcatgggaatgaaatatctcgataaagacagcaaagaaaaatatccgattatgggatgttatggaattggtgtcggcagacttgctgcatctgtctgcgaagcacatcatgatgagtatggtccaatctggccaatgacaattgctccatggcaggttcacctttgctgtgtacgtccagacaatgaagaaatcaagaactattcagacggtttatatgaacagttacagaacgcaggaatcgaagtactttacgatgacagaaaagtaagtgccggtgttatgttcagtgatgctgacttaatgggtattccggttcgtatcattgcaagcccgagaaatatgaaagagggatgctgtgaagtggtaacaagagataaatctgtaagagaaaaagtagcattagaggatgtatttgcaactgttcagaaaatggtacaggaagcacttgcaagataa

SEQ ID NO: 631 - DNA, 1767 bp, Firmicutes bacterium CAG:227
atgaaaagaataatggaattaatggaagatgcagtaaaagaagcatttaccaaagcaggttatgaggaaaagtttgcaagagtaaatgtttccaatcgtccagacttatgtgagtatcagtgtaatggagcgatggcagctgcaaaaacttataaaaaagcaccgattatgattgcaaatgatgtggttgcatttttaaaagagaatgaactgttttctatggcagaagcagtcaatcctggatttatcaatttaaagattgcgccggcatttttaacaaagttcttaaatgaaatgcaggcagatgaaaatttatctattgaaaaagaaaaagcaccaaagacgattattatcgattatggcggaccaaatgtagcaaaacctctgcatgttggacatcttcgttctgcaattatcggtgagagtattaagagaatgggtcgttttttaggtcataaagtaatcggagatgttcatttaggagactggggacttcagatgggcttgatcatcacagaacttaagaagcgttctccggaattggtttattttgatgacagcttcgaaggagactatccagaagaagcaccgtttacagtaagtgaattagaagagatttatccggcagccagtgcaaaatcaaaagaagacgaagcatacaaaaatgaagcgttagaggcaacattacagcttcagcagggaaaacgcggataccgtgcattatggaaccatattatgaaagtgtccgtagaagacttgaagaaaaattattccaaactgcatgtggattttgacttatggatgggtgaatccgatgcagacagatatattccggatatggtagactacttaaagaaaaataattatgcttatgtagaccagggcgctttagtggtagatgtaaaagaagagagtgatacaaaagaaattcctccatgtatgattttaaaatcagacggagcttccctttataatacaacggaccttgcaaccatcgtacagcgtgaagaagattatcatccggatgaaattatttatgttgtagataaacgtcaggaacttcattttgtacaggtattccgttgtgcaaagaaagcaaaaatggtagaagaaaaaacagctctttcgtttgtcggatttggtacgatgaacggaaaggacggaaaaccatttaagacaagagaaggcggagtcatgcgtctggaacgtctgattgcagaaattaacgatgaaatgtataaaaaaatcgtagaaaaccgcagtgtgaaagatgaaaatgcgcagaaaactgctgagatggtaggacttgcagcaattaaatacggagatttatccaatcaggcatctaaagattatatctttgatgtagagagatttacttcttttgaaggaaataccggtccatatatcttgtatacaatcgtaagaattaaatctattttggaaaaatatatgcaggaaggcaaaaatccgaacgaaggaacaatcttagaagcagtaaatgacagtgaaaagaatctgatgttagaacttagtaaatttaactctgtcattgcaccggcatttgaagagaaagcaccacataagatttgttcttatatttatgatttggcaaatgcatttaacagcttttatcatgaaactaaaattcttagcgaatctaatgaagaacagaagaaatcctggattcgtctgttagtattatgccgtgatgtattagaaacctgtattgatttacttggttttgaagcaccggaaagaatgtaa

SEQ ID NO: 632 - DNA, 1137 bp, Firmicutes bacterium CAG:227
atggacgaagaacaaagagacgaactagagcgtcagcgtatccgacatgagagaatgatgcgccgtaagcaggaaaagatacgtcagttacgtcgcagaaaaatgatgcggattggtgcaatggcagttgtactggtattagtattggtttttgcagtaagaggagttggaaaactgttctccggtgttcatataaaaaacagtagtgctaagaatgcaaacagcagtaccgtagaagttcaggcagcagaagacaccggcgaggcaggaaaacagccggtcatgagtgcttctgatgtagataagttaaaggcagcgccaagtattggatggcatcaggatgaaaacggctggtggtatcagaatcgggatggcagctattatcaggatggctggcaggaagtaaatggcagtacatattattttaattcaaatggttatatcctgacaggatggcagacaattgatgacaaagactgctattttgatgaagaaggaaaatacgatgagacaaaacagcgtccaatgattgcattgacctttgatgatggaccgggtgagtataccgaagaattgattaattgtctggtagagaataatgcaaaagcaaccttcttcatgctgggacaaaatgtagaagcatatccggaaattgcaaaggaattatcggatgctggaatggaacttggaaatcattcttacagtcatccggatttggtgacaattggagcagaggcagcagcgcagcaggtaagcaatacggatgcagcattaaaagctgcaactggatttgaggcaaccgtaatgcgtccgccaggtggttctttcaacgattccgtcaaagcagcaattgatcatccgctgattatctggagtattgataccagagactgggcaaccaagagtgaggatcagacttatcaggttgttatggataatgcacaggacggttccgttgtattgatgcatgacattcatgaatggtcggtaaaagcggcaatccgaatgataccggatttgattgcaaaaggatttaaacttgtgactgtcagtgaactggcagaagcaaaaggaaaaacccttcagagtggtaatgcttattattacttcggagaaggcgaacagcaggtcgagtaa

SEQ ID NO: 633 - DNA, 2247 bp, Firmicutes bacterium CAG:227
atgaaatttaccaatggatattggatgttaagagatgaaatagaagcttcttatgcagtagaatatgcgaaacatactgtaaatggaaataaattagaggtatatcttccggcaaaacacatgtcaggaagaggagatgcgctgaatattgcacttcttacattgacgctttccagtcctcaggagggtgttatcaaagtatcagcggttcatcataagggaatgccttataaaggaccgtttgcagcagtaaaaaatgaaaatccaaatgtcacaattgaagatacagaagaccagctgatttataagagcggtacattaaaagcagtcattgataaggctccaaatgcatacaaactggcattttatgagggcgatacattcttaacagaatccagtttcagaaaccttgcttacatgcataaccgtgaaaccggaaagaattatatggtagagcagctcctgctcgatgtaggtgagtatgtttacggacttggcgaacgtttcactccgtttgtaaaaaatggacaggttgtagaaatgtggaacgaagatggcggaacggcaagtgagattgcttacaaaaacattccgttctatattaccaataaaggttacggcgttttggttgacaatgagggtgacgttgcttacgaaatcggaagtgaaaaagtagaacgagtacagttctctgtagaatctgaaagactggattactattttatcagcggaaaaactccgatgggaacagtagaaaaatacacagaattaaccggaaaaccggcactgcctccggcatggtcctttggtctgtggctgactacttcctttacaacagattatgatgaaaatacaacctccagctttattcagggaatggcagaccgtgacattccgcttcatgtattccactttgactgctactggatggaacggtttaaatggtgcaatttccagtgggatcatgaggtaacaacagacccgaaaggaatgttaaaacgctatcatgacaaagggttaaaaatttgtgtatggattaatccatatattggacagcagtccgaattgtttgaagagggaatggaacatggctatttcatcaaacgtatagatggaagtgtatggcagactgatttatggcagccgggaatggcagttgtagactttaccaatccggaagcatgcaaatggtatcagagcaaattaaaagcactgcttgatgatggggtagactgctttaagaccgactttggcgagagaattccggtaaaaggaattcagtattatgatggttctgacccggttaaaatgcataactactttacattcttatataataagactgtatttgaagtacttgaaaaagaaagaggaaaaggcgaagcagtcttatttgcccgttccgcaacggtaggcggacagcagttcccagcacattggggtggagactgctctgcaacttatgtatcaatggcagaaacccttcgaggcggactttccctttctgcgggtggatttggattctggagtcatgatatcagtggatttgagcagactgctccggcagatatctataagagatggtgtcagtttggactgctttcttctcacagccgtctgcatggttcttcttcttaccgtgtgccgtggttatttgatgaagaatcctgtgttatcttaaaagaatttgtaaacttaaaatgtcgtctgatgccgtatatctatgagcaggcggtaaaagcacataaaaacggaacaccggtgctgcgtccgatgattttggaattcccagaagacagagcctgcgactgccttgacttacagtacatgtttggtccgtctcttttagttgctcctgtattcaaagaaagtggagaagtaagttactatctgccaaaaggaacctggattaacctgattacaggagaaaaacaagagggcggtacctgggtaaaagaaacgcatgattatcattctcttccgctgatggttcgtgaaaataccattcttccaatgggagcaagtgaaacagaagcagaatatgattatgccgatggtgttacacttgtactttccgaattttcagatggagcaagtgcagaagtagaaatcccggatacaaaaggaaatacagttatgaaagcctatgcagtccgcaaaggcgatgaaatcgaagtttcggtagaaggtggaaacggtaactttactgtgagaaatcttggaagcggaacagttgttgtaaaataa

SEQ ID NO: 634 - DNA, 1167 bp, Firmicutes bacterium CAG:227
atggcaaaatcaaggattctatggggacttgaactgattttatgcgtgttgttttatatatttacagatagttatgcagggctgtggctgttggcaatttcactggtgcttccggttgttgagatgataggggcagagatttgtgcaaaaaaacttttcggaactttaggcatagacaatctgggtgaaaaacaaaaagacatgacagccatgttaaagattaagaatacaggtttgttcccctttgacagaataattgcaaagataaaatgcgaaaacctgctgacaggagaggcagaagagtatgagattttagcttctgctcccgcaaaaacagaaacacttcagcagttacaattaaaaagcaggcactgcggaaaactttgtctgaacttaaaaggatttttggtactggattattttggacttagaaaaacaaaaattccagcagattctgaaaaaatgacattgattactccgaatacttttggacttcaggtggaagtggtttatggggaaaatgcagtgctagatgccgaagaatattccatgagcaaagccggatttgacccaagtgaaacatttgcagtcagagaatatcgtgcaggtgaccacattcatcagatacattggaaactttcagaaaaattagatggattaatcgtaagagattatggactcccggtgcagaataccattttacttttactagagaccggatatccggaaaaaagcgaagaatttccatcgcagatggaaaagctagtagaatgtctggtatcggtttcacaggaaatgtgcgaacagcagattgtacatagtattggctggtataaccataaagagcagacttacagcagtgcggaaattgacagtctggaagaatttacaatgatacttccggaacttctttcagcggttccaggagaagatggaacttcggttctcggtcattacatggaacagagagaacagtgtgagtttgcacatctggtgctattcactccgtatctgacggcagatgcctcggctttggcagaacggtgtctggtgacggaagtgatttgtgagaaagagccgagaggtgaatttacagaggaaggggcgcatgtgatttccgtatcgacagaaaatgccgaagcggaactctcatatcttgaaatatag

SEQ ID NO: 635 - DNA, 1953 bp, Firmicutes bacterium CAG:227
atggttatcacattaaaagatggttctaaaaaagagtatgaagaagcaaaatctgtaatcgacatcgcttatgatatcagcgaaggtcttgcacgtgcagcttgtgccggagaagtggacggagaggttgtagacctgcgtactgttgtagataaagactgtgaagtaaatattttaacagcaaaagatgagaaaggtcttgcagcgctgcgtcatacggcatcccatgtattagcggaagcagtacagaaattatatccggatgcaaaagttgcaatcggaccttctattgatacaggtttttattatgattttgagtgtcagccgttctcaagagaagcgctcgatgaaattgaaaaagaaatgaaaaaaatcatcaaaaaaggtgcaaagattgagcgtttcacaaagacaagagaagaagcaatcgcatttttcaaagaaaaaaatgagccttataaagtagaattaattgaggatcttccggaaggagaagaaatcagcttctattctcagggagactgggttgatctatgtgcaggtcctcatctgatgagcacaaagggtgtaaaagcatttaaattgctttcttcttcaggtgcttactggagaggaagcgagaagaatcagatgctgactcgtgtatacggaactgcttacggaagcaaggatgaattaaaagagcatctggaacagcttgaagaagcaaagaagagagaccacaacaaactgggtcgtgaaatgaaattgtttacaacagttgatgtaatcggacagggtcttccactgattatgccaaatggtgtaattatcatgcaggaacttcagcgctggattgaagatgaagagacaaaacgtggttatgtccgcacaaaaactccgctgatggcaaagagtgatctgtataaaatttccggtcactgggatcactataaagatggaatgtttgtattaggtgatgaagaaacagataaagaagtattcgcacttcgtccgatgacctgtccgttccagtactatgtatacaaagcagaacagcacagttatcgtgatcttccactccgttatggtgaaacttctactctgttccgtaacgaagattccggtgaaatgcatggtctgacacgtgttcgtcagtttacaatttctgaagggcatctgattgtaagaccagaccagatggtaaaagaatttaaagattgtattgcactggctcagtactgtttacaggtacttggtgtagaagaagatgtaacttatcatctgtcaaaatgggatccggaagacaaagaaaaatacatcggcgagccggaggtttggaatgaaacagaagaacacatccgtaatatgttacaggaattaaatattccattcgtagaggatgtaggagaagctgcattctatggtccaaaagtcgatatcaatgcaaagaacgtttacggaaaagaagatactatgattacgattcagtgggatgcactgcttgctgaacagtttgatatgtactatattgatgaaaatggtgagaagaaacgtccttgcattatccatcgtacatctgtgggatgttacgaaagaactttggcatggttaattgaaaaatatgccggcatgttcccgacttggttatgtccggaacaggtgcgtgtgattccgatttctgaaaaattccatgactatgctgcaaaagtagaagcagagttaaaggaaaatggtatccgttgttccgtagaccagcgttctgaaaagatgggatataagattcgtgaagctcgtcttgcaagagtaccatatatgctggtagttggagcaaaagaagaggaagaaaacaaggtatctgtaagaagtcgttaccttggagatgaaggtgcaaaagatttagcagatttcatcggtgcaattaaggaagaaattaaaaataaaacaattcgtaaaattgaagtagagaactaa

SEQ ID NO: 636 - DNA, 1263 bp, Firmicutes bacterium CAG:227
atgaataaattaggaagggttcttgcctgcacgactcttgcggcaacattgacaatgaccagtttgactggatgtggaaatacattagatggaacgaagacagtagcgacggttggaaaggaagaaattacagccggaacagtgaatatgatgcttcgtatgacccaggctcagatgatgtcttactattccatgtttggaacatccactacaggaatgtgggaaaataaaggcgatgatggcaaaacttatgcagaaagcaccaaagacgacattatggatcagcttcataatctggtattgttagaacagcatgcaaaagattatgatgtaaccatcacagatgaagaacagaaagaattaaaagccgcagcagaaaaatttatgacagataatgatgcagaaacgattgcaaaactcgcagtgacccagtccgacattgaaaaactgcttgagttatacagctatcagacaaagatgtatgatctgatgacagctgatgtagataccaatgtagaagataaagaagcacagcagagtaaaattacatactgcaaagtttctacaaaagcgactaaagatgatgagggaaattctacagagttgacagatgaagaaaaagctgcaaagaaagaccaggcacagcaggtattagataaaataaaagcgcaggaagatattgccggcgcagatgtggacagtcttgcaaaagaagtggatgagtcgcttagttcttctacagcaacttacagcacaaatgaagacgatgaagattcctctcttgatgctgaggtaatgaaagcagcaaaagaactgacagaagatggtcaacttgcttctgatgtcatcgaaggcagtgacggatactatgtagtccgtatggacagtgtttttgataaagattctactcagacaaaaaaagacagcattgtaaaagaaagaaaacagaaagcttatgataaactgcttaaaaaatgggcaaagaaaacgaaaatctcagttaataaaaaagtatggaaaacagtaacattaacagatgaagatgtttacagcttcaaacaggctgatacatcaagcgaaacaacagacagtacagattctgcagaaacaacagaagcaacagaaaatacagatagttcagaagcagaagaaagcactgagacaacagaaaatacagaggaatcctctgacagcacacaggcagatgaaaatacagatgcaggtgaaaatgctgatacagaagcaaccgaaacagctgaataa

SEQ ID NO: 637 - DNA, 1053 bp, Firmicutes bacterium CAG:227
atggcgaaggtattattaaaaggaaatgaagcgctggccgaagccgcattagcagcgggctgtcgtttttatagtggatatccgattactcctcagacagagattctggagtatttatcatggagaatggaagatgtaggtggagtatttattcaggcagaatcggaacttgccggagttaatatggtacttggagcagcggctgcaggtgcaagagcacttacaacttcatccggtcctggattttctttaaaacaggaaggaatttcttatttggtagcagcagatttgccggcagttattgttgatgttatgcgaatcggaagtggtcttggagatattgcacagggtcagggagactactggcagcttacaagaggtggtggtcacggagattaccatacactcgtacttgctccggcttccgtacaggaaaatgcaaacatgatggcagaggcatttgaccttgcagaaaaatatcgtcatccggttctgattgcatccgatgcagcgattggacagatgattgaagcagttgaaattccggaatttgttgagcatgatatcaataaatatgactggaccatcaaaggatgtaaaaaaggctgtgaacagcgtaaaattcagaacgtttattatacacatcctgattatgaaggctatttatcctctaaatatgcacagatggaagaggaagaacagcgctatgaaaatattcaggtagaagatgcagaagttgtgctggttgcttatggaatcagttcccgtgtaagtagagaagcagtagaaattgcaagagcacagggcttcaaacttggtttgattcgtccgattactttgtggccattcccgaaaaaagcatttgaagaagcaaaagaagcaaaagcattcttaactgttgaaatgaatattttaggacagatggtagatgacgtaaaacttgcaacagaaggcaaatatccagtggatcattatggttcaatctttgaaattcctgaaacagatggaattattgcaaaagcaaaagaaatgttaaaaaagggggagatataa

SEQ ID NO: 638 - DNA, 1884 bp, Firmicutes bacterium CAG:227
atgaatggatgttttggatgtaacacatgtgcaagtgcagataaaccactggagggatttatcagaaacctgccaatggaaacttctcatcatagagtagagggacagagtacaaaatgtggatttggacttcagggagtctgttgtcggctgtgttccaatggaccttgtagaattaccccaaaagcgccaagaggaatttgtggtgcaacggcggacgtcattgtagcacgtaattttctgcgtgcagttgcaagtggttccggctgctatatccatgtcgttgaaaataccgcattaaatgtaaagaaaacagcaatggaaaaaggagaaatcaaaggagaacgttcccttaaaagacttgcagatgcatttggtgtccagggaaaagataaatgggaaaccgcacagattgttgccgaaaaagtaattgctgatttatataaaccagaatatgaaaaaatggagctggttgaaaaattagcttatgcacctcgttttaaaagatggcaggaacttggaatcctgccaggtggagcaaaaagtgaagtgttccatggtgtggtaaaatgttctacaaacttaaactcggatcctgttgatatgctgacagactgtttaaaacttggtatttctacaggattatatggattgactttgaccaatcttttaaatgatgttctgcttggagaaccggaacttcgcatggcaccggttggactgcgtgtaattgacccggattatattaatattatgattaccggacatcagcacactatttttgttgatttacaggaaaaactgatttcaaaagaagcagtagaaaaagcaaaagcagttggtgcaaaaggctttaaattagtgggatgtacctgtgtgggacaggatttgcagcttcgtggctctcactatacagaagtatttgatggacatgcaggaaataactataccagtgaagcagtccttgcaaccggcgcaattgatgcggtaatttctgagtttaactgtacccttccgggaattgaaccgatttgtgacagtttaaaaattaaacaaatttgtctggatgatgtggcaaagaaagcaaatgctgaattaaaaccatttgtatttgaagaacgtgaaacacaaagcatggaaatcattgatgaaattatagaagcttataaagaaagaagaggaaacgtagaatttaatctgatgccggaacatggaaatgaccatactttgaccggagtcagcgagctgtctttaaaagatttccttggcggaaactggaaaccattaattgatttaattgtagccggagaaatcaaaggaattgcaggtgtagtcggctgttccaatctgacagcaggcggacatgatgtgttatccgtagagctgaccaaagaacttatcgcaaaagatatccttgtcttaactgctggatgttcttcaggaggaattgaaaactgtggtcttatgacaccggaagccgcaaagctggcaggtccgaaactgcgtgcagtctgtgaaaaattaaatattcctccggtgttaaattttggtccatgtcttgcaatcggacgcctggaaattgtggcaacagaacttgcagaagcaatcggtgtagatattccacagcttccactggtgctttccgcagcacagtggttagaggaacaggcactggcagatggctgttttggactggcacttggacttccacttcatcttggacttccgccatttgtaaccggaagcaaaatcgtaaccaaagtattaacggaagatatgaaggaactgaccggtggtcaggtgattatcaatgctgacgcaaaagaaagtgcggatattttagaaaaaatcatagaggaaagaagaagtgcattaaacatctga

SEQ ID NO: 639 - DNA, 1515 bp, Firmicutes bacterium CAG:227
atgagccattctatcagtatttcaccaaagataaaagaaaatgaatcctgttttcgagaagtattcaaagactgtgcggatattttgttccatacaatggaacttggtcggggaaaaacagtcgattgttttgtgatttatcttgaagtagcggtcagcaatatgattcttgaaaaatccgtgcttggaaaattcatcaatgaactgtgcaaggtatctggagatgagattttagagcgggttgaaaaaaatgcattgggaatttcagatgcagtacagctggatacggtagaagatgtggtcgcaggagtatttgccggagatgccgtattttttatagatggatatgcgcatgctgttaagatttcagaaaaaggatatccttcgatgggagtatccgaggcagacagagagaaagtactgcggggttcaaaagagggatttaccgattccgttaaaaccaattcggcactcatcagaaaacgaatccgaaatccgggaatgaaagtcaaagagcagacaattggaagacgcagtcagacaaaaattcagattctttatatcgaaggactggcaaggagtgagattttagaagaactcgagacgaaactttctgattttgaaattgacggtgtgcttgacagtggagtgattgagcagctgacaaaagaaaactggctgtcaccgtttccacagtttcagacaacggaacgaccggataaatgtgcgatggagctgttaaatggaagggttgtcctgcttgtggataattcgccggttggtcttttaattccggcggtgtttaatgattttttgcaggtgagtgaagatgaatatcagacctttgaacttgcaacatttttaagagtgctacggtatctggcagttggctgtgcaatgttgttttcgggactttatctggcggttacggattttcatacacaggtattgccgacgaatctgattttatcttttgcaaaggccagaagaggtgtgccgtttccggggctgatagagacattatttatggagattgcatttgaaagtgtcagagaagcgggggtgcgtgcaccgggaccgcttggaggtacaataggaatcgtaggagggctgatcatcgggcaggcagcagtttccgcaaatctggtcagtccggtagtggttgtggttgtggcgattacggcactttctgcccttgcaattccaaatgaggaattttctgcaccgtttcgattgttgaaatttggctttatttttcttggcggaacacttggaatgtttggaattcttttgggactctatatgcttttaagccatattgccgagctgaaaagctttggagtgccttatcttgcaccttatgccggaacgcaaagagcgggatacagaggaaaagaaaatggaatctggatgcttccggcaagatttcggacaagacgcccgctgtatgcaaaagaaagtcagaaaattaagcttagaatgaaaacatcagatgaagaggaaagaaaaaaatga

SEQ ID NO: 640 - DNA, 1620 bp, Firmicutes bacterium CAG:227
atgaaattaacaatggatggaatcaaaaatcgtgaagcatgggagaaagcaggaatccagcttccgggatacgatgcgaaagaggtttcggaaaaagcgaaaaaagaaccaagatgggtacactttggaatcggaaatattttccgtgtatttatcggtggaattgcagatggtttattagaagaaggtgcattagaccgtggacttacctgcgtagaaacatttgattatgatgtagtggataagatttatactccttatgataatctgggcttaagcgttattcttcatggagatggaagccgtgaatataaagtgctgggttctctggcagagaccgtaaaagcgcagtcatctaatgagacacagtggaaccgtttaaaagaaatttttacaagtaagtcgttacagatggtttcttttacaattacagaaaaaggatatgcattacagaaagcagatggcacatggttcccattcgtacaggctgatattgaaaatggtccggataaagcgacaggagcaatggcagtagtagtggcaatgttgtatgaaagatacaaggcaggaaaatacccattggctttggtttccatggataactgttctaaaaatggtgcaaaacttcgtgaatctgtactgactatgacagaagaatggaaaaaagcaggatttgtagaggaaggatttgtttcttatgtcagtgatgaaaaagtagttgcgttcccatggaccatgattgataaaattactcctcgtccgagtgaaaaaattgcagatgatttggaagaacttggcattgaagaaatgcaaccggttattacaagtaaaaaaacttatattgcaccgtttgtaaatgcggaaaaaccacagtatctggttattgaagacaatttcccgaatggtcgtccagcactggagaaaggctttggtgtttatatggctgacagaaatactgttaatttatcagaacgtatgaaagtaactgtatgcttaaatccggtacattccgctacaggacctcttggagtcgtacagggatatgacttatttgcccatatgttaaatacaaatgaagacatgatgaaaatggcacgtatggttgcttatgatgaaggacttccggttgtcccaaatccgggaattctttctccacaggcgtttgtagatgaattattcaatgaccgtttcccgaatgaatatttaggggacaccaatatgcgtctctctgttgacgtctctcagatggtgggaatccgttttggagaaaccatcaaagcttatgttgaaaaatttggagatgcaaaaaaactgacagcgattccactcggaattgccggatggcttcgttacatgcttggagtggatgatgaaggagaaaaatatgaattagctccggacccaatgaatgaagaaattcaggaacagttaaaagagattgtaatcggaaaaccggagacatttacagaccagttaaaaccgattctttctaacgagcgtctgttctttgttgatttgtatacaacaggtgtggcagaaaagatagaagaaatgtttagagaaatgattgcaggaaaaggagcagtaagagcaaccattcataaatatgtaaatcagtaa

SEQ ID NO: 641 - DNA, 1656 bp, Firmicutes bacterium CAG:227
atggcgaaacaagaaaaaatctatattttaggacataagaatccagataccgattcgatttgttcagcgattgcttatgcagatattaaaaatcgttcgaatgatggaagaaagtatattgcaaaacgtgcaggtcagataaatgaagaaacagagtatgttttaaaacgttttggcgttgatgcaccaggctatcttccggatgtcggaactcaggtaagagatatggaaattagggaaactccgggagttccgcacagcatttccattaaggatgcatgggcgattatgaaagaaaccaatgcggtgacacttcctattacaaaagaggacggacagttagagggactgattacaaccggagatattgcaaaatcttatatggatgcgcatgataattatttcctttccaatgcgagaacccagtatcgaagtattgcgaatacagtagaaggaaagattgtaactggaaacggacatggatatttcttaagaggaaaagttgtaatcggtgcgacacttccggaaaaactgggagagtacttagaagaagatgatttggttatcttaggagatagatacgaagaccatttatgtgcgattgaagaaaatgtaagctgtattattgtgtgtaacaatgcggaagttgcagaggatattcagaaagcagcaacgaaaaatgattgtgtaattatccgttctccgcttgatacctttacgattgcgcgtctgattaatcagagtattccggtcaaacacattatgaaaaaagataatctgattaccttccagaccgatgattttacagaccagattaaagaggtgatggtaaagaaccgtcacagagccttccctgtagtaaataaacatggaaaatatattggaacggtttccagacgaaatttgctgggaatgaagaaaaaagaagtgattttagtagaccataatgaacgttcccaggcagttgataacattgaggcagcggagattctggaaattattgaccatcacagaatcggctctatcgaaaccatgtctccgattgtctttcgtaatcagccggtgggctgtactgcgacgattatgcatcagatgtatgtggaacgaaatctcgaagtttctccggcaatcgcaggacttttatgcgcagcgattatttccgatacgctgatgtttcgttcgccgacctgtacacacagagataagatggcagcaggagcacttgctttagtagccggtattaatatagaagaatttgccaaagaaatgtttacggcaggaagcaatttaaagggaaagacaacagagggaatcttctatcaggatttcaaacgttttacaaccgaacaggtaaactttggcgtaggacaaatcagttctatgaatcaggatgaactgttaagcttaaagaaacgtctgattccatttatgaaaaaagaatgtggaaaaaatggaattacgatggtatttattatgcttacgaatattttggaggaaacatcagaaattatctgttatggagatggaagtggcagattggttgaggatgcctttaatgtaaaagaagaaaatggcggatatattcttccgggagtcgtatcaagaaagaagcagttaattccggaatttatcactgccttacagcagaatagctaa

SEQ ID NO: 642 - DNA, 3675 bp, Firmicutes bacterium CAG:227
atgaaagcattttggaaagatttctttcgggaaatcagtaaaaataaagggcgttttctgtccgtatttttcatcgtcttgttaggttctgcttttttttcaggaatccgctcggcagaaggtgatatgaaagtatcagcagataaatactatgacaatgtcgattatatggatttgaaaatacttggaacaatgggtctgacggatgaggatttaaaggatatccaaaatacagagggagtaaaaaatgtaaccgggggacataccttggaagtcttgcataaagtaggagaaaaagaacaggttgtcaaattaattgcgctgacggacaaagtaaatgagccacaaatcaaagaaggaaggatgccggaaaattcggacgagattttagtggatgagagttttttgagttattcagactgcaaaatcggagataaagtgacgtttgagtcaggaacagatgaggcagttacggattctctgacaggagatacgtttacgattgtcggaactgcgacactgccgtactatatggatttaaacaggggaacaggttcaattggaacaggaagtattaacagttttgtactcttagagccggaagtatttacttcagatgtttacacagaactttatgtacagatagatggagcgaaagaagcagccagctatagtgacgagtatgataaaacagttaagaaagtacaaaagaaaatagacgcattagaagattctgcttgtgacagacgatatcagaccatccaggaagaaggacaacaggaaattgcggatgccaaagagcagattcaggacgcagaagagaaacttgcggatgcaaaacaaaaactggatgatggagaagttcagctttccgatgcaagaaccacgatttccaaaaaagagcaggaactaaacgatggagagagcgagttaaaatcaaaagaagcagaactggaatccggcaagcagaccttagttcaaaaaacaaaagaattagaaagtgcaaagacacagataacggaaaagaccaaagagttagaaagtgggaaacaggctttagaatccggaaaaaaagaactcgaagcaaataaaatacagcttgcacaaaaagagcaggaattaaatgctggaaagacacagcttgaagaagcaaaaacacagtttcagacaaagataaaggagtttgaaacaggaaagagccagtatgaagagaaaaaatctgcttatgaagcgcaaagaagtcagatagaaacagcaaaaacacagctggaagctgtgagtgcaggaattactcagatagaaaatgcgcttactgaaatgaaaaatcagttggaaattttggaagatcagttagccaaaagcgagagttcagatgaaatttatgagacacttttggcacagaagaccgaactggaatcccagataacagcccaaagcgaagcactttcaacacttatcgctcaaaaagaagcgttagaagcaggaatttcggcatttgaatcagcaaaaccagaggcagaagcccggctggaagaggcaagaatacaaatcgaagaagcaggcacgcagattgaacaggcaaaggcaacgctgtcccaaaaagaagaggaattaaatgcagggcaggttcagatagattctgcgaaaaagcagttacaggaagcagaagaaaagataaaacagaatgaagccataatttcggatggagaggcacagcttgtacaggcacagaaccagataaaagagggagaaagccagattttggaagcacaaaaaacgcttgcagatggagaaaaacagcttaccgatgccaagcagacgcttgccaaaggacggacttcccttgaagaagcaaagagtgaattagaagcaaaggtacaggaattagaggacggaaaagcagagtatgaaaccgcaaaaaaagatgctgaaccggaaatcaccgatgcaaaacaaaaaatttcagatggagaagaagaactggcgaaattggaagttccaacctggtatgtctggggacgagataagattacttcaacagaaagttttggacaggatgctgagagaatttcaaatatcggagaatttttcccggttatcttctttttagttgcggcactggtcagcttgacaaccatgacccgtatgattgaagaacagcgccagcagataggaacattaaaggcacttggttattcagatggaaaaattgcattaaaatactttgcttatgcaatggtttctaccgtctcgggtgcacttgcaggcgtggtagtcggagaaaaaatcctgccctgggtcattatgaatgcgtatggaatgttgtatacgggacttccttattacctgacaccgttaaactggcatcagggaggacttgctgttttggcaagtgcaggctgtaccggagttgcgacccttgccgcatgccagaaagagctgatgtcaaagccagctgagctgatgcgtccgcaagctccaaaaaatggaaaacgtatctttttagaacggattgatatcttatggaaacacttgaactttacacagaaatctacagtacgaaacttagtgcgctataaaaaacgattttttatgaccgtaatcggaatcggaggctgtatggggctgatattggttggattcgggcttcaggattccattactgccattgccaagaatcagtttgttaatttatttacttatgaagcaaatgtaattttagattccaacgtttcggaggctgaaaaagaagcccagcagaaagacttaaaagcttatcagggaatcgatgagatgctggaactctattgtcagaatgtagagctgcaaagtgagaaaaagacggtagatactgtgcttgaggtaccaaaaacgttagatggatttgaagatttttttgaatttcgtgaccgtgtaagcggtaaacattatgcctttccaaaagaaggagcagctataagcgaaaaaacagcagatatgcttggggtaaaagtgggagatacggtagaattaaaaaaaggagatacgatagtcaaagtcaagatttctgttattgtggaaaactatgtccgacattatctgtatttgacaacagagacttatgaaagtctgtttcatgagactccgaattataatcagctgttgttaagataccaggatacctcaaaagattatgaggatgcactcggagaaaaaattatgaaatacgacagtgtggcagcaatttcttttacctcggatttaatcggccagattgatgacatgctgcgctcccttgatattgtaattgtggtgctgattgtgtcagcagggctgcttgcctttgtggtattgtataacttaaataatatcaatatcacagaacggcagagagagctggcaacattgaaagtattgggattttatgatggagaagtggcatcctatgtgtatcgggaaaacattgtgctgactctgtttggaatcattgccggaatgggaatcggaaactttttgcaccattatgtaattcagacagtggaagtggatatgatgatgtttggacgaaatgtatttttcagaagttatttttacagcggactcattaccctggcatttgcgttgtttgtaaatggaatgatgttttaccgactgagaaaaattgacatgattgaatcccttaagagtgtggagtag

SEQ ID NO: 643 - DNA, 2148 bp, Firmicutes bacterium CAG:227
ggcattaaagaagatgaaagaaaaactggattaggaggtgcagtgatggcgaaaaaagaagaatatcataatttaaaagacctgcagtcagatgagctgaacctggaaaaagtaatagaaaagattcgggaagaagcaaaagaagaagaaattccagaacgcttgaaaccggaacatttagatgaaattttaaattcacagaaaaagaaaggcaggtggcaggggatgaaaaaaagaaaatatatggtagcggctgcatgggtggcagttttagtcggaattggagtttccagcgtagtacttattcataaaaaggattcggcagaaattggtgcacagacagcttcttcggcaaaagacggaagcggaaacagtaccatttcgcaggaagcttcagcagaagaaaagcaggtggaaggttataaatctgcttccagctatgaagaaatttatcagaaattatttgtagagacaaagcaggcacaggaaacacaggaggcatggtattcgagttcatcgaatattgatgaagattatggaattatgaaggaaagtgctgtggccgatggtacaacctcttcaatggcaaaagcggtttcagaagataatagttcagacagttattcccggacaaatgtgcggacagagggtgtagatgaaggggatctggtaaaaacagatggtacttatatttatacgttaactcgttcaggcagactgatgattacaaaggcagaaggaagcaaattagaaaaggcaggagaaacttctcttgaaagtatgactgacaccatcagtgatatgtatgtggatggaaatacggtatgtatcgtggcctacggatatgacaccgatgtctcgatggaaggagaagatacctatgcggtcaattcgacaaattatacgaaactttacacttatgatgtatcggataaaacaaacatcgtattaaaaggaacaatcaaacaggaaggatattatgagacatcaagaaaagtaggaaattacatgtatctgttttctacctattatgcccaggaagaaaatgcgtctaaagaccatccggaacttttagtgccgaagattaatggagtgccaatacaggcttcggatgtattttgtccggtagagcctcagacagatacgactcagcttgtaatttcttctgtcaacttagaagaaccggataaagtgatggcaagtcgttctttaattggagccggtggaatgtattatgtcagccagaataatatctatgtttgcatgagtcaatatcagacacaggagataacaacacagattgcacgcttttcttatgcagatggagcactggaattaaaagcagccggacagattaatggaacaatccatgacagtttttgtctggatgaaaataatggctatctcagagtagttgtgactcgctatccgaatggatggggtggacaggaaagtaatggattatatgtcctggatgaaaatatgaaagtcagtgggaaaatcgaagatcttgcatttggagaaagtattcagtctgcacgatttttaggagacaccggatattttgtgacttataaacaggtagatccgctgttttctgtggatttaaaagaccctgaaaatccaaaagtgattggagagttaaaggtgaccggattttccgagtatctgcatttttatggggaaaataaactgcttggaatcggacaggaaacggatccggatactggagaattaagaggaattaaattatccatgtttgatatttccaatcctgccgacgtaaaagaagtcgataaaattgtattaaaagatattgatatttacagcccacaagataattataggagtgtgatgattgatgcagatgaaaatatcatcggatttgcaatgggcacttatgataaagtgacttataatctgaaggggtattatggagtttttggttattcagcagaagatggatttacacaggaactgatgcagagtttaagtaaggcaaccggaaattcatccgacagctacaatgtaattaatgaaacaagaggaatttatattggcgataccttttatctgtgccagaatcagggaatctatgcatttgaccggagtgacggatacaaagaaatcggcaaacttgagtggtaa

SEQ ID NO: 644 - DNA, 1797 bp, Firmicutes bacterium CAG:227
cctgaagtggttttagaaaaaagcaggagaaagaagaaaatgagaaaattattgcatcggatagaagaagggatggataacttaaaaattaaaaaaaaattatacatgctttatctcatatgcgttttaatccccattattatcacggatagtgttatctttttcattgttagaagttcagaacaggaaaaacaacaacatgagatggcaaatattgcaaatgcagtaagctataatatcagtaatacgataagcagcataggggaaacagcaaaaagtatttataccagtaaatatatcaattcgtttttgatgcaagaatatgaaagtgctccggaatatgtgttgacttatcaggagtttttcaaggaccatttacttgaaaatatattaggaatgaataatttagtatttactttttacacagataatgaaacgatagtaaatggaggaaaggtaaataagattgaaaatatcagagaaacaaaagcgtatcaaagcttagtcgaacagaaaaaaagcaaagggatttttttcgtatatgatgagagcagaaacaaaatatcaaaaaaaaggcagattgttttcttgcagaaattagatttctattcaccgaataaagaaaaaatattaaaagtagagttggattatggaaaagtaagcgacgaactaaagaaaatgaattatgataatgaagttgaaattttaaatgagggaagaattgtgctttccaataaaaagcatggaacggaaagtgaaaattatgaaaaagtaaagaaaaggagtaaatacacttattgtcaggaggtaaatctttacgggacagaacttgaaatccgtatagataaaagtgagaaaaccgggtgggatagtcttatgaataaattcccgattatattattacttatttttgtaaatgtaatacttccggttttatttgtttatttaatcaatcgttcttttaccaaaaggattacaaaattaagtaaagtatttcagtccgtaaataatgaacaactgatttatatgtcagatgaacggggaaaagatgaaattggaagtatgattcgcaactataatcgtatggtagagagaacgaatcatttaattgaaacggtgtataaaagtaaaatcagagaacaagagattatagtaggaagaaaaaatgcagagttacttgcattgcacagtcagataaatcctcattttttatttaatgcgcttgaaagcatccggatgcatagtattttaaaacaagaaaatgaaacggcagatatggtagaaaaacttgcattaatgcaaagacagtatgtagagtggggagcagactgtgtggaaatagaacaggaaattgaatttgtaaaagcatatttggcacttcaaaaatatagatttggagagcgattaaattatgatataaatataagtccaaaatgtgagaagaaatttataccaaaacttactctggtcacatttgtagaaaatgcatgtgtacatggaattgaaagtaaatcctctccgggatggatttttgtaagaatctatgaaaaaaacgaaaatttatatattgaaatagaagatacagggaatggaatgagcgaaaatgagtatcaggatttacaaaataaaatgcaaaatgcaagtattgaaatgctgaaagtaaaaggaagagtaggggtgattaatgcttgtttaagactgaaaatagtttcagatgataaagtgaaatttacgattgaaggagaagaaggggtaggaaccatggttatgattcagatacctgctgaatatgtatga

SEQ ID NO: 645 - DNA, 1380 bp, Firmicutes bacterium CAG:227
atgtatgaaatagattttaataaaccattacacattcattttatcggtatcggtggaatcagcatgagtggtcttgccgaaatccttttaaaagaagattttaaaatttccggttcggacgccaaaccttctgaccttgtaacgcacttggaaggtctgggagcaaaagtctatatcggacagcgcgcttctaatatcacagacgatattgaactcgttatctacacagctgcgattcatccggataatccggaatttgcctgtgcaaaagaaaaacagattccaatgctcacaagagcagaactacttggtcagattatgcgcaactatgaaactccaattgccgtttccggaacacatggaaagacaactacaacttccatgatttcccatattctcttagaagcagacgctgaccctactatttccgttggaggaatcttacctgcaatccatggaaatatccgtgttggcgaatctgaaacctttgttacagaagcctgtgaatacacaaacagctttttaagctttttcccgaaaatcagcattatcttaaatatcgatgcagaccatctggatttctttaaagatattgatgatattcgccattctttccgattatttgccgaaagacttccaaaagacggaactttaattatcaatcaggatattccaaatgttgccgaaatcacaaaggatttaccatgcggaattatttcctatgccctggaacaggacgcagattacactgctgcaaatattgaatttgatgaaactgcacacgcttccttcgattgtatggaaaaaggtactttacttggtcatttttcactttccgttcctggcattcacaatgtctcaaatgcattgtctgccattgcactgggaagaaaacttggtctttccctggaatctatccagaaaggtctcctgcattttggaggaacaaaccgtcgtttccagtataaaggaaaagtgggaggcgttaccgttattgatgactatgcacatcatccgacagagattgccgcaacactgcgcactgcaaaaaactatccacataagacaatctggtgtgtattccagcctcatacctataccagaacaaaagcactgatggatgagtttgcccaggcattaagccttgcagataaagttgtgcttgcagatatctatgcggcacgagaaacagatacactgggaatttcttccaaagaccttcaggaaaaaatttccttacttggaacagatgctcattatttctctacttttgacgaaatcgaagatttccttctggaaaactgtataccgcaggacttattaattacaatgggcgccggcgatgtttataaaatcggagaacatctgctcgggctgtaa

SEQ ID NO: 646 - DNA, 2178 bp, Firmicutes bacterium CAG:227
atggcaacaatagcgttggcaggaaatcctaactgcggaaaaacaacattgttcaacgcactgacgggttcaaatcagtttgttggaaactggccaggtgtaaccgtagagaaaaaagaaggtaagttaaaaggacataaagatgttacaatcactgaccttccaggtatctattccttatctccgtacacactggaagaagtggtagcaagaaactatctgattaatgaaagaccggatgcaattttaaatatcgtagacggtacaaacattgagcgtaacttatacttatccacacagcttatggaacttggaattccagttatcatggctgttaacatgatggatattgtagaaaaaaatggtgacaagattcatattgacaagctggcaaaaagtcttggatgcgaagtagtagaaatctccgcattaaaaggaactggtgtacagaaagcagcagaaaaagcagttgtaattgcagaaaagaaaaaccgcaacattccggtacataaatttgcaagtgaagtagaagcagtcttagaatccatcgaagagaaactttccggtattgttccggaagaacagaagagattcttcgcaatcaagctcttagaaagagatgataaaattagcgagcaggtaagcaatcttccagatgtttctgctgaaatcgctaaaattgaagaagagatggatgatgatacagaaagtattatcacaaatgagcgttatgtttatatttcttctattattgaccattgctttacaagaggaaagaaagataaagtaacaacttctgataaaattgaccgaattgtaacaaaccgcttcctggctctgccaatctttgcggtaattatgtttattgtatattatgtctctgtaacaacagttggtacttgggcaacagactgggcaaatgacggtgtattcggtgatggatggagtctgtttggtctggttgatgtacctggtgtgccggttatcattggaaatctgttagacgcagtaaactgtgctccatggttagagggtctgattctcgacggtattgtagccggtgttggtgcggtacttggtttcgttcctcagatgctggtattatttatcttccttgcatttttggaatcctgtggttatatggcacgagttgctttcatcatggatagaattttccgtaaattcggtctttccggaaaatcatttattccgatgttaattggaaccggttgtggtgtacctggagttatggcttcccgtacaatcgaaaacgaccgtgaccgtaaaatgacaatcatgacaacaacatttatcccttgtggtgcaaaacttccgatcatcgccttaatcgcaggtgcattattcggcggtgcttcatgggtagcaccaagtgcatattttgttggtattgcagcaattatctgctctggtattattcttaagaaaacaaaaatgttttcaggtgagccggcaccattcgtaatggagcttcctgcataccacatgcctaccgtaagtaatgtactgagaagtatgtgggaaagaggctggtctttcattaagaaagcgggtactgttatccttctttctacaatcgtagtatggtttacttcttacttcggatgggtagatggacagttccgtatgttagaagatttggaacttgatcacagtattttagcaagagttggtagtgcagttgcatggattttcgctcctcttggatggggaaactggaaatcagcagtggcagcaatcacaggtcttgtagcaaaagaaaacgtagtaggtacctttggtatcctttatggattctcagaagttgcagaagatggtacagaaatctggggaagccttgccggaagtatgacagcagttgctgcatattccttcctggtattcaacctgctttgtgctccatgctttgcagcaatgggagctatcaaacgtgaaatgaacaatgcaaaatggttctggtttgcaattggatatcagaccctgcttgcttatgttgtatctctttgtatttaccagattggtactttaatcacagctggtacattcggaattggtacaattgtagcattcctcttagtagccggatttgtgtacctgttagtaagaccatataaagaaagtacaactttaaaaataggagcagttcgtactgcaaaataa

SEQ ID NO: 647 - DNA, 1863 bp, Firmicutes bacterium CAG:227
atgaagaagaaaaaatcatttttgctttcatttttccttgccatgctttttgttgtattaggcagtgtgaatgtaaaagcagatgaaacattggaaggatatatttatgtcaatccaatgtatgaagaccttgaggggaattttgattttgagtctgattttgagctgtattctgagtctgatagtgaggaatcagatgaagaggatggaattgacacttatgattcgaggagtgttcagtatacgagtgacaagcagagtctgataaagacattcagacagcagttagtcaatcgtgcaggaacaattgatttgtattatcactgtaatcagaagattacacaggatttttttgacgagttctctgctgaactgtttaatggggcagtggcacatacgggtgtaggaaaagagggagattatatcagatggcactaccagggatggcgtgtcaatgcaaattataaaacggaccgcaatggtggatacaatttgaatattacttataagatgtattatttatcagacgcatcacaggaaagtcagatggatcaggcggtttctaatgtgttgaagtctttaaatctttcaaataaaacagattatcagaaaatcaaagcgatttatgattatatatgttccaatatcacgtatgattatgtaaacttaaatgacgattcctatctcttgaagcacaccgcatatgctgcattgattaataaaacggcagtttgtcagggatatgcaacattattttatcgtctgtctttggaggcaggggtagatacgagagttattaccggagattccggaggtccacatgcatggaacattgtgaaactgaatggaaaatattataatcttgacagtacatgggatgctggtttatcaagctactattatttcttaaagagcatgaatgatttttctaaccatacgagatatgaagaatatcagacatctgattttacgtctacttatccgatggcagagaaatcttattctgaatcaggaaatcaagagccaattgaaaaagaacataattatggacagccaatgtatgtatgggcaaatgaccacaaatcgattaccgcagcgcgtatctgccagaatgattcaagtcatattgagcaggaaacagcagaagcagaacgcactgttataaaagagccaacctgcacagaaaaaggcagtgttctttggcgtgcggtgtttgaaaatccggcatttgaagcacaggaagaagtggttgaggaacctgcgcttggtcatagctttaaaaatggagtctgcgtcagatgtaatgcgaaaatcacaggacgctggatgaaatcaggttctaaatggtggtatcgctatgaggatggttcttatcctaagaatggattatataaaatcggcaatacatggtatggatttgatacttccggttggatgaaaacaggatgggctgcttttgataaaaactggtattattttgcaccaagcggagcgatgaaaacaggctggatagcagaaaataaaatctggtattacttgaaatccgatggaaagatggcaaaaggctggcttagagtagacggtgcctggtattatatgaatggaagcggacatatgctgaaaggtttcattacggtaggaaacggaaaatactacatgaatggaagcggaagaatggtaaccggctggaatgtaataaatggttactggtactactttacctcaagtggaaagatggcgaccggctggcagaaaattgataataaatggtactatttaagttcagatggtaaaatggcaaaaaatacctgggtcggaaactggtatgtaaatggctcaggcgtatgggtgaagagtagataa

SEQ ID NO: 648 - DNA, 2226 bp, Firmicutes bacterium CAG:227
gtggaaaacagccggctaaaaaagacttgcctatataagaactcaaaaacggatatactaaaaaaaagaaaagaggagaaaatcatgaaagacaagatttttggaattttgcagagagttggacgttcttttatgcttccaatcgcaatccttccggtagccggtctgttactgggacttggtggttcttttacaaatgagaccatgttaaaagcatatggcttattaaatgtaatgggacctggcaccataatcaatcaggttttacagattatgaatgccgcaggaaatattatttttacgaatcttccgattatatttgcaatgggagttgcaatcggaatggcaaagaaagaaaaagaagttgccgcactttcagcggtaatcgcatttttcatcatgcatgcatctattggagcattaattgatattaacggcggagcagaagctatgctttctggtgcaactacagatgtatgtggaatcacttccttacagatgggtgtatttggaggtattgttgtcggacttggtgttgcagggcttcacaatcgcttttataaaattgagctgcctcaggtattatccttctttggaggaaccagatttgtaccgattatttcagggcttgtctatgtagtggttggtattgcaatgtttttcgtatggccgaccattcaggccggaatttatgcagttggagatttagtacttcgttccggttatgccggtacctgggtctatggatttatggaacgtctcttaattccgtttggtcttcatcacgtattttatcttccattctggcagacagcagttggtggtaccttagaagtaggcggacagatgatagaaggtgctcagaatatcttctttgcacagttatctgatccgagtgtagaacattttgcggtatctgctacaagatttatgtcaggtaagttcccacttatgatttttggtcttccgggagctgcatttgccatgtatcgtactgcaaaaccggaaaaaagaaaagcggtagaaggtctgcttttatctgcagccttaacttctatgctgacaggtattacagagccacttgaatttacattcttgttcgtagcaccattattatacggagttcactgtgtatttgccggacttgcttatatgctgatgcatatcttaaaagtcggagtaggaatgacattctccggtggatttattgatttattcttatttggtattttacagggaaataaaaagacaaattggatttggattgtagttgtcggagtggtatacttcattgtttactatgtgctgtttagtttcctgattaaaaaattagatttaaaaactccgggtagagatgatgcagaagaagtaaaactttacacaagagcagatgtcaatgccagaaaagaaggagaaaaaagtgcatctgcagaggaccaggtttctgaaggaatcttaagaggtcttggtggtaagaaaaatatttcagacgtagattgttgtgcaaccagacttcgttgtaccgtgcataaatcagagctggtaaatgatgcaattttaaaagcaacgggagcatccggtgtggtgcataaaggaaatggtgtgcagattatctacggaccaaaagttactgtaattaaatcaaactttgaagattatctggaaacagctccggatgaagaacttcatacaatggaagaaacaaccgattcaaaaacagaagagaaaacagacgaagaaaaacagtctggaaaagtaaaagaaacgattatcgtttccagcccgattaccggaattgcagatgatctggcaaatgctccggatgatgcattcgcaggaaaaatgatgggagacggagcagtggtaacacctacaaatcctgtagttgttgcaccggaagatggagaaattgcttttgtttttgataccaagcatgcaattggatttatgagtgacagcggactttccatgttgctgcatatcggaattgataccgtaaaactggatggaaaaggatttacctgctttgtagaaaacggacagaaagtgaagaagggtgataaattgctggaacttgatctggagtatcttaaagccaatgcgccttctttatgttctccgattctgtgtacagaattagaggataatcagaaagtcagattgcttgcaagcggagaaatcaaagcgggagaaccgttatatgcaattgatatttatgaagcataa

SEQ ID NO: 649 - DNA, 1989 bp, Firmicutes bacterium CAG:227
atgagaatttatgtaaatgcaaatgcaggtcgtgatggaaatggtactgcaaacatgccgtttcgtcatatcaatgatgcagcaaaagtagcaaaggcaggagatgaggttttagtttctcctggtgtttatcgtgaatatgttaatccaattcatgcaggagaagaggatgcacgtatttcttatagaagcacccagccgcttggggctgttattactggtgcagagcaggtaaagagctggcagaagtatgaaggaaatgtatgggtatgccgaattgcaaacagcatttttggaaattataatccatatactacggttgtttatggtgactggtactttgcaaaggcagacaagcacacaggctgtgtttatttaaatgataaagcactttatgaggcagtttctttagaagagtgcatgaaaggtgaagtgtatgagtgcagctgggtaccggaagattctatttataaatggtacaccgagcaggatgaagaaaaagatgaaactattatctatgcaaacttccagggtaaaaatccgaatgaagaaaatgtagaaatcaacgtaagacgtgagtgctttatgccggaaaaaaccggagtaaactatattacagtaagcggatttaatattaataaagcagcaacaacatgggctcctccagcagcatttcaggatggtatgattggaccacactggagcaagggctggattatcgaggactgtgatatttcaaacagtaaatgtgccggaatttccgtaggaaaatatttagaccctgaaaatgaccattattttacttataaatatgtaaagagtccgactcagatggaacgtgatgcagtctgcagaggacagtatcatggctggttaaaggaaaacatcggtggacatattattcgccgtaataatattcatcactgcgaacagggcggtattatcggtcgtatgggcggtgtattcagtgtcatcgaggacaaccatattcatcatatcaataacatgatggaacagggtggagctgaaattgcgggcattaagatgcacgctgcaatcgacgtaacaatgcgccgtaatcacattcatcattgtacaatgggtatctggtgtgactgggaagctcagggtacaagactgactcagaacctgttacatgacaaccagaaaccggcttatgcaaagagcttaaaaggcggtatgatgtctcaggatatctttgttgaagtaggacatggtccgactttgattgataataacgtaatgctttccgatgcaagtttaagatttgcaacagagggtgttgcactggtacataacttaatctgtggtgcgctgacttgcgttggtgatggaaccggatggcgttatacgccatatcatatgccacaccgcacagaagtaatgggatttatgaccattcttcatggggatgacagaatttacaacaatatctttgttcagaaatggccgtcagaagatgtgattattccacacgattctgatgaaggatttgattctgaaaatagaaaagcaggaacctggatgtttgatgaatatccgacttatgacgaatggatttctcagtttgatttcacaaaaccggttgatatgaagaaattagagccggtacactttgggcatcttccggtatggattgagggaaatgtatacttaaatggcgcagaagcgtgcaaaaatgaagtgaatggactggttatttcagataaagaagcaaaagtggatcttgtagaaaaagagggaagctattacttagatacgaatgtatatgatttagtcggtgagtttaaagaccgcatgattcattccgatatacttggaaaagcatttgagccggaacagagatttgaaaatccggatggaacagccattcagtttgataaagactattttggcggacaccgtggcatggatgtcattcctggaccatttgcacaggcagaagatgcgaagaaagtgttgttttaa

SEQ ID NO: 650 - DNA, 2376 bp, Firmicutes bacterium CAG:227
atgacgtggaatctgttatcaaatatcagggaaaatagaaatcaggtgaacgaagatatggaaaaaaatcatacatcatcgcttcaggacgacgaaattgctaaaattaaaaaagcagatgcaagcgtcaaaaccatggaagattttaccagtccggaggttttatataaggaactgatttcaagtgtaaagaagtaccatccgtctactgatatttccatgatagaaaaggcgtaccagattgcaaataatgcgcataaggggcagctgagaaaatcaggagaaccctatattattcatccgctttgcgttgcgattattctggcagatttagagctggataaagagacgattgttgcagggcttttgcatgacgttgtcgaagatacggttatgacaaccgaagaaattaccgaagagttcagcgcagaggtttctcttttggtagacggagtaaccaaactgggacagttgagttactcggcggacaagatagaagtgcaggcggaaaatttaagaaaaatgtttcttgccatggcaaaagatattcgtgttattttgattaaactggcggaccgtctgcataatatgagaacattgaaatatatgccgcctcataagcagaaagaaaaagccagagaaaccatggatatctatgcaccgattgcacagcgtcttggtatttcaaaagtaaaaatagaattagatgacctgtcattaaaatatctgaaaccagatgtgtattatgatttggtagaaaaaatcaatctcagaaaaagtgaaagagaactttttgtgggagagattgtaaaagaggtaagacagcatattgagaatgctggaattcatgcacagattgacggacgtgtcaaacattttttcagcatctataaaaagatggtcaatcaggataaaacactcgatcagatttatgatttatttgcagtgcgtattatcgtagataccgtgagagactgttatgcctgtcttggaattattcatgaaatgtataaaccagttccggggcgttttaaagactatattgcaatgccaaaaccaaatatgtatcagtcgcttcatacaaccttgattggaccgaaaggacagccgtttgaaatccagattcgtacgtttgaaatgcacagaacagcagaatatggtattgctgcccactggaaatataaagaggtttccaataatggcggaaaggaaaatacaactcgtcaggaagaagaaaagatgagttggctgcgtcagattctggaatggcagagagatatgtctgacaataaagaatttttgagtctgttaaaaaatgacctcgatttattttcagaaagtgtatactgctttacaccggcaggagatgttaagactcttccaaatggctcaactccgattgattttgcgtacaatgtacatagtgcagttggaaataaaatggttggagcgcgtgtcaatggaaaattggttccgattgagtatgtgattaaaaatggagacagaattgagattatcacttcacagaactcaaaaggtccaagtcgtgactggttaaaagtagtaaaaagtacacaggctaaaaataagattaatcagtggtttaaacaggagagaaaagaggacaatatcttaaaaggaaaagagatgttgaaccagtatgcaaaagtaaaaggtttttctcttggaaatctgacaaagcagaaatatctggaagccgttatgaaaaaatatggttttcgtgactgggactccgtacttgctgccgttggacatggcggtttaaaagaaggtcaggttttaaataagctgttagagctgtataataaagaccataaggcagaactgactgatgagaaagtattagaggcagcatcggagaacaataaagaaaagattcgtccacataaaggaaaaagcgggattattataaaaggaatgaatgatttaaatgcccgttatccaaaatgctgcaatccgcttccgggagatgaaattgtagcttatgttacacgtggacgcggtgttacgattcatcgtacggattgtgtcaatgtcttaaatatgtcagcagaagaacgccagcgtctgatggaagcagaatgggagagtacaacaggcggtggagaaaatgaacagtatacggcagagattacgatttatgcgtataaccgtaccggcttgattgtagatgtttcaaaaatttttacagaacgaaaaattgatatttcatcgattaataccagaacaagcaaacagggaattgcaaccatcagtctggcatttgatgtaaagagtaaggaagaactccagagtctgattacaaaaatcagacagatagagagcgtaaaagatattgaacgaacaaccggttga

SEQ ID NO: 651 - DNA, 1959 bp, Barnesiella intestinihominis
atgagaaaggcctgtattatcatattatccgtacttttctgttcacttttttcagaggctaagaaaaaacaggatattcctgctccttatgcatggagtattacccagccgttagggtcgagatatgatgttcctatggatactctcatgcacaatttttacagcacggatattccttccagctattcaacggcttatgggacgaccgggaatctcggcgctgctgctttttccaaaatatttttcgacaggcctttaccctctgaatttatatttaaagatccattcggccattggatacaaacagcctcttcatggaaattctataattcacacataccttatacccaactatcttatctgacaggaggctcgaaacaaactgcccaagatgatttaaaggctgttttctctggaaattttaatcagaaactggaattcggaggtagcatcaattatatcctatcgagaggccactaccagcatcaagcgacgaaagaccttgcatacagtatcttcggaagctatttgggagaccgatacgatattcaattttttcttaatacatataatttcgtaaaccaagaaaacggaggtatctcggacgatacatacatacttcgtcccgaagaggtacaaggaggacaatcgagcgtaaacacccaaacgattccaaccaatctgacggatgcatataaccgtattcgcggtaaagaatactatgccacccaacgatataaattcgggttctatcaagaagaagagcaagacacaaccgtgatacgtacattcattcccgtcaccagcattatacacaccatcgagtataacgaaaataagcataggtttgtcaatcaatcggcaaccgaagacactacctacttcgcgaacacctatttaggtcttggagggacgaatgaagaaacccgataccagtctatacgaaatactttcggaatatcattactcgaaggattcaataagtatgcaaagatgggattggcggcttacgccacttacgaatatcgccatttttccctgcctcaggacaccctttcggctggaactacaatagagggattgactccacgtcccgatatatccaatcctcgcagccacggagaaagtcttctatgggtcggtggagaaatttcaaaacaaaagggagaattactgacttatcatgtaaacggaaaattcggacttgccggagcaatcataggtgatatcgacatcactgccgatattcgcagccgattcaggctttggaacgacaccgttcaactaagggcttatggctttttcaaaaacaccgaaccttcttatttctataagaaatacacttccaatcacttcatttgggacaatgatttcgggaaaacacgtcgaatgagagtcggaggtgaattcaacataaaacggtggagaaccaaattgaacgtcggtgtcgaaaatatacaaaattatatctattttgacaataatagcttgccccggcaagaaagctccatgatacaagtattccatgcaaaactcaatcaggattttaaattcggagtttttaattgggaaaacgaaatagtttaccaaaaatcgagtaaaccatcgataatccccttacccgaattgagcgtatatagcaatatgtaccttttattcagaatcgccaaagtattgcatgttcaattaggtgtagattgtcgttactatacaaaatataaaagcgaggctttccaaccggcgaccttaacttttcatacccaagatgaaatcgaagtgggaaattatcctttcatgaacgcatatataaatatgaaattgaaacaaactcgtttctttgtcatgatgtcgcacgtgaatcaaggaatattcgggggaaataactatttctcattaccacattatccgttaaatccaagtatgtttcaaatggggttatccatagatttttctaattaa

SEQ ID NO: 652 - DNA, 1908 bp, Barnesiella intestinihominis
aaaatcatattattgcttatgaaaaaaattacatcaatctgtttgactatcttcttaggtgtcaacattgtttcggcttatgctgctcgtggcgaacaactcgctattttatcggaagatttttcggcttttaccgaaggaaccgaatccacgcctgccgagagtgaactttcgacaggaaatgcaatgattcctatggagttcacgcacggcatacagtggaaaggacgaggtattcatcaagccggaggagtttgcgctgtactctcttatgatgactatacatatggggagacacaggggtggattcaaacgccgtataccgatgtgcgtttggacgatggtaacttcatactgcgattccgagcacgttcgattgcccaaacgaaggactcgcttatcctttatttgcaagatcaatacagtaacaactactatacgagtgagaaatgcaccatcaccgaccaatggcaaacgatcgaagtcccttttcagcacaatttcggtatggggagtcgcttggcctatgtacaaatcggggcatacaacgattcgtggctgatagacgatattgaaatcatacaagacgtgtacgatatttgctcaccccacgcgatctcacccaaagatgtaacattcgagcattttaccgctcgatgggatgccgtgtggtcggcaacctcttatcttacgtctgcttattattatgccgatgaagagaaaacacaccgtgtatatattgcagagaatatcgaaacgacggaatgtgaatgtcaagttaccggtatggaaaaaggaaaaacttatttcttcacggtaaaagccaagaatgacaaatacacttctgttgaatcgaacgaggtacaagtgtatgtccccattcgtactatgccagtgcccgaattagccgatccgaccgatataaccgatacaggatatactgctcgatggtatcctgttgagcgtgcaatgggatatgccgtgcgccactttttgaaacatacagcccgatccgatgaagaatacacgctggtgcacgaggatttagaaacgatcacggagggaacatttgaatggcccggttacttttatgattatgaccttaataaatatagcaaagtgcccggttggggtgtcaatatgggttgtacggttaaaggaatgataggtatcgataattactaccgtgattttgaggaaggaaaaatcacgtctcccgaatttgatttgtctcgtaacgatggcaaatacacggtgcaactgaatgtgtatgcgattcatgctggcgatactgtctatgtggatagttattgtgaaggtgaaaaagaacatcgcgagtatctgatgaaaaccgtgggagagcattctttttccgtagattttactaatgggtcggctcaaactcattttaccgttactttctcgggaacggataaaatgtttatcgatgatattttcgtaaagcaaattctaagagccggagagagttatacttctgcattggcatcgttcgaagtggaaggtatcgataacacctcgtacacctttaccgaccttacgggttctgaaagcgatgaatatctttattctgtagcttcttggtcctattcgttagatgaagaaggaatttggggacccaacgtatattcggagtattcagaacctcaaatcgtacgactctcttcctccatcgaaaatgttgatggtatagactctgataaagtttatgctcataacggaatcttatatgtaggggttgcccgagatgctcttgtccgaatatatactatcgagggtaagttgatacttagtagacaaattacaataggcaaacatgaactggatttaccgatacacggattttaccttgtatatataaatgatcattgttataaagtgagtttgtag

SEQ ID NO: 653 - DNA, 1506 bp, Barnesiella intestinihominis
atggttatcagtcctgaaaatatattgttggtaggagccattttattgttcctgagtgtccttgtcggaaaaacaggagcgaaatttggtgtaccggcgttgctattgttcctcggtgttggaatgcttgccggttcagacggtttcggtatttatttcgatagtccgcaaatagcccagtttataggtacggttgcactttgtatcattttgttttcgggtggaatggatacacattatcgggaaataaaaccaattttagccccgggtgtgactttggctactttgggagttttaatgacaacgattataacaggattattcatttattcgttgtccgatcttttgccgggtaattttcagttaggattgttagaatccatgctgttggctgctgttatgtcatcgacagattcggcatccgttttttctattttgcgttcgaaggggatttctttgaaagagcgtttgcggccgactctcgaattggagagcggtagtaacgatcctatggcctatatgcttacgatacttttgattcaggttattgagattggagttatcgattggcctcattccatcgttttgctttttatgcaactgtcgataggggcggctgctggatttgcgttggggtatgctattgtctggattataaatcgtatcaatgtccctaatgaatcgctttatccggtattgttgttctcttgtgtttttttcgtattcgcttttaccaatcttttgcaagggaacggatatttggctgtctatatagcagggttagtcgttggaaatcggaagttggtgcacaagcgtagtttgactacatttttcgatggttttacttggcttttccagatagtcatgtttttaacactcgggttgttggtgaatccttcggagttgcctgctgttgccggagtgggattgttggttgccatattcatgattgttgtctcgcgtccgatatctgtatttgcatgtttattgcctttccgtaggtttacgactcgggctcgtgtttatatttcgtgggtagggttgaggggggctgtccctattatttttgcgacctatccgcttatgtcggcagaaattcctaatgctcgtatgattttcaatatcgtgtttttcgtgaccattgtctctttgttggtacaaggaactacggtaagtgcgatggccagatggctgggattggtggggaagagcgaggaaaaagaaatctttaatgtcgctttacccgatgaaataaaatcggcgatgagcgagatagagttgacggacgaggctctatcgggaggtaataaactaatgaatctttcattgccggataatacgttggtcgttatggtcaagcgcggagaacaatattttgttcccaaaggacatactcatttacagagtggagaccgtcttctggtgatttcagataacgatgaggagctacgtaaaagctatgaaagtttgggaatcagccgttataccatgcgaaagaatcgttaa

SEQ ID NO: 654 - DNA, 2055 bp, Barnesiella intestinihominis
tatatgaaaaaaattgtttgtacaatggcttcattgcttatcttagcatcttgtgctaccaaacaggaaaaagacgacttcgattacaccgtagaatcgtttgccgatcttgaaatcctgcgttacaaagttcccggattcgaggaattatctttaaaacaaaaagaattggtttattacctctccgaagctgcggcatacggccgggatatactttatgaccaaaacggaaaatggaacttggccattcgccgcactctcgaagcaatctatcaaaactataccggagaccgcgaaagtcaggatttcaaaaattttgaagtttatctgaaacgggtgtggttttcaaatggaattcaccatcactacggctgtgacaaatttgttcccgaattttcacaagaattttttaccgaagctgttaaatcgctcgaccctaaaacacttcctctaactactggtgcaagtgtagacgatctactcaatacattgactcctgttattttcgatccctcggtcatgcccaaacgagtaaatcaagctgccggtgaagacctcatcgtcacctcggcatgcaattattacgatggtgtaactcaggccgaggcagaagcgttttacaacaaaatgaaaaatcccaaagacgaaactcctatctcgtacgggctgaatagtcgtttagtaaaacgtaacggaaaaatcgtagaagaaacctataaagtgggcggactctataccgaagctatcgagaagattgtatattggctcgaaaaagctgccggcgtagcagaaaacgaacaacagaaagaagtcatcgagaaactcatcgattattaccaaaccggtgatttgaaacaattcgacgaatatgccattctctgggtaaaagatctcgattcccaagtagattttgtcaacggctttaccgaaacttacggcgatccattgggcatgaaagcgagctgggaatctatcgtcaactttaaaaatctcgaagcatcggaacggactcatacgatcagcgataacgctcaatggttcgaagacaattctccggtggattctcgattcaaaaaagataaagtaaaaggtgtttcagccaaagtaatcacagcggccatgttagccggagactgttacccctccacccccataggtatcaatttacccaattctaactggattcgccacattcacggatcaaaatcggtaacgatcgaaaacattaccgaggcttacgagaaagccgcgcaaggtaacggattcaacgatgagttcgtatggagcgataccgaacggaatttgatgaataactacctcttccaagccgacaaccttcacaccgatttacacgaatgcttgggtcatggatccggtaaattgttacccggtgtagatcccgatgcattaaaagcatatagctccacattggaagaagctcgtgccgacttgttcgctctatattatatggccgatcccaaaatattggaattaggtcttcttccttcggaagatgcttacaaagcagcttattacaaatacatgatgaacgggctcatgactcagctcacccgcatagaaccgggaaaaaacatagaagagtcgcacatgcgtaatcgccaattaatcgcccgttgggcctacgaacatggtaaagccgacaatgtcgtggaatttgccaaacgtgatggaaaaacttacgttgtcatcaatgattatgaaaaactacggagtttgttcggtaaattactggccgaagtacaacggataaaatcggaaggtgattacgaaagcggtaaaaacttagtcgaggagtatggagtaattgtcgaccaagatttgcacaatgaggtattggctcgatatgaaaacctacacatagctccgtacaaaggatttgtaaatccggtctatacacctatcaccgacgagaacggaaatataaccgacatacaaatctcctataacgaaggatatgccgagcaaatgttgagatactccaaagactattctcctctgcctatctatacgtctatacccgttgtttgtaaataa

SEQ ID NO: 655 - DNA, 1290 bp, Barnesiella intestinihominis
atggggaatctgagaagcagtgtgtatgaagtcgttttggagcgattgaatcggatattttccgattttgataatgtgtatgtttctttttcgggaggaaaagatagcggtgtgcttcttaatttatgtatcgattatattcgccagaataaattgaatcgtagattgggggtatttcatatcgactatgaagtccaatatgaggagacgacgcgttatgtagacagagtattggcatctaattccgatatattagatgtatataggatttgcgtcccgttcaaggttgcgacgtgtgcttcgatgtatcaaaactattggcgcccgtgggaggactctatgcgcccgttatgggtaagagaaaaaccagaaaactgttatacgaaagaagatttcgatttttatacagatgatttatgggactatgagtttcagattaagttcgccgaatggctgcacaagcggaatgcggctcggaggacttgttgcctcatcggcattcgcacacaagaaagtttcaatcgttggcgcacgattcatagcgacaggaattacaagaagtataaaggattgaagtggattcgcgagatgaaatatggcatttgcaatgcctatcccatacacgattggctgacgaccgacgtgtgggtcgctaacggccggtatcattgggattataataagttgtacgatctctactatcgggccggggtcccgttggataagcaaagggtggccagcccgtttatatcgcaagccatatcgagcctccgtttgtatcgtgcgatagatccggatatgtgggggaaaatggtaagtcgggtcaatggggtgaattttgccggattgtatgggaatacgtctatgatgggctggcattctatcaaacttccacccaatatgacatgggaaggatatttggattttttgttgaaaacgcttccggaaaacactcgtaaaaattaccagcgaaaattgtcggtgagcatgaacttctggcgggataaaggggggtgtctggccgatgaaaccattcgaaagctggaaaagatgggtattcctattaccgtgggcgaccattccaattacaggaccgagaaaaaacctgtacgaatggaatatttagacgatatcgatatccccgaatttaaagaactccccacatttaaacgcatgtgcatatgtattcttaaaaacgatcatacatgcaaatacatgggcttttctttgaataaggccgagaaagaacaaaaagaacgagtgatggaaaaatataaagcattgatttga

SEQ ID NO: 656 - DNA, 1797 bp, Barnesiella intestinihominis
atgcaaaaaatcagaaacattgcgattatcgctcacgtcgaccacggtaaaactacgttggtggataaaatgttattggccgggcatctctttcgcgagaaccagaattccggggagttgatattggataataacgatttggaaagggagcgaggaattacgattctttcgaagaatgtttctatccgttataaggattacaagatcaatgttatcgatactccggggcacgccgatttcggtggggaggtagagcgtgtactcaacatggccgacggctgtttgctgttagtcgatgccttcgagggccctatgcctcagactcgtttcgttttgcagaaggctattgaaatgggattgaaaccggttgtggtcatcaataaagtggataaacctaattgccgcccggacgaagtccaagagatggttctcgaccttatgtttagtctcgatgcaaccgaagaacaacttgatttccccacaatatacggttcggccaaacagggttggttttcgacagattggaggaaaccgaccgacaatataaccgctttgctcgatgcgattatcgagtatatacccgaaccgcagtatctcgaaggtacaccccagatgttgattacttcgctcgattattctccttatgtgggacgtattgctgtcggccgtgttcatcgcggtgagctgaaagagggtatggacgtggccttgtgtaagaaagacggctcggttgttaaacagcggattaaagagctcgatgttttcgagggtatgggacgtgccaaagttcagtcggtaggttcgggagatatttgtgctctcatcggtatcgagaatttcgaaattggcgataccatagccgatgtcgtcgaaccggaggctttaccgagaatcgctatcgatgagcctaccatgtctatgttgtttacaattaacgattctccttttttcggtaaagatggaaagtatgtgacttcgaggcacatagccgatcgtttgacaagagagttggataaaaatctggctttgcgtgtggagcggggcgataccgatgatgcgtggactgtttatggacgtggagtgttacatttgtcggtcttgatagaaactatgcgacgtgaaggatatgagttgcaagtaggacagcctcaggtaattattaaggaaattgacgggcagaaatgtgagccggtggagttgttgacaatcaatcttccagaggaatatgccagcaagattatcgatatggttacacgccggaaaggtgagatggtctcgatgactacgcagaacgatcgcatacacatcgagttccatattccttcgcgtggtattatcggattgcgaaccaacgtgctgaccgcttcggccggagaagctattatggctcaccgctttttggaatatcagccctggaaaggcgatatagaccgccgtacaaacggctcgttaattgcgatggaagcgggtacggcctatgcctatgctatcgataagttgcaagatagaggtcggttctttattttccctcaggaagaagtttatgccggacaggttgttggggaaaatgctaaggataacgatatcgtggtgaatgttaccaagtcgaagaaactgacgaatatgcgagcttctggtgcagacgataaggctcgtatcgttcctccggttatattcagtttggaagaagctctcgaatatataaaagaagacgaatatgtggaggtgactcctcatcatttgcgtttacgtaaaattatcttagatgagacggagcgtaagcgggctaatcgataa

SEQ ID NO: 657 - DNA, 1413 bp, Barnesiella intestinihominis
tctatcaacgaatcgaaaagaattgtaattttgcgacaaaattcattttctacaaatatcaatatggatcatgtagtcaaaataaagaaaggacttgatattcaattagaaggaattccaagccctaaaatatctaatacaccggatagtcagctatacgccattattcccgacgattttgtaggtttgacacccaaagtaattgttaaacccggagaaaaagtcttaaccggttctccggtcatacacgataaaacgcacccgaatatcgtcgtaacctcgcctgtcagtggtgaaattgtaacaatagagcgaggagaaaggcgaaaagtcataaaaataaccattaagccggatgcctctcaacaagccttagagttcggaaggttcgatctcgaaaacatggacagctccgaaatcaaagatttattgttgaaatcgggtattttcgcttttataaaacaacggccttacgatatcgtagcaaatcccgataccactcctcgcgacatattcgttacggcattcgactccgctcctttggcccccgattatgccttcattctcaaagaagaaaaacagcacttcgaaaccggattaaaagcgttaaataaactcacaagcggaaaagtttacgtaggtatatcccaaaggcagcccatagacgtaaaaaatgctacgtctgttatattcgacggaccgcatcctgctggaaacgtaggtatacaaatcaatcatatcgctccaatcgataaaggagacacagtatggacgatgagcgctctcgacgtactcttcataggaagactattcgacaaaggcatcgccgacttttctcgcatagtcgccgttacaggctcagaaatagacgacccgcactacgtacgcacccgtataggcgcatccatcgcttccatcacacaaggtatggtaaaagcggtcgaatacgaacaacgctatatcagcggaaatgtattgacgggggttaaaaccgatgcagacggttacatcggagctacccattctcaaataacggtaatccccgaaggaaacaattacgacgaatttttaggttgggcttctctcaatccccataaatatagcacgagtcactcttatttttcttggctattggggaaaaagaaaaaatacaccatcgatgccagaataaggggcggagaacgagccattatcatgtcggacgaatacgaccgggttttcccgatggacatctacccggagtatcttatcaaagccattttagcattcgatatcgataaaatggaaaacttgggtatctacgaagtcgccccggaagattttgctctttgcgaatttgtcgatacgtcgaagctcgaattacaaaaaatcgtgcgcgacggtctcgacagacttatgaaggaaatgaactaa

SEQ ID NO: 658 - DNA, 1716 bp, Barnesiella intestinihominis
aaggacaatcgggatttttattcaacatcaatgaagcattttaatcaaatatttacacagaggcgcatattttggattttttcaggaatcatgttggttcccaatatttttctatgttttacagaacaattgccactcctgttcaaagtctcctatatcctcattccgggagctttataccttttgttattaattctctcccgcaaaccgggaatcaccttttgggctctttttccccttcatttcataggcgcgtttcaattggtactactctatcttttcggtaattccattatcgcctcagacatgttcctgaacatgtttacgaccaacagcggagaggctttcgaattactcgataaattggctccggcggtagtaggcgtattcttactttatcttccggcattggctcttgccgtttactccatacgtcgcaccgagaccctcacacctctttttcaaaaaagagtgttcatgttggctatgctcatgatcggtagtggaatacttgtttacacacctgctcaccgaaaatatcctcatacggcaaggctcgacaacctttaccccatcaacgcgttcaacaatgcccgattcgccgtggacagttgggaagcagcaaagaactatccacgcacatcgagaaaattcgactaccgggccacatcgacaagagacaccgaactccccgaaatctatatcttcgtaatcggagaaacctcccgcgccggaaactgggggctatatgggtacgaacgaaatacgacccccaaactcgacgccatgcccgatgtcattcatttcgacgatgtactgacacaaatcaatgcgactcataaaagcgttccgttaatgctatgccccgccgatgcactcaattacaatgagatataccgacaaaagagtcttatttcggcatttaaacaagctgggttccacacgtcgtttctctccaaccaactgcgcaacggatcatttaccgagttctttgccgacgaagcagactgtacgatctatttcgccgcaccgaaaaataaaccgcatctacatgacgatgtactattatccgcagtcgactcgttactgaacataggtaaaacgaagcaactcattatccttcacacctatggctcccacttcaattactgtgaacgatacgataccgattgccgaatattcacccccgaccacattaaagaaatcgatcataagaacaagcaagccatgataaatgcctatgacaactcgatcgttgccaccgacaaattcttggcacaagttatcgacaaactcgaccgaaccggaaaaacttcggccatgctgtacctctccgaccatggggaagatttgctcgacgatgaacgtaatcgatttctgcacgcctcccccattcccacctattaccagctgcacataccctttgtcatttggttctcggataattactctactcttttccccgatgacatacgacaagcccggaatcggcataccaccccattcgactcgcgagtcgtattccacaccctactgggtatcggaggcatcgaaaccgaatatcgcgatgaccgactctccctcataagtccgtcgtttcatctcgaaaaaagatattatgtaggagaacaaaacatacctattcccgttcgacgtctgcccctcgaagaagaagacttacaagccttcgaacgatacggaatctctccccgataa

SEQ ID NO: 659 - DNA, 1899 bp, Barnesiella intestinihominis
atggataaaaacacgattttaggtcttgtattgatggtcgtagttgtgctgcttttctcttggtggatgcagcctacacccgaacaattggaggcacagcgtcggtataacgattcgattgccgctgtggaagcggaacgtatggccgaggccgctttggcagaaacacccgtttcgaccgataccgtttcgggagaagttgccgattcattaaaaaatgcaggtttgatagcgcgtttcggcgagttcgctccttgtgccgaaggttcggaagaatttactactttgtccaataataaggtgacattgaagttctctaataaaggaggtcgtctttatgaggctgttttgaatgattacatggcctatgattccacgaatgtgactctgtttaccggagacgaaaacgactatggattcattattcgtacgaatgcgcgcgtgatcgatacacgcgatttatattttactcctgaaatcgatggtaatgctgtaaatatgacattacagcttgccaatggaagccagatgggtattcgatattctttgccggaagacagctatatgttgaaaatggatatctggcagaaagatatggatcgggtaattccgtcgagcgctgtttattgggattttatttgggaccagaaaatgcgtcgtcaagaacaaggacgtatgtttgaggagagaaatagtgccttgtattataaatttgcaggagacgatgtagagcatttgagcgagtcgggtaacgatgaagagaaagcgactacgagcctcaaatggattggttttaaaaaccagttcttctctactgcttttattgccgatggaaaatttaacgacggaatttttacctctcggtctttggaagaagacagatatttgaaacagtttcatgccgagagtacgatagattatgattcgaaagagtcgcaggttgccggattcaatatttttctcggaccgaattcttatccgttattgtcctcttatgacgacgatctttcgggagaccagacactcgatttggataagctcgttccactgggatataagtttttccgttggataaatacactcatcgttataccggtattcaccttcttgggtaaatttttcagcaattatggcgttatcattttgttgttgacgatatttataaagctcgttttattccccttcacgtataaatcttataagtcgcaggctcgtatgcgggttttagcccctcaaattaaggagattaatgataagtatccggggcaggataaagcgatggagcgtcagcgtttgacaatggatctgtacagcaaggcgggagtgaatcctatgggcgggtgtttgccgttacttttacaaatgcctattcttattgcgatgttcaccttcttcccgtcttctatcgagcttcggggtgaatcgtttttgtgggcgaaagatttgtcgacctatgatgcgatcgtaagttgggacacttatataccgttgataacgccctattttggtaatcacatcagccttttctgtttgttgatgactattaccaacttgatatacaccaaaatcaatatgcagaataccgccggacaacaacagatgccgggtatgaagttcatgatgtatctgatgcccgtcatgttcttggtattcttcaataattattcggccgggttgagttattattatttcttgtcgttgttgattacgattattcaaacctatgtattccgtaaatgtatcaacgaggagaaagttcttgccgagttgaaagagaatcaaaagaaacctcgcaagaagagcggtttcatggctcggttggaagaagcgcaacgccagcagcaggctgcgttgagagaacaacagaagcaacgaaacaaacaacagcgtcgtcgataa

SEQ ID NO: 660 - DNA, 1134 bp, Barnesiella intestinihominis
agggatcgcgcgatgttttttaaagacgttatcggacaggaggaggtaaagcgaagacttttacgttcggttgacaatgatcatgtggctcatgcccagttgctttgtggaccggagggtgtcggtaaatttgctatggctatggcttatgcccggtatatacattgcacgaatcgtcagaatggggatgcttgcggtgtatgtccgtcttgccggcaacatacggctttgactcacccggatttgcattttgtattcccgatggtcaaagtggataagaagaaacggatatgcgacgattatttgcccgaatggactgagtttttgaaggagaatacctatttcgggatcgattcatggttgaggtatattaatgcagataacaagcaggccgtaatttatggagaagagagtgaaagtattttgcggaagatgtctttaaagagttatgaatctccgtataaaataatgattatatggctgccggaacgcatgaacgatacttgctccaataaattgctgaaattgctggaagagccttatcccggtagtgtgtttttgttagtcagcaataatcccgatagagtgctggggactatacgttcgcgttcacagcttatcgagattcgctctttgtccacgtcggttatagccgaggcgttgcaacgccggtatgggataacggagcaggatgctatttcggtggcccatgtcgcagagggtaattatttgaaggcttgtgaggctcttcaattgaatgaggagaataagttgtttttcgattattttgtacaggtcatgcgtttggcctatgctcggaaaataaaggacttgaagatatggagcgaagaagtggccgatttggggcgcgagcgtttgcgtcgatttctttcctatacccaacgaatgatacgtgagaattacatctataatttgcatgttcctgcattgacctatatgaatctggaagaggctcaattttcttcgcgtttcgctccgtttattcatgaacgtaatgtacaggctatcatgaaacatttgagcgatgccgaaaatgatgtcgggcagaatgctaatgccaagattgttcttttcgatctatctataaaacttattatgctgttgaaaagctga

SEQ ID NO: 661 - DNA, 1245 bp, Barnesiella intestinihominis
atgaaaacaaagacaaccaagaacttaaataacaaaaacatcatggcaaaaaagaaagtagtattagcttttagcggaggcttggacacctcgttttgcgttaaatatctatcggaagaatgcggatacgatgtatatacagctattgccaacaccggaggttttaatcaagaagaattaaaatccatcgaagaacgagcctataaattgggtgcggtacaacatgctacactcgatataacacaagaatattatcagaaaagtatcaaatacatggtattcgggaatattctaagaaacgggacctaccctatttctgtcagttccgaacgaatcttccaagccatagccatcatcaattatgccaaagaaatcggagccgattatgtagcgcacggtagtaccggagccggaaacgaccaagtacggttcgacctcacattccaaatattggctcccgaaatcgggattatcactccgacccgagatatgacattgactcgtgaatacgaaatagaatatctcaaaaagcacggatatacagccgacttcaaaaaaatggaatactccataaacaaaggtttgtggggaacgagtataggaggtaaagagacgctaaaaagcgaccaaaccctgccggagtcggcctatccgtcacaaatgacagctactcaaagcaagactatcacgctcgatttcgtcaaaggtgaaatcgccgggatcaatggaaaagcatacgacaataaagtcgctgcgatccaagacctcgaagcgctcgccgctccctatgccataggacgcgatatgcacatcggagatacgatcattggtattaaaggcagagtcggattcgaagcagccgcacccatgctcattatcgccgcacataagatgttggaaaaacataccctcaccaagtggcaacaatattggaaagatcaagtaggcacgtggtatggaatgtttttacacgaagctcaatacctcgaaccagtcatgcgcgatatagaggcttttctcgatagttcgcaacaaaacgttaccggacgtgtaatcatcgaactacacccttatcgctatgttttagtgggagtcgaaagcgattacgatctcatgaaatcggactttggcgaatacggcgaagtaaataaagcgtggagtgccgacgatgtaaagggctttaccaaaattctgggcaaccaaatgaaaattttctattccgtacaaaataaaaacaaaaaataa

SEQ ID NO: 662 - DNA, 1866 bp, Barnesiella intestinihominis
tgtgagctaccccctttttatctattgcccattattgtaaaaatcgttatctttgcgcacattatcagattaatttcaatgaaaaatatacgcaatttttgtattattgcacatatagaccacggaaaaagtaccttggccgatcgcttgttggagtataccaaaaccattgcagacaaagatttacaggatcaagttctcgacaatatggatttggagcgagaacggggaattacgatcaaaagtcatgcaatacagatggaatatatttacaagggtgagaagtatattctgaatcttatagacactccggggcacgtggatttctcttatgaagtttctcggtctattgccgcatgtgaaggtgcattgcttatcgtcgatgcctctcagggaatacaagcacagactatttccaatctgtatatggcgattgaacatgacttggaaatcataccggttgtcaataaagtagatttggatagcgctcgtcccgatgaagtagaagatcaaattattgatttgctggggtgtaaacgggaagaaattatacgtgccagcggaaaaacaggacagggggtcgaagatattctttcggctattatagaacgggtaaatcctcctcagggagatgtggatgcaccgttacagtgccttattttcgattctgtatttaactcatttagaggaattatcgcttatttcaaaatttgtaacggacgaataaaaaccggcgataaggtaaaattcgttgcgaccggaaaagagtatgaggccgatgagataggtgttttgaaattggatatggttcctcgaaaagagttgtcggccggcgatgtaggatacattatttccggaataaaaacgtccagagaggtgaaagtgggagatacgattacccatatagagcgaccgtgttcttcggcaatcgatggattcgaagaagttaagcctatggtctttgccggagtgtatcccatcgaaacagaagattttgagaacctgagagcttcattggaaaagctgcaattaaacgatgcatccttgacttttcaacctgaatcatctgcggctttgggctttggtttccgatgtggctttttggggctgctccatatggaaattattcaggaaagattggatagagaattcaatatggacgttattactacggttccgaatgtttcttataaggtttacgataagaaaggtgcaatggtggaggttcataatccttctggattgccggatcctacgttgatagatcacatcgaagaaccttatatacgggcatcggtcattacttcgaccgactacatcggacctattatgactttgtgtctggggaagcgtggagagctggtcaagcaggaatatatatcggggaatagagtagagattatctacgatatgccgttaggagaaattgtcattgatttctatgataaacttaaaagtatatcgaaagggtatgcttctttcgattatcatattcatgatttcagggagtctaaattggtcaaactcgatattcttttaaacggggagtcggtggatgctttgtcgacgttgacgcacgtagacaatgcggtaacttttggacgaagaatgtgtgaaaagttgaaagagcttattcctcgccagcaattcgagattgctattcaggccgcaatcggggctaaaattatagccagagaaacgatcaaaccagtgcgtaaagatgttacggcaaaatgttatggcggtgatattagccggaaacgaaaactgttggaaaaacagaaaaaagggaaaaagcgtatgaaacaaatcggttcggtagaagtgcctcaaaaagcatttctagcggtattgaaactcgattag

SEQ ID NO: 663 - DNA, 1209 bp, Barnesiella intestinihominis
atgattatagggttcgatgcaaagagggcgaatgccaattttaccggattggggaattatagccgattcatggtagatacgatggctacatacggcgatgaacataagtaccgtatgtacattcccaagcagtgtaaaaatgcttcgtacgactcgcttttaaaacataaaaatgtctcttccatattgcctcgttcttccgttatgaaacgtttcagggctttgtggagaaccttttttattaagcgagggctgttgcaagacggtgtacaactttatcatggattgagtaacgagttgcccgtggggattcatcgcacgggaattcgtagcgtagtgacgattcacgatttgatatttcttcgttatcctcaatattatcaccgtttggatagaatcatttataaccgaaaattcaattatgcctgtcgtaaggccgatcgtattgtagcggtgagtgaatgtaccaagcgggatatagttaagttttacggtatttctcccgaaaagatcgatgtcgtttatcaaggatgcgaccctgttttcgcccgccctgtttctaaaaaagaaaaagatcgtgttcgcgcggcttacgggttgcccgaacgtttcattttgagcgtgggaacgattgaagagaggaaaaatctgctattggcggtaaaggctgtcgaaaagttggacgacgttcatttggtagccatagggaaaagtaccgattatgctaaaaaggtgcaggattatgtagaggctcatggattggaaaatagagtgcatattatccataatttgaaattcggcgatttgccgatattgtatcatctggcctcgctgtttgtatatccttctcgtttcgaggggttcggaattcccattgtcgaagctctttcggcaggggttccggttatcgcttccaccggttcctgtttggaagaagccggcggcgaacactcgatttacgtcgatcccgacgatgtggaaggtatggcgaatgccatgaaaaaagtacttgccgacgagcatttgcgtcgggagatgatagaaaaagggaaagaatatgtggttcgtttcgatccgaaaacgttggctgacgagatgaatgccgtatatctgaaatgttttgacgataagacctttaccgaagatagatttgtgcagacttcgtcgaacaaacggacaaaaatttctcactatcttccttttttctaa

SEQ ID NO: 664 - DNA, 2580 bp, Barnesiella intestinihominis
atgaaaatgatagattgtagaaagtcgctgatggtatgcatcggtttgttgatgtgtggaaccttttcggcgcaggaatcggagttcgatttggcatcgcagagatcggaaacgcaagacgtttttgctgtgccgggtaaaaaattggatcataaagggataattattaaccctactcctcataaactggttctcgacccaaccgggaggctcgatatttcgggtggagtgtgtctaaaagataagcatggaaagttttccgaggatttggattttgtcacttttaacaagaagggggtaaaactctccgtcgattttggttcgaaggcttcggctaagtatggggtaaaacctgtttcgggtgcatatcgcatgaatatcggaaagaatggtatatcgctcgtcggttatgacgagcggggagctttttacggtttgcagacccttcgccagttagtcgagagtcctgcgactgtaacgggcgaattaccatatgtggaaatcgacgattaccccgatttgaaataccggggggtagtagaaggattttatggaacaccgtggtctcatgaggtgagaatgtctttgatagatttctatggtaagttcaagatgaatagttatttgtacggcccgaaagacgatccgtaccacagttgtccgaattggaggcttccatatcccgaaaaagaggctgggaatatcaaagaattgatagaggcttgtaaacgtaatcgggtcgattttgtttgggcgatacacccgggacaagatattaaatggaacgaggaggattatcaaaacctcgttaataagtttaatttgatgtatgaccttggtgtacgggctttcgccctctttttcgacgatatatcgggcgaagggacaaatccggtgaaacagacggagcttttgaatagattgactaaggattttgtgaagtccaaaggcgatgtagcatatttaacggtttgtccgaccgattattccaagctttgggcaaaccccacaccgcaaggaagtcttgctatttatggagaaactcttgatccgtcgatagaagtgttttggacaggagacgtagtatgcagcgacttaacaccggagactttggattgggttaattccagaattaagcggccggcatatttttggtggaattatccggttaccgactatgtgcgcaatattattttgcaaggacctgtttatggcttgaatacttcgttggattctaatgatctttgcggaatagcaagtaatccgatggaacatggagaggcttcgaaattggctttatacggggttgccgattatacatggaatatagcggcttataatcctatcgataattgggagagaggactcggcgaattgatgccgaaagcaagggaggcctatcggacattcgctattcattcctgcgatacggagactggttatcgccgcgatgaatcgtgggaaaccaagactttcagaatcggtgattggaatgaaacggaggctcaggctctttgggcagaattcgataaggtagagaaagctcctgccgaaatagagaaaggttgcaccaataaaggtctgatgagtgagttgactccgtggctccaagaattcggaaagttgggtacgagaggaaaacgggctttggaacttgcccgtgtttatcgtgacggtaaagatgatgccgatttttggaataagtatattcggaacttgatgagtaagaaggatcgagaagattatgaggctcataaaagcgggaccatgaaactgcaaccattttatgaaaatgctatggacgatatggcatacggcttcttaactcggttgtcgggcgagactcctatctgttataggggtataggttcgttccataatgcgaaaaccacgttgagcaagttaatgtttgatcacgatactacgacttattatacatcgggaatcgctcaaaaagccggcgattggatcggggttgatttgggaagtgtcaaagatgtgaccgaagtttctattttgcaggggcgtaattctgtggacgatgtcgattatttcgaccatgccgtagtggaatattcgattgatggtaaagcatggactccgttgacggaagagttgaataaacagtatatcgttcgttggaacggggagcctgtaaaggccagatatgttcgattgaaaagactcgaatctactcgcacgaattacgcatcggttcgttcattcgaagtgaatcctcccagagtggaacatttgggtttcagcttaaagtccgacgatgtacagcaagctctttatgcgtttgatcagcaaataggcacaagttatcgaaataatggaactttttctttcggggtcgctcctcggaccgagggatatactttgttggtgaatgaattgccggaggcggggaatggagctcctgtcgtgcatttgagacagtttaggcccgatggttcgttggcggttgagtcggttatcgattcgtcgttttttaaggtcgagttggccgagggagtttccgaagtacaaatagaagggccagtggagatattcgagatagtgccgaagtttgattag

SEQ ID NO: 665 - DNA, 2181 bp, Barnesiella intestinihominis
atggcaaaagaagtaaatttgactgaggaactgaaaaggaatttcggattcgatacatttaagggaaatcaggaagcgattatcagaaatttgcttgccgggaatgatacatttgtattgatgcctaccggaggagggaagtcgctttgttatcaattgccgtcgttgattcttgacggtactgcgatagttatttcgcctttgattgcattgatgaagaatcaggtcgatgctatgcggaatttcagtgccgaagatggtgtcgctcatttcataaactcctctttgaacaaaactgcgatagaccaagtgaaaaccgatattttatcggggaaaaccaaattgttatatgttgctcctgaatccttgacgaaggaagaaaacattgattttcttaaacaggtgaatgtgtcgttttatgcggtagatgaagcccattgtatttcggaatggggacatgatttccgtcctgaatatcgacgtatccgacctattattaatgagattggcgtacgtcctgtaatagctcttaccgcgactgcgactccgaaagtccagcatgatatacagaagaatctgggcatgttggaagctactgtatttaagtcgtcgtttaatcgtcctaatctttattatgaggttcgcccgaaaacagcgaatatcgataaagacattattaaatatataaaatcgcaggagggtaaatcgggtataatctattgtttgagtcgaaagaaagtagaagaactggcagaattgttgcaggtaaacggaattcgtgcgttgccatatcatgccggaatggactctgcgactaggactcagaatcaagatgcattcttgttggagaaaatagatgttatcgttgccacgatagcctttggtatggggattgataagcccgatgtcaggtatgtcatacattacgatatacccaaaagtctggaaggctattatcaagagacgggacgagccggtcgagatggaggagaaggtcagtgtataactttttatatcaataaagatttacagaaactcgaaaaattcatgcagggaaaacccattgccgagcaagagattggtaaacagcttttgttagaaactgctgcttatgccgaatcttctctttgtcgtcgcaagattttactgcattattttggagaagagtatgaggaagataattgtggaaattgtgataattgcctaaatcctaaaaagcaagtggaagcaaaagatcaactttgtgcggttcttgaaactattattgcactgaaagaaaaatttaaagccgaatatgtgatagatgtcttgttaggtaaagaaacgagccaaatactttcgtatcaacatgaagatttagaggtgtttggaagcggacagggtgaagatgagcgcacgtggaacgccgtcattcgacaagcattgatagccggctacataggtaaagatattgagaattatggactattgaaagtaacgaaggctgggcatgcgtttttgaagaatccggtttcgtttaagattgtcaaagatgtcgattttgacgaggtggaggaagaagtgcccatgaaaggtggagcttcttgtgcagtcgatcccgagttatattctattttgaaagatttgcgaaagaaaatcgctaaacgattggaacttcctccgtatgtgatttttcaagacccttcattagaagctatggcgacaacctatccgattacaattgaggagttacaaaatattccgggggtaggagcaggtaaagcgaaacgttacggagaagaattcgttaaagtcatcaaagctcatgtggaagaaaatgaaattgagcgtcccgaagatttaagggtgcgtacggttgccaataagtcgaaattgaaagtatccattattcaggccatcgacaggaaaattgcacttgatgaattggccgagtcgaagggccttgaatttggagagttgctcgacgagatagaggcgattgtttattcgggaacgaaaatcaatatcgactatttcctgcacgagattatggacgacgagcatatcgacgatatttttgactacttcaaggagagtgaaagcgatagtctcgaagatgccattgaggagtttggtatggagtatagcgaagaagaaattcgtttgatacgtatcaagttcctttcagagatgggaaattaa

SEQ ID NO: 666 - DNA, 2088 bp, Barnesiella intestinihominis
catatttatttattcatgtataatattttagaattgagcgctaaaactcttgaccagttgaaagtgatagctgctgaaatgggtatccaaaagattgatggtatagaacaagaagatcttgtctataaaattcttgatcaacaagctattgatatggcaagtaaagctgccgctaatcctcctgctccgaaaaagagaggtcctaaacctaagaaaaataaagagaagcctgtacttgaaaaaccgaatgaactagaaagtaaatcaaatacagagccgacaccgtctccatctgtggaagcgacaggagtggaagatacgaaagaggtgaaaaagaaaggcagaaagaaaaaaagcgatgtaacgagtgaaacctcgaaaaaagaagatgcaaaacaggataatgttacagaagtaaaagatattccttctattatagaagagactgggttatcttctcatcccgctttgaaagagccggtagccgaactatttgagaatttaaaagaaagctctatggcgttggtggaaaatagcggttccaatgaaaacgaagagcttcctcagcaaagtacacaaggagggcaacccaaacaacgcaaacggatacaaaagaaagctcttccagctgaattgataaatgaagctcaaaacacactgcaaacaccttcgccttctgttccggttacaacgccttccaccccggtagaaaacaagcaacaggaaattattcaacaacagcccgctaccgcaaatcaaggacaacaagcaccgttgcctacatcgtcgttacagacattcttcccacatagcgaaaagcaaagatttgttccgagaggacagcgcacattcgtcccacagaataggaacagccagaataatgcaggaaataacaatgggcaaaaccaaaactcgaataatcaacaaacgtttgtccctgagccgaaacctgtcgagagaccatacgatttcgatggaatattgacaggtgtgggggtattggagatgatgcccgatgggtatgcatttcttcgttcgtccgactacaattatttgacttctcccgatgatgtctatgtttctcaatcgcaaataaagttgtttggtttgaagacgggcgatgtcgttgaaggacctattcgtcctcctaaggaaggagagaaatattttccgctggtgaaggtggagaaaataaatggccgcacacctgaatatgttcgtgaccgtgtcccgtttgatcatcttactcctcttttccccgatgaaaaatttgatttgacgagtggaaaatactgtaatttatctactcgtgtggtcgatatgttttctcctatcggtaaaggacagcgtggattgatcgttgcacctcctaagacgggtaagaccgtgttgttgaaagatatagccaatgctatctctgagaatcacccggaggtttatatgattatattgttgatcgacgagcgtcccgaagaggttaccgatatggcccgtagtgtaaaagccgaggttatctcatctactttcgacgagccggccgaacgtcatgtgaaagtggctagtatcgtattggaaaaagccaaacgtatggttgaatgtggtcacgatgttgtcattctgttagactccatcactcgtttggcgagagcttataatacggtttctccggcctccggtaaagtgctttccggtggtgtcgatgccaatgcgttgcataagcctaaacgctttttcggtgcggctcgtaatatagagaacgggggaagccttacgattatcgctactgctttgaccgagaccggttcgaagatggacgaggtgatattcgaggagttcaagggaacgggtaatatggagttgcagctcgatcggaaattgtctaacaaacgcattttcccggctgttgacatcacggcatcgagtactcgtcgggacgatttgttgttaccgaaagacacactcaaccgtatgtggatattgcgtcgatacttgtccgatatgaattcgatagaggcaatggaatttatgcgagaccgtatggagcgtacttcttcgaatgaagaacttttgctgtcgatgaacgattga

SEQ ID NO: 667 - DNA, 1833 bp, Barnesiella intestinihominis
ttaaccaaaaaaattactgtgatgaaaaaaacaatgaagtattttatgtttttactggtaagtacaatggttgtatttacttcttgtaaagacgatgatgaacctaatggaggcggcggtactgctgggaactctgctatttcagaactggcggtaactccgaatgccgatgtaaaatatggcgatgaggtgactttgacggctaaatttgccgatgaaaaaggattgcgtcaatatatgatttcggtaagtaatgccaatggggcgttttatgaaacgacaaaaatgcttaccggaaaaacgtatgacatgaatgaaaagatagctcttccgttacctaaaaatgcagtagccggggatttgactatttcggttacggtgaaaaattccagcaatgagttgagtacggaagaagttggcattaaaggtgtgacgcttccgacattcgatgctctttatctggccttagataacaatttggtctatacgatggaaaaggacggaaatgtattttccgtggaagattttattccggccggtgctacgggcaagatttatgccaatagcaataaaactggtatgtcgtggggtatggaaggagacgagattatagctcttggaaaagacaatatcgtattcggtggcgaggaagaagcctatttcaaaatttcgtttaatgcagttagtttcgaattgactttgggtaatgctcaaaattggtcgccgatcagcgaatcgctttatatcttcggtacgatttccggacactgggacgataacgatgctcccgacaatggtatttgggtagaacgttcgaaaacgaagatgcagggatatcaaaatggtaatcgcaaatattgggcatggactccgccgtcggacggcacgggtagcgtagaaaccgatatgtggggtgctatcgttgccggacaattttatttcaaagagggaggaaaagataatttcttgacattcgccaatcgtcaattgactttgggagcagaggacaaggctgccagcttctcgattactttgggcggagctttctcgatgaaagtgtttaaagaaggtgaagaatataccaaagtagagttgagcgacggtactcgcacattggcttataccaacgaaggtatttatattaacggagcattagctccttctgccatatctttctgtggctcttcgttggcgttgatcgatggagagtacttctcgtacgagggattggctcagttgacgaaagaccaaaccgtaacggccgagggagtcgatttgtctatggcttattgtgatcacgacgtgtttaccggggccggtaatcctacttggaagatgattgccccgacaggcgaatacttgatacgtcttgatgctttctcggggacggtttacgtcatgaataacgtgggttatcccgatgtaatttatatggacggctggtgttggaatagatttatgggtattgaacgtggctcttggaatgaaaagactcgtttaacgttgtatcgcacttcgccgacggcgaatacctatcaggcaatagcaaccattttgccgtggggtggtgacgtttcgttctgggcagctccttatacggcagaggaatatggtaaatactgtatttctgcgaaatattttgacggggtgactcctgctggcgatagtggtttgttattacctgttccgacagaagaaacttactataaaatagttgtcgatttgaaagacggatttactatcgacaaagaaaatctggacggtaattattacacgattgttccggcaaacagtaagaaatttacggtcacatttactcctacaacattataa

SEQ ID NO: 668 - DNA, 2151 bp, Barnesiella intestinihominis
atggaaaaaagagtaatacccgttttggaaatgagttgtgccgtttgtgcggcaacagtcgagaagactgttcgggagttgaccggggtcgaagaggcaagtgtgaatttttcggctaatacattgcaggtggtttatgatcccgataagatttcgttgaaggatatgcaggctgcggtaagtgccgccggatatgacttggttatttcggaaaatgcggaagctgatgctattgatgccgaacatcgtctttatctcgatttgcgaagaagaaccattggtgcttggagtttcggattgccggtgatggtattgtcgatgatttttcattctccttcacagattcttacttggatattgctcgcactgactcttccggtgttatattgggggcgttcgttctatgtatcgggttggaaggctgtaaaacgaggacgagccaatatggacactttggtaatgttgagtactgccgtgtcttttctgttcagcttgttcagtacgatttatccgtatttttggctttctttgggacttgttccgcatgtctattacgaagcggttgctatgattatagcttttgttttgtcggggaaattattggaagcgagggctaagcagagcacatcggcttctatccgttctttaatgggattgcagcccaagacggcaaggctggtcggaaaggacggggaagaaaaagatgtacctattgctatgcttcgccccggggatacagtgagtgttcgccccggtgagaaaataccggtggacgggactgttttggaaggtggttcttatgtagatgaaagtatgatcagcggggagtctgaggccgtgaagaaacaagccggggatagggttttggccggaacgttgaaccagcgtggcgctttttggttgaacgtgcaggcttcgggagccgataccgtacttgcccgtatggttcgtatggttcaggaggcgcaggggagtaaggctcctgttcagggggtggtcgataaggtttcgtctgtttttgtaccggtagttattttgttatctatacttacttttgtgatttggatttcggttgccgggtggaacatgtttccctatgcgttattaaccgcagtctcggtattggttatcgcttgtccgtgtgcgttaggattggctacgcctaccgctttaaccgtaggtatcggtaaagcggcgcaacagcatatcctcatcaaagatgcctttgctttggagaacatgtgccgtgtgaatgcaattgttttggataagacaggaaccttgaccgaaggaacgccgaaggtggtcggcgagaaattatactctggtttcgaagagtatgtgtcggtattgttggcagccgaaatgcgttcggagcaccctctggccgtgtcgctttcggagtatttacgacagaagggggtcaagcctgtcgaaatatcggcttttgaaagtattacgggaaaaggtgtaatgtgtgaataccgaggtgagaaattctggattggaagcaaggctttggcggaagggaatgtgggtgttttattacccgatttgttttctatctattttggtaaaggagattcattggtagctgcttttgaagtaaaagatgctttgaaagaaaattcgaaagaggcagtacgtcaattggagtcgtacggagtagaggtttatatgcttaccggtgataaagagtctgcgacttccgaaatcgctcgtcaagcaggaattacccattatgaatggggcgttttgcccgatgataaggaacgttttgtcttggatttgcaacgtcggggcaaatgtgtggctatggtcggcgatggcattaacgattcaccggcattggcacgggccgatgtgagtgtggctatgggaaagggaaccgatgtggctatggatatagctatggtgactttgatgaactcggacttggctttgttgccgagagcgataaagctatcgcgaaagaccgtaagaattatccgggagaatcttttttgggctttcggctataatgtagtgtgcatccctattgcagccggagtcctttatcccgtaggtatattattgtctcctatgtgggcgagtgctgctatggcattcagctcggtatcggtgatactcaacagtttgaggttacgataa

SEQ ID NO: 669 - DNA, 2220 bp, Barnesiella intestinihominis
caccttatgcccgaaaaaagctattttacactcgacgaaaaagaaaatgtcctatcggtctatcggcaactgttacgcaatagtcgcccagttttaagagtcgaagacttcaaccgcatgcgtcgcctcatttccgaagccgtcgaaacagggcactatcagcgaaacaaacaaggaataaatccggttgtccgtaatctgaatactgcgctcatcttatgcgacagggtgggattagaacgcagtatgcttatttcggttctacttttcaacttggtcgtcagcgaattcctcactatcgaaaccgtaaaaaaagaattcggagacgacatagcccagctcattcggggtctcattaaatcgaacagcttgtatgccaaacaggctgccgtcgaaagcgagaatttccgcaaactgttactatcgttcgccgaagatatacgagttatcatcatcatgatcgccgaccggctttgcgtcatgaaaatgataaaccaccaccccaacgaaaaataccgttatgacatcgcctgcgaggcctcctatctttatgctccgctggcgcaccgattgggactatactccataaaatcggaactggaagacctctccctgaaatacaccaatcgggaaatctacgaccagatagcccacaagctcaatgaaaccaagaggaacagggataaatacatcatggaatttatccaaccggtaaaacaaaaactcgaagccgaaggtctacatttcgaaatcaagggccgcacgaaatccatcttttccatctggaataagatgaagaaacaaaaagccgatttggaagacatttacgacctgtttgccattcgtgtcatactggaaactcccctcgaacaggaaaaggcagactgttggaaggtatattcgatcgtcaccgatatgtaccagcccaaccccaagcgaatgaaagactggctgtccattcccaaatcgaacggatacgaatcgttacacatcactgtgctgggaccgaaacaacgctgggtagaggtacaaatacgtacccggcgaatggacgaaatagccgaacgaggacttgccgcccactggaaatacaaaggaattaaaagcgagaacgggctggacgattggatgaacaatgtgcgcgaagtactcgaagcggccggaaacggtggagctttggaactcatgcgcgatttcaaaatggatctctacgacaaagaggtattcgtattcactccgaaaggagacctatacaaattgcctttgggagccacgttactggacttcgcattcctcattcacaccgggttaggctgcaaatgtgtcggcggcaaggtaaacggaaagatcgaaaccataaaatacaaactgaaaagcggcgatacgatcgaagtacttacctctcccaatcagacaccgaagcaagactggctcaacatagccgcgacatcgaaagggcgggtaaagataaagcaagccctgaacgaacagcagaataaagcggcggaatatgggaaagagcttttgcaaagacgattcaaaaaccgcaaaatagagatggaagacggtgtaatgatgcgccttataaaaaaaatgggctataaaaccgtcaccgatttttacaacgaattggccgatgaacatatcgacgtcaatcgcgtaatcgacctttatctcgaaatcgataaaaaagaaaacgaagagcaatacgaaactcgtacggcagaagaatttactttacaaaaagaacccgacgaatcgaaagaagacgagctcgtcataggcggcgatgtcaaaggtatcgactataaattggccaaatgctgcaaccccatttacggcgacgaaatctttggatttgtctccacagaaggaactatcaagatacaccgtaaagattgtccgaacgcgcgacacatatacagtcgttaccgttacagagtagtcaatgcccgctggtcgggaaaaatgggttctaaatacgtcaccgtcctgcgagttatcggaaacgacgatatcggtatcgtaacgaacattacatcgattatttcaaaagaaaaaaacatatatatgagaggcatctcgatcgactcgaacgacggcctttttcaaggacatatcaccgtcacggtcgatgacatctcctccctcaacagtctgatgaaaaagctcaaaaccgttaagggggtcaaagatgtacagagagggtctattagatag

SEQ ID NO: 670 - DNA, 1440 bp, Barnesiella intestinihominis
atgaaaaaacgattcaaaacaattgcttttgtatgcttggcgacaatggcggtagtaagttgtgatgagaacaatgacaatcccattccgagtggagagacttttgatttgggagacggttcgaatgcttacgagatttcgtccaatatgactttgacctatccgaacacctataatttgaaagggttcgtttatgttaccgaaggggctacactcactatcgagccgggtgtagttatcaaaggagagaaagagtctaaggctacgttgattgtggagcgcggaggcaaactcattgccgagggtacgagcgaacgccccattgtatttacatcggcacaggctccgggcaaacgtaaacccggtgactggggcggtattattcttttgggtaaagccaaaaacaacatgggagagcagactatcgaaggcggtgtcagaagtaaacatggaggtaacgacgataccgataactctggtgtattgaaatatgtgcgttgcgaatatgccggtatcgaatattcgactgataatgaaatcaatgccattacgtttggttcggtgggtagcggaacgatagtcgattatgtacaagtttcttactcgggagacgattcttacgaatggttcggtggttcggtaaattgtaaacacttggtagcgttgggaacttgggacgacgacttcgatacggataacggattttctggtaaattgcagtttttggctgctttgcggaatccgaagatcggggataaatcggcatccaacggcttcgaatccgataattgtgccgacgctgcgaccgttgaaccttatacttcttgcgtgtttgcaaatgtatcgatgttcggtccggtacttgatccgacgaattatactaatgaggctggcgtaaatggaagtcttactgatgctcgttttcaggctgctatgcatttgcgccgcaatacacagttgagagtgtttaattctgtatttgccggattccccattggattaatcatcgagaatgataaaaactcaaagactcagactcatgccaccgaggggaaattggtcgtttcgaattgtgtgttcgccggtatggttaagaattatcaagatgcacaatattgggcgaatggtacacagttcgatccttcggataacggagcttttgcagatagctatttcaatagagaaggaggcaagaatatcgcttatacggctattgacgatttgaaactgcaaggagaccctcagaatttgacatcgttctgcatggttccttctcaggacagtccgttaataagtctgtccgccgattggagccattctctggtttcttccggttttgaacaagtggcctatataggtgcgttcggacccacagagaccgctgctaataattggacgaccggttggacaaatatggatccgcagaatacggtctattga

SEQ ID NO: 671 - DNA, 2037 bp, Barnesiella intestinihominis
atgaagaaaattgttactctttttgtcgcaatagcggcattttgcgggttcacttcaaaagcagaagaagctactactttcgaagtgaacagaattaagtacaccgtaaccggagaaaattcggtaggtgtctcgggattaaacgaaaattatgaacccagtgaggtaaaacttaccgaagtaattattccttccacggtcgaaaatgcggggaaaaactataccgtcacttcggtcgaggagtacgcttttcggtggacatcgggcatcctgaaaatagaacttcccaataccgttaccgagctaaaaaataacgccatctattacaacgatgatttggaagaaatcgttttgtcggaaaacattacaaaattaggagaatactctttggcatcgaaccgtaaactgaaaagccttgccattcccgccggagtaactgaaattcctcaaagctgttttgccagcgacgaaggattgacgagcattactttcgccagcgattttacatctatcggcaacggcgctttttacaaagccggtatggccgaaataacgattccgggaagttgtaaaacaatcggcaacaacgccttccaactctgtccgaacttatccaaagtaacattgggcgaaggggttgaaacgctgaacgaaggagctttccgcgaatgtgcaaaactcacggaaatcaatcttccggcaagtcttaaaacaatcggacaatatgccttcctcaacgatgtaatgctctcgtctgtaagaattcctgttggggtaaccgaaataggaaatgccgctttctcgaatgtcggtgtcacagcttttgaagtagaaaccggcaataccgcttgtcaagccataaacggagttttgtattcggcagaaggaaatatcctcttggcgtatcctctaaatgcgacagccacagaatacacgattgccgacggttgcttgggtgtaggagaaggagcattcgctcataccactcttcaaaaagtaatcgtacccgaagggatgcgagctttcgatgataacgcattctccgaatcttctctcgccgaaatcaattttcccgaatctttggtattattcggtaatcaggcttttgcaaaaacccagctgacaacagttgttctcccagaaaacatgacaaacgtatatgagggtacattcgctcaatctacaaaacttcaatcgttaacgattccctctgggattcgcaccattgagtcgtatgccttcaatgggtgcactgcgcttaccgaaatacattgtttaggagcggaaccggccacactgaactattacgaaggttatgaccaccctttcaatggtatcgatgcctcacaagtgaaagtctatgttccgaaaggatttaaatcggcctacgaatcctctgagtggggataccaattcgacaatatcatcgaatcaaatacaggtattttcctacaagaaagtaccaacccggccaacgacgccgaaatggaatcgatcgggactattgaaatcactttccccgagaatgcctctcttgtagaacaatttcctttggtaaaagtagttaaaggacaagagctatacggagaaccggtagaaaacgcaggcggttggatggcattcgccagtggtaaaaaagtaaatgtattccctgccgacgaatatcaggaaggtccacaacccattcctatggaagacggtgtagactattacgtcaccataccggccggaatagtaaaaaatgccgaaggttctttgaatcagaaaatcgtccttcacttcgtcggtaaaatcgaaagcggcgtagaccagatagaaagtaacgactgctttgttacaaataacaacggtacgctcaatgtcgtattaggaaacttaaccgattgtacggtcgaactgtttaatgctactggaaaccttatcaacagcattagtcatgcacaaggaacagcgactcttcatgtcgaatctaacggactctatattattcgtatcgtatcgggcgacacgataaaaactttcaaaatcgtaaaataa

SEQ ID NO: 672 - DNA, 1701 bp, Barnesiella intestinihominis
atggatataatcattcattttttccgcagctatcccgagatggcgatttttctcactctgggtatcggtttttggataggaagtctcaaatacaaaaacttctctttgggaaccgtcacttcggttttattagtaggtgtattggtaggacaaatgaacatcgatattcccggtccactcaaatcggtatttttcctgctattcctatttgctatcggatatagcgtaggtcctcaatttttccaatccttacgcagcgacggaatccatcaagttatattcgcttgtatattcggcattgtctgtataggctctacctacttaattgccaaaatcatgggttataatgcaggtatgaccataggtctgtttgccggagcacaaaccatatcggcagccatcggagttggaacagacaccatcggtactctcggaatttcagcagaaaaacaacaagaatggttgaatatcataccggtttgctatgccgtcacttacattttcggaaccataggctcggcttacatcttaggtacactcggtcctcggttactcggtggactcgaaaaagtaaaaaacgatacccgggcacttgaaaaagaactgaaacaagacaacgaagaaaacgatccggcactcatgaatgccaaccgaccggttgtattcagggcctacaaaatagaatcggactggttcaaaactccacaaacggtaaaagaaatagaaaaacatattaaggagatgggaagaagagtcttcgtcgaacgtgtccgaatcgatggagaagtcctcgacataaccccaaaaacagttcttaaacaaggtgatgaagtggttttaagcggaagacgggaaaccatcatagaagacgaaagctggatagggccggagattttcgatccagaactattggacttccccgtggaagatattttcgtactacttaccaacaaagaacttcataaaaaaacagttcgtcatctccgttcgttaccctgtatgcacggaatcattatcaaacagataaagcgttcgggcgtagaaataccggtctatccgaaaactgtattgtataaaggcgacacactggaaatcgtaggactaaaacgagaaataagcgaaacagctcccaccttaggatatgtcgaccggcctaccaataaaaccgatatgatattcgtaggtctcggtatcctcatcggcggtatcatcggagctctaaccattcatttaggtggtgttcctatcagtttgagtacaagtggcggagctctactctctgggttattcttcggttggttacgcaccaaacacccgaccttcggacgagttcccgaaccagcagtttggatattcaataacttaggtttgaatatgttcatcgctgttataggaataaccgcgggccccacgttcctgtccggaatccgtgaagcaggtttcatgctattcattgccggagttttagccactacaataccgttattattaggattgcttatcggtgcgaaagtattcaaattccgaccagctataaatttaggctgctgcgcgggagcccgtaccacaactgcggcgttgggagctatccaagaaagtcttggaagcacgttaccggctatgggatacacggtaacttatgctatcggtaatactctgctcattttagggggcgtcgtcttagtccttctctctgcataa

SEQ ID NO: 673 - DNA, 1899 bp, Barnesiella intestinihominis
tatctttacataaaatattcgacgatgaatccgaaacaccccctttccacgataacagtctatcggctggtcgcctcgttcattctggcgatttccatatattcctgcgccaacatgtcgagacccgggggtggtccccgcgatgaaacaccgcctgtattcatcaagagtactccggttcctaacgcattgaacgtttcgaaacagaaagtcgaaatcgaattcgacgaaatcattcaagtagacaaaccgtccgaaaaagtaatcgtctctcccccccaaaaagatatgcccgaaattcgtacttcgggacgtaaaataaccgtgattcttaaagactcgttactacccaacacgacctataccatcgacttttccgatgccatcatcgacaacaacgagcgcaatccgctctatggattcgcctactccttttcgaccggccccaagatagactctctgcaagtttcgggaatactactcaatgctcgggatttggagcccataaccggcatgttggtaggattacacagcgacctcgaagactcggctttccagaaactcccattagagagaatagccagttccgacgaattaggtcatttcacgatacgaaatgtaacacccggcaaataccgtctattcgcgctgaaagacatgaaccgggactaccgcttcgacaacccgtcggaagatatcgcttttctcgattctatcgtcattccttcggccgatgttaaattacacgtcgacaccatttggaaagacagcgtcaccatcgacaccattatcgaatacaaccacacccatttctatccgaacgatattctgctcacggcattcaacgaaggattccaatctcaatatctcgacaaaagcgaaagaaaagaccgtcgtaaaatcgacctttacttcaaagctcccgccgattcgttgcccaagctgaaaccgctgaatttcgagcaagaagactgggccattctcgaacgctcgttccacaacgacacgctgcaatactggataaaagactcgctcatttacaacatggatacacttttattcacggccgaatatttccgtaccgacacgttaagacaattgtctctctacaacgatacgctcaaattcatcatgaaaaaagtcaaagcgcccaagaaaaaagaaaaaaagaaagacaaggacaacgactccatcgaagctcccgaaatccaattcatgcaaatgaacgccaagataagctcttctctcgatgtttataaaccgcttcgtttttcctttgccgaaccattgcaaacatacgatgcagggaaaatacatctggaacaaaaaagagacaccttgtggatacctgttgccgactccctgtacacattcctccaagactccattgctatccgggactacacactcacctacaaatggactccgggagaatcctatcgcatcgttatggactccacggcattcaccaatatttacggactattcacgaacacctataaacaagaattcaaagtcaaagccctcgaagattacgccaatctgtatctctctatttcgggcgtatccgattccgcttttgtcgaaattctcgattcaggagacaaacccgtaagaacagccccggtcatcaacggaggagccgagtttatgtatatgaatccgggtacttactacgcccgcttattcatcgaccgtaacggaaacgggaaatacgacaccggaaactactccgaaaaacgacagcccgaagaagtttcgtattacccacaggaactcgaactgaaagccaattgggatatagaacaggattgggacatctatgcgacaccggtcgataaacaaaaacccgacaaaataaagaaaaacaagcccaaagagaaaaaacgcaattactga

SEQ ID NO: 674 - DNA, 2667 bp, Barnesiella intestinihominis
atgaagaaaaagagattgaaaatgcgatattatatgcctttgaaaagtttggctgtttttttgtttttgtctttttgtgtgcaagttgtgaccgcacagaatgaagagaaactcgatacgatatataatccgaaggtcgtttattcggccattccgcagaaatatgagattgccggtatcacggttaccggggctcccaattatgaggattatgtattgataggttactctgggttggaagtaggacaggttatcgaaatacccggtaatgccattaccgaggcagccaaaaaattttggaggcaaggtttgttttccgatgtcgtgattaagtggacgaaggcctatggcaataaggcatggctcgaaatacaattaaaacaacaaccgcgtatttcggaaataaattaccacgggattaagaaaagtgagcgggaagatttggaaatgcgcttggggttggtcaagggaaaccagataactcccaatatagtggatcgtgccacgacgattatcaaaaaacatttcgaggaaaagggttttaagaatgcagaggtgaacataaaacagaccgatgacctgacccatgagaacgaggtgatcgtcgatatttatgtggataagaaagagaaagttaaggtccataagatatatatagacgggaacgaggttttgtcggataggaaaataaaatgggctatgaaaaaaaccaatgaaaagggtaatttgcttcatttgttccgaacgaaaaagtttgtcgaagagaattataagaacgataaaaatctgattatcgagaaatataacgagttgggatacagggatgccgctatcgtaaacgacagtgtggtgcggtataacgataaaacggtagatgtttacctgacaatcgatgaaggaaagaaatattatatccgaaatatagactgggtaggcaatacgatttatccgtcggattatctttcggctgtattgggtatgaagccgggcgatgtttataatcagaaaatgctgaacaagcgaacaatggaagatgaagatgcggttgccaatttatatatggacagaggataccttttcttccagttggttcctatcgagggcaatgtgctgaacgactccatcgatttggagattcgtttgttcgaaggtccgcaggcccgtatcaacaaggttgtcatcaatggtaacgaccgtttgtatgagcatgttatacgtcgggagttgcgtacgaaaccgggagagttgttcagtaaatcggacttgatgcgttctgctcgtgaaatagctcaaactgggcatttcgatcctgagacaatggatataaaaccggaaccgaacgaagaaaacggtactgtcgatttggtttataatctcgaatcgaaagccaacgaccaaatcgaattttcggccggttgggggcagacgggtgttatcggaaaacttagtttgaagtttacgaatttctccatcaagaatttgctcaaccctaaatcgtttaaaggtatcattccgcagggcgacgggcaaacgtttacgatcagtgcgcaaacgaatgcacgttattatcagcagtatagtatttcgttttatgatccgtggttcggaggaaaacgtccgaactcgttccagttctcggcttattatagccgtcagaccggtatcgaaagttcttttttgagccgaagctacaacagtttatacaataattctttgtatggaggttactggggaaacagctacttgggtaactcttattatgacgattattatcaaaatgcttatgaaaatgccttagacccgaacaagtctttgcagatgatcggggtttccttcggattcgggaaacgtttggagtggcccgatgactattttacttttatggcagaattgggctatcaggcatatattcttaaaaattgggagtatctgtactatatgcagaacggtacttctcacagttttacgttgggattgacgctgggtagaagttcgatagataatcccatttatacacgtcgaggttctcaatttacgttatcggctcaatttactcctccttattcattattctctaagaaagattacaagagcctctatgaaagttcgtcgagagccgaccgagaagagttatatcgctggatagaatattataaaataaaattcaagagccgtgtatataccccgttgaataactccgaaaaatatacacttgtgcttatgggacgtgccgatttcggattgttggggtcgtataacaagtataagcaaacgcctttcgaaacattccatgtgggtggcgacggtatgaccgggtcttatacatatgctacggaaacaatcgggttgaggggctatgataacggtgctcttacgccctattccgacggtcgggcttatacccggttctcgatggagttgcacttcccgttcttgttgcagccttcgtctacgatatatggtttagcttttgtcgagggcggtaatgcgtggacatcgctcgaaaacttcaatcctttctctctgaaacgttcggccggagtgggcgttcgtatcttcttgccgatgatcggattgatgggtatcgattgggcttatggtttcgataaagtacaaggagagaaagggggtggccatttccactttatcttaggtcaggaattttaa

SEQ ID NO: 675 - DNA, 3276 bp, Barnesiella intestinihominis
tgtaatccggaaataaaaagccttatgaatcaagctgaaataaaaaaaatcaaaaaagtattattgttgggctccggagccttgaaaataggtgaagcgggtgaatttgactattctgggtcacaggcattgaaagcgctcaaagaagagggtatcacgactattcttattaatcccaatattgcgacggtacaaacttcggaaggagtggcagataaaatttattttctgccggttaccccctattttgtagaacgtgtcattcaaaaagaaaaacccgaagggatacttctggctttcgggggacaaacagctctcaactgcggtgttcaactctatcaatctggaatattagaaaagtataacgtacaagtgttgggaactccggttcaagcgattatggataccgaagaccgggaacttttcgttaaaaagttagatgagattgatgttaaaaccattaaaagcgaggctgtcaattcgatagaagatgcagcgaaggcagcttccgagttgggatatcctattattattagagcggcctacgcattaggaggattgggcagtggtttctgcgataacgaggaagaattgcgtgtaaaagcagagaaagcgctttccttttccccacaaatactggtggagaaatcgctgaaaggctggaaagaaatagaatatgaagtcgttcgagatcgttacgacaactgtatcacagtatgtaatatggaaaatttcgacccgttggggattcatacgggcgaaagtatcgtggtagcgccttctcagacattaaccaatagcgaatatcataaattgcgcgaattagccatacggattatacgccatatcggtattgtcggagaatgcaacgtacaatatgcgttcgatcctaaatcggaagactatcgggtcatcgaagtgaatgcgcggctaagtcgttcgtcggctttggcttctaaggctaccggatatcctttggctttcgttgcagcaaaattgggattgggatacgggttgttcgatttgaaaaactcggtcaccaaagagaccagtgctttctttgaaccagctcttgattatatcgtatgtaaaattcctcgttgggacttgggaaaatttcaaggtgtagacagggagctcggatcaagtatgaaatcggtcggagaagtgatggctatcggcagaacattcgaggaagccattcaaaaaggactccgtatgattgggcaaggaatgcacggattcgttgaaaataaagacttggttattcctgatatcgacaaggcattgcatgaaccgacggataagcggatattcgtgatcagcaaggcaatgcgtgcagggtataccgtcgatcaaatacatgaattaacgaaaatagatcgctggttcctgcaaaaattaatgaacattgttcgtacagctcaggagctggaaactctcgacgaatcgatcgcacaattcaaaagcgataaaaaggccggggcggaattgatacgtcgggcgaagatacaagggttctccgatttccaaatagcacgagccatttggaaagataaaatggaagattgccatatgcaatgggtgcgtgaatatcgtaaaacattggggattgttcctgttgtaaaacagatcgacacgttggctgccgagtatccggctcaaaccaattacctttatttgacttatagcggtattgccaacgatgtgaaatatctcggagacaaaaaatctattgtcgtattgggatcaggcgcttaccgtataggttcctcggtggaattcgattggtgtggagtccaagcgttgaacacaatacgtaaagagggttatcggagtgtaatgataaactacaatcccgagactgtttcgacagattacgatatgtgtgaccgactctatttcgatgaattgacctttgaacgggtaatggatattctcgaattggaaaatcctcatggggttattctttcgaccggagggcaaataccgaacaatttggctacccgccttgacgaacagcatgttcatatattggggacgacagccaagagcattgataacgcagaagaccgtcacaagttctcttctatgctcgactcgttaggtatagaccaaccccgttggcgagaactaacctcgttgtcagatatttacgatttcgtgaaagaagtcggttatccggtattggttcgcccctcttacgtgctttccggtgcggcaatgaatgtttgttcgaacaatacggagttggagcagttcctacaattggcagccaatgtttctaaaaaacaccctgtcgttgtgagtgaatttattcagaatgccaaagaaatagaaatggacgctgttgcccgtaatggtgaagtcctgatttatgccatatccgagcatattgagtttgccggtgttcactctggtgatgcgaccatacaatttccacctcaaaaattgtatgtcgagactatgcggcgtatcaagaaggttgccggacagattgctcaggcgcttaacatatcggggcctttcaatattcaatttttagccaagaacaacgatatcaaggtcatcgagtgtaacctgagagcttctcggagtttcccttttgtatcgaaagtgttaaaaattaattttatagagttagctaccaaagtaatgatggggcttcctgtggaaaaaccgaataaaaacgaatttgatttagactatgtcgggattaaagcatctcaattctcgttctcccggttacagaaggccgaccctgtattgggtgtggatatggcttcgaccggcgaagtcggttgtatagggctcgatacgagtgaagcagtattaaaggctatgctttcggtcggatatcaaataccccaaaagaatattttactctcaacgggaacaacaaagcagaaagccgatatgcttgaagctgcgcaattattgcatcaaaagggatataatttatttgcaacaggagggactcatcaattccttaccgataacggtattcctgcggtgaaagtatactggcccagtgaaagtgaccgtgagccccaggcattagaaatgttgcacaataaacaaatcgatttggtagtcaatattcccaagaatctaactcaaaaagagttggataacggatataagatacgccgagccgccattgactttaatatcccgcttattacaaatgctcgattggcatcggcatttattcaggcattttgcagtttgagtatcgatgatatacaaatcaaaagttgggacgaatataaatag

SEQ ID NO: 676 - DNA, 2733 bp, Barnesiella intestinihominis
atgaaatccagaagatataaactacccttgatagccttatcgctatcattagcattaccggctttctcccaatcgtggtttactcccgaagtagaaaaaagagccgaggatattttaaaaaatatgacagtaaaagaacgcctgacctatatcggtggtatagattggatgtacacccgcgctattccccgattaaatgttccggctataaaaatgtccgacggaccgcagggcgtaggtacatggggagcttccacggcttatccttgcgatcttttactggcagccacatggaatccggatatggcctatgcgttcggcgcagctttggcacaagactgcaaggctcgtggagtaaacattctattaggtcctgccgtaaacatcgcaagagctcctttctgtggccggaacttcgaatatatgggagaagaccctttcttgacggcaacgacttctaccggatatatcaagggattacaagaaaacggagtgatgggagtgatcaaacacttcacggccaacttccaagaatatgaccgtaattatgtgagttccaacattgacgagcgaaccttacatgaaatctatttcccggcgtttaaatcggccgtccagaatgcagaagtcggtgctgtcatgagcagttataacttgctcaacggcgtatggacaaccgagaatccctggttgctcaaagaagtactgcgggagcaatggggattcaacgggctcgtgatgtccgactggggctccactcataactgtgttccggcggttaaaaacggactcgatttggaaatggcaggaaatgaaatcgaaaacgaggaagctctgcgccattatctcgaaaccggagaaataaatatgagcgaaatcgatttgaaagtcaaacatatcttacaaacgatgatcggattcggattcttcgacaaagaacaattagatccgagcattcccctcgacaaccccgaaacggcaaaagccgcattggaaatttcgagagaaggaatcgtgttgttgaaaaacgaatcgaacattctgccattgaacaccaatacgattaaaaacattgccgtaatcggtaataacgctacaatttatgcggccggcggcggaagcggactggtaagacctttccattatgtgtcttacttcgacggattgaaaaagttggcaaatgaaaaaggcatcaacgtcacactcgtggatctctatgatcacatggaagatgtcctgtatacagctgccggctcgaacgaacatggtctcaaagccgaattttacaacaacgagaatctatcaggaactcctgtaactacccgtgtagacagtcgtatcaactttgaatggacctcgggacccgatgctgccaatgtcgagaaaaactatttctcggtcaaatggaccggtgaaattcgtccccaagaaacatcgaactatactttcatcgtgaaaggagatgacggtttccgtttaattctcgatggaaaaacggtcatcgatgaattcaaatcgggttccactcgtgaaaaacgttataccatgaaaatggaagcagggaaagcctacaaaattcaactggattattttcagggaggaggcggagcctgtatcgatttggcatggctcaaagacggagatgaaaaccggttccaaaacgaattggacaaagccgacataatcgtcgcattcatcggtcacaattcaagtagcgaagccgaagccggagaacggtccttcggattgccccaagatgtaaaggacctcgtcctagccgcccaaaagagctccaaaccgatgatcggagtcgttaatgccggcggaaacgtagaaatgcaagactgggaacctaaaatgaaaggtcttctttggggttggtacggcggacaagaagccggaaccgcgatggccgaagtgttattcggagagtacaacccttcgggaaaactccctgtaacatttgaaaaaagatgggaggataatccctgttacaacagctattatgataatgggaccaaacaagtgaattttaccgaaggtatcatgatgggatatcgtggatatgacaaagccggtacagaggtccaatatccgttcggtttcggattatcctatacgacattcaatctttccgatatgcaaatcacggaatcttccgacgacaaatatttagtcgaagtttcttgcaaaataaagaataccggaaaggttgccggtgcagaagtcattcaactgtatgtaggcaagaacggcagcagccctgtcgaacgcccgataagggaactcaaaggctaccaaaaagtatatcttgaacccgaagaagaaaaattcgtgactttgtacctttctaaagatgcgttttcttattacgatgtcaatcggaaaaatttcgttgtcgataacggggaatacaacatcgaacttggattttcatctcgcgatataaaattgaaagaccaaactcaaatcaatgttgtttcggctattgacgaagcccgccaagataccgaaaaaggtaacttaattccctcggtggttaaacaaggtgaaattatcagaattgcacaaggccgtgcttccgaattaaacattttcgaccttacgggtcaaatgttactcaaacaaatcgataaatgtacaatcgatacctcttatctaaaaaagggagcctatcttgctttgtataaaatagatgaaaaatttcatacgggtaaattcatcgttgaatag

SEQ ID NO: 677 - DNA, 2040 bp, Barnesiella intestinihominis
atggaaaaattccatgacaagatggaagaaaattttgtgatagatacagggaataaagaatttcaagacgctttgagcttgattcaatatacatctcagtcagtttttttgacagggaaagcgggtacgggcaaatctacttttttgaaatatgtgtgcgagcataccaaaaagaaatatgtagttctggccccgacaggagtgtcggcgattaatgtgggtggtagtacgattcattctttttttaagatgccgtttcggcccatgttgcccgacgatcccgatttgagtttggcgggaggaagaatatatgaattattaaaatacaataagaagcagcgacagttgctgcgtgaagtggaattgattattatcgatgaaatatcgatggtacgggccgatatgattgattttatcgatcgtgtgttacgggtttattcgggtaatatgaggtttcctttcggtggcaagcagttattgttggtaggcgatgtatatcaattggaaccggttgtgacttccgatatgcgagatattcttagccggttttattctaatttctattttttttcggcacgggtttttagagaaatgtcgttggtccctatcgagttgcaaaaagtgtatcgtcagcaagatgagcgtttcgtagaagtattggataaaataagaaacaatactgcgacgagagaagaactcgatttgttgaatagccgttatctcccgcaatatgaacctgagaaggataatttttcgattacattggcgactcgtagggatcaggtggactatatcaatgaaaaccgactatctggattgccggggaaagaatatacatttacggggacgataaaaggtgatttccctgaggggagtttgcctacttcgttggaactggttgtaaagatcggggcccaagtgatttttataaagaatgacccggaacgcaggtgggtgaacgggacgataggaatgatttcggatataacgcccgatgagaaaatcgaggtggtgcttgaatcgggtgagatgtatgagttggagcgttgtgtttgggagaatatcaaatatacctacaatgaaaaagaaaagactatcgaggaaagtgtattgggcacttttttacaatttcccattcgtttggcttgggctattaccgtgcataagagtcagggattgacgtttaatcgtgtgattgtcgattttacgggaggggcttttgccgggggacagacgtatgtggctttgagtcgatgccgatctttggaaggtattgtgttgaaacggcagatcacgcatcgggatatattcgtaaatcccgatatcgtacggttcagcaaaggtttcaacgattctgttttgatagaacagtcattgaagctcgcacaagccgatcgtctgtatgtcgaggctgtgaatgctttcgacgaaggcgattttgacaagatgttacaaagttttttcaaggctatccatacgagatatgatattgagaaacccgtaattcagaggtatattcgtaaaaaattgaacgttatcaatcagttgcgtgttaaaaatcgggaacttcaacaggcgttgtccgataggaataccgtattgcgtaaatatgcacatgaatattacctattagggaacgagtgtataactaaggcaaaggatgtgcgggcggctttggccaattttgacaaagcgttgtctctcgatcctacgttgatcgatgcatgggtaagaaaaggaattacgctcgaagatcaaggcgatgaacatggagctatggcgtgttacaatgaagctataaggttgagcccgttgagttttaaagctctatataatcggggtaaattacgctataaacaaggcgattacgaaacggcattatccgattttgcaaaagccgttaaacaaaaaccgttacatgctacggcacacgatcgactcggagatacttttatcaaactggaaatgcccgatatggccgctcgtcattgggctattgcagaagagttgagggagaaaaaacaacagaacaacaaataa

SEQ ID NO: 678 - DNA, 3783 bp, Barnesiella intestinihominis
catgaatatttaatcctaaaatttttaaacatgaaaaacttatcttttttcattttagtatttttcttatcgtttcttagtccggcttttgccgcttatgacaatctttatttggtaggtaatgctacggaggcaggttgggatccggatgccgctatcccgatggaaaagcaggagcctggtatctttacgtggacaggaactttatcggattatagtatagatgaaggccggttcaaatttttggtgtcgaataaatgggaaccttccattacttgtcgtatagatatagccggacatttgctcgtcgagtcgggaaaggaatacgatttgtatgagcgggctaccgccaatgatggcttcgataatgcatttcaagtgcctgttacgggagtctatacaatccgtgtcgatttgaatacaatgaagatggtttgtaccggaggagatgtgattgtccgagagaattgggagtatgtgagacccgaaatcggagctgacggcgaggggcatgtgttcccgggagtatgtgtgcctttcggtatggtgaaattaggagccgattgtggagaccgaaccaataactcaggttggggaaagggtggcaatatacaaggtttcagccatttgcatgtgagcggaaccggcggtggtcccaagtatggaaatattttatttcaaccgatgaccggagatttgaacctttcggattattcgtcggcacgttccgacgagagattcggattgggcttgtatgaagtttctttgagtaagtataatgtgggagtgagactgacggcatctgctaaggccggatttcatgaatatactttcccccaatcggagtcttcaaagatattgatcgatgcaggaagttgtctgacactacatgtcgaatcacaggaattggtagcctcgggggtaaaaattctttcgaataaagaaatcgagggttattcgaccgtcaaaggaggctggaatttaggtggtccttatacggtgtatttctacgctttgttggatacccccgccgatgagtatactgtttggaaagggacgtctgtccaatcgggcgagcaggtagatgcaacgggaacagagaaaaccggggcttatttcgggtttcatacgacagaggggcaaaaagtgagagtaaaagtaggaatatcgtttattagcacagagaaagccaaagcgaacatttcggaactttcgtcttgggactttgacgaaattcgcaatgcaggaatcgcacaatggaaagaggtgttgaacactgtggaagtcgaggggaacgataacgacaagactattttctattcggctttgtatcatgcctttttacaacctaccgaccgcacgggtgagaatccgctgtgggaatcgtccgaaccttatttcgacgattattatgccatctgggatacattcagagctacacacccgttgttcgctcttttgaaaccttctcgtcaggccgatatcgtacggtctatgatagatatttatgagcacgagggatatatgccggacggccgtagcgggaattgtaacggtcgtgtacaggggggctcgaacagcgatgtactgattgctgacgctatcgtgaaaaatttgccgggtattgattacgaaaaaggattggccgcaatgattaaaaatgccgaggtagaaccggagaacccgagaaatgaaggtcgtggcggtgtcgaggagtataataccaaaggatatatttccacggtgaccgagcgatcgggaactcgcacatttgaatatgcctattgcgattatgcaatcgctaccgtagcaaagaaattgggtaaacaagatgtttacgaaaagtatctcgaacggtcgaataactggaaaaacttgtggaacgacaacatcaatagtcttggattcaaaggattcttgtggccgaaaaatggtagtggcgactgggtgaacgagaaagattacaatgttttccgtcgcgatggttgggaaggaatcgtatatgaatcattcccgtgggagatgtcgttctacgtgcctcacgatgtgaacgggctgattgcaagatgtggcggtaaagaggctttcttgaagcggctggatacatattttacgcatgtccaagacgggttcgaccaaaacagctatatgggattattccaaataagcaatgagccggcatttttagtgccaagcctgtataactatgtgaatcgtcccgacaaggcggcggagattgtccgtagggttttgaaagagcgatataatacgactgctacggggttgcccggaaatgacgactcggggtcgatgtcggcttggtatatattccattcaatgggattttatcctaatgcgggacaggacatatatcttatttcaagtccggtatttacgaaaacgacaattaatctcgacggaggaaaagtgtttgaagtattggctcctaatgcaagcgataagaatatctatattcaatcggccaaactgaacggtcaagagctcggtcggtgctggttgaagcatgaagaaatcgttaatggcgggactttggagcttgtcatgggcgataaaccgtccgattgggctatcgatggagaaatgcctccatcgtcgccgataggagttgaagaggtttctcccgaaatagattcaccgcaagtgcgtatacactcttacagtgcacaggtaggcaataacgaagcggcttattgcctttttgaggagccgggaaagggggtgaaatggtgcgacaataagagtaccaatccctgggtgatctttgagttggccgatgtgtatatggtcgatcgttttgtctttcgggattcgaaaacggtagagggaaataacaatgttcattcctatcgtatttacgtcagtaagacgggaaacgacggtgattgggaagaagtggtgaatcgcaatgatgcggaagcgggaaacgccaatgtaaaggatcatcgtttggccgagcctaaggaagcccggtttgttaaattttcgatggaacttcctaccggtgaaaatgccgtgcgtatctatgggttcgatatttacggtaagttgaaagaaagaacggataggggcaatttggtgagtgtaggtaaaacgtttttgaagtcctcgggggctaaatcgttttataccaatgcccggcatatttttgacgggttgaatgaaaataccgagtatcattgggatttcgataggtctgccgccgataagcattattgcattctcgatttggaagacgaatatgatgtaaatgcattcaaggtatatgatgcgaatcaaatcgaagggtataatatctatgtggccacagagacccccgaccttaataaaataaataatagtgcagatgagaatagcgtttggactcttgtttcatcgggcgatttgaataaaacgaataagtcggtgaccgtggatagggtgaaggctcgttatgtgaaaattgaaattccaagcggaaatatagacggagagtcggcaactgttaccgagtttgaggtttatatggacggtacttctaccggtttgacgggaaccgaaagagaagtcaccttactttatcccaatccagtgaaacggggggagcctttgaacgtggcggctcagggtcgattgaagatatatactatcgacggcgtgaatgtatgcgatgtagttgttgacggagaagcgagtgtctcgactcagaattttataccgggtatttatttggctgtggtgtctgggagcgctggcgataaatcgttcaaattggttgtagagtaa

SEQ ID NO: 679 - DNA, 2676 bp, Barnesiella intestinihominis
atgagcgacgaaataacgacaccgcaagaagatatgccccaagatcgttccgctgaaacttcggattcagcggaatctcattcggcttacaaagtacccgtatcggataagccggatattaaattccaactttcgggaatgtttcagaactggtttctcgattatgcttcttacgtgatacttgaacgggcggttcctcatttggccgatggtctgaaaccggtacaaaggcgtattcttcatgcgatgaaattgctcgatgacgggcgtttcaacaaggtcgccaatgtcgtgggacatactatgcagttccaccctcatggcgatgcttccataggtgatgcattggtgcagttaggccaaaaggatttgttgatagagtgtcagggaaattggggaaatatacttacgggcgattctgccgctgctcctcgttatatagaagctcgcttatccaagtttgccttagatgtcgtatttaatccgaagactaccgaatggaagttgtcttatgacggtcgtaaaaaagagccggtgactcttcctgtcaaattccctttgttgttggcacagggcgtcgagggtatcgctgtggggttggcttcgaagatattacctcataattttaatgagatattacaagcggctgtggcttatctgcggggcgaggagtttcatttgtaccccgattttcagacaggtggatttatagatgtttctaaatataacgatggggaacgaggcggcagcgtgaaagtacgcgctaaaatcgagaagatcgataatcgtacgctttctatcgtagaaattccttatggcaagacgacatcgacactgatagaatctattcttaaagcccaggacaagggaaagataaaaatacgaaaggtcgatgataatacagcccagcatgccgagatattggttcatctcataccgggcacttcttccgataaggctattgatgctttgtatgcctttaccgattgtgaagtgagcatttcacccaactgttgtgtcatcaatgaggataaacctcacttcatgactgtgagcgatttgttgcgtatcagtgtcgaaaacacgaaagaattgctgcataaggaactacttatacagaagggtgaagcgcaagagattttgcattttgcatcattagaaaaaatatttatagagaaacgcatttataaggataaggaatttgaggaaagccgttctatggacgaggctatcgcgcatgtagacaagcgtttggaaccgttcaagccttcttttatccgggaggtgacttccgacgatatattgaagttgatggaaataaagatggctcgtatccttaaatttaattcagagaaggcagatgagttgatcgctgctaaaaaagagcaaatcgctcaaatcgattatgatatagaccatttggtcgattatacaatcaagtggtacgactctttgaaagaaaaatacggcagtcgttatccccgattgacagaagttcgtagtttcgataccatcgaggctaccaaagtggtcgaggcgaatgaaaaactctatatcaataaagaagaggggttcatcggtacatcgttgaagaaagacgagttcgtttgtaactgctccgatatagacgatattattcttttctaccgagatggaaaatataaggtagtgaaggtgagtgagaaaatgttcgtagggaaaaatcttttacatattgccgtatttaagaagaatgataaacgtacgatatacaatgcggtttatcgggacggaaaggcaggattgcattatatgaaacgttttgctgtgaccggtgtgactcgggataaggaatatgatcttactcagggcaaaccggggtcgagggtcgtttggtttacagcgaatcccaatggagaagccgaggttttgcgggtgacttttgtcccgaagcctcgcatgaaaactctgtttgtcgaccgcgatttcagtgaaatagccattaagggccgtcaatctatgggaaatattcttactaaaaatgagattcatcgtatttctttgaaggaacggggcggatctacattgggtggacgcaaggtttggttcgatcgagatgttctccgcttgaattatgatggacgaggagaatatttgggcgaatttcatggagacgatcaagtgcttgtcgttttggagaatggtgagttttgcacgacgacatcggatgccacgaatcattatgaccccaatattttacggatagagaaatttgatcccgataaagtttggacagtagctttgtatgatgcggcgcaaggttatccctatttgaaacgatttgtttttgaagcgggtagccgtaaacaaagtttcttgggagataatccagattcccgtttgttgttgattaccgatacggcttatcctcgtattgaagtcgcattcggagagggggactctttccgggaacctatggttgtggatgcagccgaatttatcgcagtgaaaggctttaaagcgaaggggaaacggcttacgacttattctgtcgcgaccattaacgaattggaaccgttgaggcaagaagacgattctgtcgttgaagatgacagtagtgtcgaaacggatactcttatggatagtaatgtcgataaaccggaagatagtgcttcgggacaaatgactttgttttaa

SEQ ID NO: 680 - DNA, 2421 bp, Barnesiella intestinihominis
atggtgatgaagaaaggtttttggattattttgtgtatgttttttatccccctagttacttttgccgggaatatgaaattgcattatgatcgtccggcagagtatttcgaagaggctctcgtgatagggaatgggacgatgggagcgactttatatggcggtgtaaaaaaagataagatttcatttaacgatataacactttggacaggagaacccgaaagtgaaaattcttctcccgatgcttttaatgttattcccgaaatcagagctttactggataatgaggattatgaaggggcagataaggctcaatacaaggtacaaggacattacagtgaaaattatcagccacttggaacattgacgatagaatatcttgatgatacagttggtatttctgattaccaccgatggctcgatattggtaatgctacggcacgaacgcaatacttgaagggcggaaaactttttacgagcgattattttgcatcggctcccgattcggtgattgtcattcgtttgaaatctgaaaataaggaaggaattcatgcgttgctttcgttcgattctccgttacctcatagctcgcaggtggccgataatgaaatatctgttgaaggttatgcggcttatcattcgttcccggtttattataaggcggaagataagcatcgctatgatccggaaagaggcattcactttaagactcttgtgagggttttaagtgtcgatgggagagtaaagaatcgatattcggatagccgtatcgagattgacgggagcacagaagtgctcattttgatagcgaatgttacgagttttaatggttttgacaaggatccggttaaagaggggcgtaattatcgcagtcatgtagaaaaacgtatgaagtgtgccatcggtaaaacttatgatgctttgcgagaggcacatattagagactataaatattatttcgaccgtgtaaaactcgatttaggaaatacagatgatgatattgcggcattgccgacagacaaacagttacttttttataccgattgtaagcaacaaaatccagatttagaggaactttattttcaatttggacgctatttgctcatatctagctctcgtactccgggagtcccggccaatttgcagggcctgtggaatgaaagtgtgcttccgccttggagcagtaactatacagtcaatattaatctcgaagaaaattattgggcttccggtacgactaatctgatagagatgcaatatccgctgatagagtttattgctaatctcagtaagacgggaagaaaaaccgcaaaggattattatggagtagagcgaggttggtgtttggggcataattcggatatttgggcgatgacgtgtcctgttggtcttaatgagggggacccttcatgggcttgttggacgatggggggtacatggttgtctactcacatttgggagcattatctttttacattggacaaggaatttttgtgtgaattttatcctgtgttaaagggtgcggcagagttttgcatggattggttagtcgagaaagatggaaaacttgtgacctctcccggaacctctcccgaaaataagtacattacgcctgatgggtatgtgggagctacttcctatggaaacacttccgatttggcgatgatacgcgaatgccttattgatgccgccgaagcctcgaaggtgctcggggtggataagtctttcaggaaaagaattaaaaagactctttctcggttgtatccgtatcaaattgggaaggacggtaatttgcaagagtggtattacgactggcaagatcaggacccatatcatcggcatcaatctcatcttttcgggttgtatccgggacatcatttgtcggttgaggaaactcccgaattggcggcagcttgtgcccgtacactccaaattaaaggagatgaaacgaccggttggagtaccgggtggcgtgtaaaccttttggctcggttacgagacggagaaaaagcctatcatatgtatcgtaggcttcttcggtatgtcagtcccgataactataaaggagaagatgcgcggcgtgggggtggaacttacccgaatttgttggatgctcattcgccttttcaaatagatggtaactttggtgggtgttcgggtgttatagaaatgctcatgcaatcttcgaccaataagatcgttcttcttccggcattgccggaatcatgggccaatggtaaagtacaaggtatttgtgctcgtggcgggtttgtcgtcgatatggaatggaaaaatagagaagttgtatcattaattgtctcttcccttaaaggaggacaaactgagatttgcttcaatggagtttcgaaaaaagtcgtatttaaaaccggtgagaaaaaaagattgtttgtagttgaaaagtag

SEQ ID NO: 681 - DNA, 2484 bp, Barnesiella intestinihominis
cctaaacctgtcaaaatgtcaatatttaatcatacacctaagaacaattatatgatctgcgaaaacgacgaaaatacaccatcgattatgcctctgtttacagaaatatcaggacaaaacgattcggaatgtaagactttaaatacaaaaggattgcccattcttgcattacgcaatatggtattattcccgggagtggctatccctgtcaacgtaggaagaaccaaatctttgcagttgatcaaagatgcccaaaacagtcacacccctatcggtgtggtttgtcagcgagatgccgccgtagaggatcctggaaaagacgatttatacgaagtaggagttatcggtgaaatcatcaagattctggaaatgcccgacgagagtacgactgtcatattacaagggaaaatgaaacggtttagaatcgacgaaattaccgaaacgttcccttatatgagagccaatgtatcgctggaaaatgaaattttacccgatgccaacgacaaggaattcgaggctttggtttccgccttgaaagacttgactttcgaactgttgaaaaatatcggagaacaagccaaagaattggtatttgctattcggaacatagatagtgcgcattatttggtcaatttcttaggtgcgaatattccgttatctgcaacccaaaagcaagaattgctcaccatcagcaatatcaaagaacgtttgttcaaactctatgaaatgctgacacaagaggctcaactcttacaaatcaaggccgacatacagtccaaaacgcgcgaagacttgaatcagcaacaaagagagcacttcctgcaacaacagatacgcaccatacaggaagaattgggtgggaacatgcaagaccaagatattcaagaattgcgtgaacgagccgaaaaaaagaaatgggacagtaaaactgccgagattttcgaaaaagaaatgagaaaactcgaaagactacaccctcaatcgcccgacttctctgtacaatatacctatttggacacgttgttagagcttccgtggaacgaatatacccaagataatttcaacctcaatcatgtccagaaacaattagacaaagatcactacggattggataaagtcaaagaacgtatcatcgaacatttggctgtgctgaaattaagaggtgatatgaagtcacctatcatctgtctgtatggtcctccgggcgtaggaaaaacttcgttgggaaaatctgtcgcagaagcgttgaacagaaaatatatccgtatctcattaggcggcctacatgacgaagccgaaataagaggacatcgccgtacctacataggagcaatgccgggacgtattatacaagggctcatcaaagcaaaaagctcgaaccccgttttcgtattggacgagatagacaaaataggaaacgatttcaaaggcgatccggcttcggccttactcgaagtattggatccagaacagaataatgcgtttcacgacaactatatcgacatcgattacgatttgtcgaaaattttattcatcgctactgccaacaatttgaatactatatctcaacctctgctcgaccgcatggaactaattgacatcagtggatatattatcgaagagaaagtagagataggacgtcggcatctagtaccgaaacaactcgaaaatcacggattaaaggaaggtgatgtcgttattcccaaaaaagtaatggctgcaatagtcgaccaatatacccgcgaatcgggcgttcgggaactcgataaaaaaatagcccgcatcatgcgaaaagtcgctcgactgaaagcctccggtaaagaatataaccccaccctttctatcgacgatctgcacgaatatttgggtgctcaggaatacaaccgggacaaatatgaaaacaacgattatgccggtgtcgtaacgggactggcatggacagccgtcggaggtgagattctgtttgtcgagtcgagcctgagcaagtcgaaaggagaaaagctcaccttgaccgggaacttgggcgatgtaatgaaagagtcggcggtaattgccttgcaatatatcaaatcgcatgcttcgctattgggtatcgatgaagacatcttcgataaatgggccgtacatatccatgtgccggagggtgctatacccaaagacggaccctcggccggtattacgatggtaacttcgctagcctcgacttttacccaacgaaaagtgaaagaccatttagctatgacgggtgaaatcacgttacggggaaaagtccttcccgtaggcggtatcaaagaaaaaatcctcgcggccaaacgtgcaggaatacgagagatcatactctccgaagaaaaccgaaaagatatagaggaaatcaaagagtcctatttgaaaggactcacattccactatgtaaaaaatattaccgatgtcctgaaaatagcattgaccgacgaaaaagtaaaaaatgccattgacattaaataa

SEQ ID NO: 682 - DNA, 1638 bp, Barnesiella intestinihominis
atggcaaaagaaattaaattcaatattcaagctcgtgaagaattgaaaaaaggagtcgatgaattggcagatgccgttaaagtcactctcggtcctaagggtcgtaatgtaattattgagaaaaagtttggtgctcctcatattacaaaagatggtgtgacagttgccaaagaaatagaattggaagacccatttcaaaacatgggtgctcaattggtaaaagaagttgcttctaaaacaggcgatgatgccggtgacggaacaacgacagcaacagtattggcacaagccatcgtaaacgtaggccttaaaaacgtagctgccggagccaaccccatggatttgaaacgaggcatcgacaaagccgtagccaaagtggtagaaggcatcaaggctcaggctcaggaagtaggcgacgattttgagaaaatcgaatcggttgctcgtatctcggccaacaacgatagcgagattggccagctcattgccgaggctatgaaaaaagtaaagaaagaaggtgttatcacggtagaagaggccaaaggtaccgatacgactgtcgatattgtagaaggtatgcagttcgaccggggatatatttctccttacttcgttacgaataccgagaaaatggagtgcgaaatggatactccgtatattttgatctacgacaaaaagatttctgccttgaaagatatgcttcccgttcttgaagctacggcacaaacaggtcgtcctttactgattatagcagaagatgtcgatagtgaggctttggcaactttggttgtaaaccgtttgcgcgggtctctcaaaatctgtgctgtaaaagctcccggattcggggatcgtcgtaaagaaatgctcgaagacatagctgttttgacaggtggtgtagttatttctgaagaaaaaggattgaaattggaatcgacgacaatcgaaatgttaggtcgtgctgaaaagattacggtaaacaaagagaataccacgattgtcaacggtatgggaagcaaagattccatcgctgcacgcgttgcccaaatcaaagcccaaatagaaacgacaacctccgattatgatcgtgagaaactgcaagaacgtttggctaaattagccggtggagtcgcagttctctatattggagccgcttccgaagtcgaaatgaaagagaaaaaagaccgtgtagacgatgcattaagcgctacaagagcagctattgccgaaggcatcgttccaggtggaggtgttgcatacattcgttgtatccccgcattagatggtttaaagggagcaaatgaagatgaaacgacaggtattgaaattataaaaagagccatagaagaacctcttcgccaaattaccgctaacgccggagtagaaggtgctgttgttgttcaaaaggttaaagacggagaaggagactttggatacaacgcccgtacagatacctatgaaaatttctttgcagcaggcgttattgacccggctaaggtaactcgtgtagctctggaaaatgcagcctctatcgcaggcatgttcttgacaacagaatgtgtgattgccgataagaaagaggaaaatcctgcacccgctatgccggctcccggaatgggcggcatgggtggaatgatgtaa

SEQ ID NO: 683 - DNA, 2178 bp, Barnesiella intestinihominis
cgaattggtcgaagggaatcgggaaaacctgaaaataactctgccggtcgacttggcaatcgccgaaataagattgaaggaatgacagatttagccggtttaaatatcaaataccttcccggggtcggccctaaacgcgccgaactcctaaacaaagaattagagatattcacctatctcgacctgctgcactattatccgtataaatacatcgaccgaagcaagacctacaaaataaacgaaattgacggtttgatgccttatattcagttacgaggtaaaatcgtttcatacaccactcacggagaaggggcacgccggcggctcaccgctctgttctccgacggttcgggagtcatagagctcgtttggttcaaaggaatacgctatatcaccgaccgttacaaaccgggaacggaatatacgcttttcgggaaacccactcttttcaacgggaaattcaacatcgcccaccccgagctcgacccgatagacgatcgcatagacaacacgaccggactacaaggatactataccacgaccgaaaaaatgaaaaatgctttcctcaactcgaaagctatacagaaaatggtatatacccttctctccggaatacaaaacccactgcccgaaacattgccccttcccattatctcgcgaatgcaactcatgagttcgaccgatgccctacgcaacattcactttccggtgacgataggccacctgaggcgggcagaattcaggctcaaattcgaagagttattctacctgcaattacacattctacgatatacccggttacggaacctgaaattgggaggattccgtttcgaccacatcgggaattatttcaacgacttttatcatcaagtgttgcccttcgaactcacccaagctcaaaaacgagtcatcaaagagattcgagccgatatgggcagcggcagacaaatgaacagactgttacagggagatgtaggcagtggaaaaacattggtcgcgctcatgagtatgctcatcgccgtagacaacggttaccaagcctgtctaatggctcccaccgaaatattggccacccagcattacgaagggctgaaaaagatggtagagccgttaggactacgtattgaactactcacggggtcggtatctaaaaaacgaagagctcctattttagaagggctcctcaccggagaaataaacctgctgataggaacccatgcccttctggaagactcggtaaattttgcgaatctgggttttgtcgtcatcgatgagcaacatcggttcggggtagagcaacgggctcggctttggagaaaaaataaaattccgccacacattttggtcatgactgccacccccattccccggactttggccatgaccgtttatggcgatctcgacgtatcggtcatcgaccaactgccccccggacgcaaacccatacaaacactccttcaatacgataacaaaagagcccagctatacgcttctttgcgcaagcaactacaaatcgggagacaagcctatatcgtgtatccgctcatacaggaaagcgagaaaagcgacttgaaaaatttagaagaaggatatgaacacattcgggaaattttccccgaatatcaagtgtgcatggtacatggaaaaatgaaagcggccgaaaaggaaaccgagatgcaaaaattcgtatcgggagaagcccgcattatggtggcgactacggtcatagaagtcggggtgaacgtacccaatgcatcggttatgatcatcgaaaacgccgaacgtttcggtctggctcagctacaccagctcagagggcgtgtaggtcgtggcgccgaacaatcgtattgtatcttgatgacatcttataaaatcaaccaagatacccgaaaaaggctcgaaatcatggcagaaaccaatgacgggtttcgcattgccgaagccgacatgcaaatgaggggaccgggggatatggaagggactcagcaaagtggaattgcattcaatttacaaatcgccaacttggcaaaagatgcacaaatattgcaagtagctcgcgatgaagcaggtaaactgctagattccgatgaattgttagaacgacccgaaaaccaaatcgtacgaaaagaactaaaccgcattttcgaaaaacaaaaaaactggggattaatcagttaa

SEQ ID NO: 684 - DNA, 1101 bp, Barnesiella intestinihominis
atgtacggaaaatcggttaagataaaccattggctcattccggtcagttggctatatggactcggagtagagattagaaacaaactcttcgactggggcattctcccggccgaagagtttgacatacccgtcatatcagtaggcaaccttgccgtaggagggacaggcaaaacgcctcacatcgaatacttgatcgaattactcggtcataaatatcatattgccgtactcagcagaggatacaaacggaaaagcagaggattcatattggccgatgacaagtctaccgcccgtgaaataggagacgaaccttaccagataaaaagaaaataccccaatataaccgtcgcggtagatgccaatcgccgtcgaggtatcaaacaattaaaaaaacaaatacccgacatcgatgtgattctactcgacgatgctttccaacatcgctatgttacgccgttgtcctcgatagtactgaccgactacaatagagctttacatctcgacaaactattaccggcgggacggttacgtgaatctcgacacgaattgtcgagagccaatatggtcatcgtaaccaagtgtccaatagatatgaaacctattgaatataatattatatctcgttggttacacctgtttccctaccaaaatctatatttctccactctttcttacggtcatctgcaagcagtattccccgatactgccataggagaaatatcgctaaaagatatatcgagaaaagacggattgatggtagtaaccggaatcgccaacccggctcccatgctgcaatacatctctcattttcacgacctgcgagaaaagttactttatcccgatcatcataactttacttcgaacgatctgaacgatataacgacacggtttttggccttgaaaggagagaaaaaatacatcatcaccacagaaaaagatgcagcgagactacgatcggtcccattcgatgacgcaataaaaaaagcgctctattttcttccgatacatgttcgtttcatgcaacataccggaacatcattcgatgaaaaaatttcagacataatctataagaaccgcagatcgaaacaagtaaaaaaataa

SEQ ID NO: 685 - DNA, 3315 bp, Barnesiella intestinihominis
tccgtcaaaaagtattggaaattttattgtcggaagggtatcgagctcgcattatctgattttatgttacatatatacaaagcctcggccggttcgggcaagacttataccctgacattggagtatattaaattgctgttgggatatagggacgaacaggggcgttaccggttatatcggaagagcgatgcacagcatcgacgtattttagcggttacatttaccaataaggcgaccgaagagatgaagcatcgtatcgttttccagctcgatatattggcacacgatacggagaagtcgccttatgtcgatggcttgatgcaactgttcggttgtacggttgaacagattcggggtatagcttcggagacgctgtatgttttgttacacgatttttcttatttcaatattagcacgatcgaccgtttttttcaacaagtgcttcggaattttacccgcgaaattggattgcagggcagttttgagatagagatggataacgatttcgttacggcttctgccatagaccgcatgtattccgaattgtccgatgtcgaccaaaaaggtcttctcaactggctgatacattatgccgaggaacgtatagagtcggggaactggtggagcttgggaaatcgatccgaacggaaagacgatttgagagaactggccggggagttatcgaaagaaacttataaattgtttcgtaacgagatactttcgcaaatcaaggataagtcggttcttgacgattatctgaaagagatgcgccgtatccgtgtcgagttcgagtcccttttacggaaattgggggaggcagctatggctgtactcgaacgttatggattgtcgcccgatgattttaaggggaaggggcgttcttggattcagtatcttaaaaaaattgtcgatggaaaagtggagcctccgacacagacttttcgggcaaatgtgggcaatcgggacggttggtttttgaaaaaagaaataccggcttgtatagatagtctctatgaggaacttaatccggtgttgcaggaaatggtaaattgtttcggagaaccctacgtgcgttacaacacagcggtacaaagttcgaagtatatttatgctttggggatattggtcgatatagaccgccgtatcgaggagtacgaaaaggaacataatgtacttctcctgtccgatacggccggtatactcaatgcggttatcaacgagaacgatgccccgttcatttatgaaaaaatagggacgagggtcaaccattttatgatcgacgagtttcaagacacctccaaactgcaatggcaaaacttcgcacctctcataggagagagtttgagccatgaccacaccgatttgatcgtgggtgatgtgaaacagagcatttatcggtggcgtaactccgattggtctttgttgaatgaaggcgttcagtcgttgttcagaccgtcgcagtatagcgaaaggtctatgaatatgaactatcgcagttgtgcctgtatagtagagtttaataatagaatctttggcgaggctgctcgtttgttacagcagaagttagagcgagagatcgaggagtctgctttggtcgaagggagcttcgatgtcaagatagaaaaggcttatgccgatatcgggcagagagttgccgattcgaatcttttgcgcagcggtcatgtttctgtaacgatgtgggaatcggataaaaaggaggatttttataacgactccttagctcgtattcccgatttgttgagggatttacaggataggggatacacccccggtgacataacgtttttgacgagaactgccagagaagggaccatgcttgtcgatttgttgttgcgtctgaattccgagaataccgatgggcgttatcgttacgacgttatatcgagtgagtcgttgttgataagaaactctcctataatcaatttgttgataggaattttgagatatattcaagatccttcgatcgaattgaaccgactggtggctgtctatgaatataatagccgaaaattcaaggcgtctgatgatgcggttattttgtcctatttcgaagatagagagaacatcgggaggcatctcgataatgattttttctcctttgtcgagagtattcgcaaagagcctttgttcgagatgtgcgagcggattgtttcttatttttcagatgagggggctgacgaaggtgaacgggtgtatatacaggcttttcaagattatgttttggattattgtcggacacatacggccgacttgggttcgttcttgtcgtggtgggacgataatgaggataagttgtcggtgacgactccgcaggagcaagatgccatgcgggtaatgactatacataaatccaaaggccttgaatttaaagtcgtaatcattcctttttgtaattggagtttggatcatcagtccaatcaaaccaattttgtctggtgtcatacttatgaagagcctttttctcgtattccggtgctaccgttacgatatggtagcagtttggcccagacctactacgcaaccgagtatttcgatgaaaagatgtatgcttgtatcgataatctgaatatcgcttatgtcgcttttacccgggcggaagaagaattgcatatttttgctccggctgttaaaaataaaagcgacaaagggcgtttcggcagtatctcggcaatgctgggtgaagtgttgttcccggaggggaacgacggcggagaccttcattatgaggctggaatcgattggcgagccgagaaaaaaaagaaaaacgtttctgtcgtaccgtcttttcctgccggtatatatcgctctatcgaaccgggaaatcggttgcacttgcgattacaagggaagggtgttttcggtgaggggaaggatcgtacatacggtacgctcatgcatcgcattttgagccagatcgaaaccctcgatcgcatcgacgatacgattgctgcgttcgtccgttcgggagagctttccgagtcggagtcgaaatcgattcgtgaggatataaatcgttggcttgccgacgaacgagtgagttcgtggttttcgccgggggtgaacgtgtggacggaaagggaaattttacagcccgatggttcgttttatcgtcccgaccgggttgtcgaaacggacaatgaggttattgttgtcgattataaattcgggaatgtggaacgtgcctcatataaaagacaagtaaatacttatacttccttgattgaaaagatgggatatgaccgagtatcgggatttatttggtatgtgtctcttgggaaattagaacgggtttaa

SEQ ID NO: 686 - DNA, 1632 bp, Barnesiella intestinihominis
gttacctatatggcaaacatacagcaagaaataagtagttttctgccggaggctaccttcgtggaagggactattttggaagtgtcggttcctgatgccaagtggcatgatttagcgctttatttgcataatcaactgcactttgattatttggtttctattgtgggcatggactggggtgagaccgtgggttgtgtctactatttgacttctaccgtcgataattcacaagtttcggttaaaatagagaccgcagatagagagaatcctctgcttcattctgtttcggatatttggaaatccgcgaatttatacgaacgtgaagtctatgatttttttggaatccgtttcatcaaccaccccgatatgcgccggctgtttttgcgaaacgactgggtggggtatcctttccgaaaagattataatgcagaccctgaattgaatcctatccgattggagcatgagtctgtcgatgatgtcacacactccgttgtcgaaacggaagatggaaagctcgaagaacggacgaatacgatattttctcctcaggaattcgtggtaaatatcggtcctcaacatcctgcgactcatggtgtgttgcgtttacgtacctctctcgatggcgagacggttaaaaaaatcgatgtgtattgcggttatgtgcataggggaatagagaaactatgtgagtctcttacctatcctcagactcttcacttcgccgatcgtcttgattatttgtccgctcagcagaaccgacatgcagtctgtctttgtatagaagatgctttgcaagtagaagtgcccgcacgtgcacagtatatacgtacgatcatggacgagttgatgcgtatttcttcgcacttgttattctggtccacattctgtatggacttgggaggaacgacagcattcttctatggtttccgcgatagagaaaagattctcgatatatttgaggaaacgtgtggtgcgcgtatgactttcaattactatacgattggaggtttgatggccgatttacaccccgatttccagcgtaaggtcaaagagttttgtgcctatatgccggctaagctgaaagagtaccacacgttgtttaccggtaatgtcattgcccaacaacgtatgaaaggagtgggaattctttctcgcgaggatgctatttcgtatggaattgcgggaccgtcggggcgtgcttcgggttgggcttgcgacgtgcgtaagaatcacccgtatgcaatgtatgacaaggtggaatttaatcaagttatccgtacggagggagatgtttttgcccgttacatggtacgcttagatgaaatattggaatctatacatatcatagagcaattgatcgacaatatccccgagggtgattatgccgttaagatgaagcctattatcaagctgcccgaaggccgttatttccgccaagtagaggccagtcgtggtccgttgggtatttttatcgaaagtcatggagataagaatccttatcgtttgaagataaattcggcatgcttgccgctggtcgctggtctcgatccaatgtgtcgcaatggaaagatcgccgatttgattgctatcggagggtcgcttgactatgtaatccccgatatggacagataa

SEQ ID NO: 687 - DNA, 2895 bp, Barnesiella intestinihominis
atgaaaatcaaacatctattgtgctttatcgcgctatgtctgttttttactccgggtaaagcccaacaacttagcgtaatgactctacgtaatggagcaacggtctacatttgggaagacaaaagtaaacccgatgtattcggtatgatcgctttcaaagtaggctcggtcgacgatcccgaacaatacaccggactggctcattacttggagcatgtcatgttcaaagggacccaaaccatcgatgcactggattgggaaaaagagaaacccatctatgaaaaaattatcgccaagtatgacgaacgagcagcattaagcgaccctgctgcccgcgaagccatagacaaggaaattaacgacctgacccgtgaagcagcccaatatgccgcaggaaatgaattttcccttttggtagaccacatgggaggacaaggactaaacgccagcacaggctacgaccaaacggaatatcacaattccttcccgccctcgcaactcgaaaaatggctcgaaatctattccgaacgtcttatagaccccgtattccggggcttccagaccgaattggaagccgtatacgaagagtacaacatgtataacgacgaccgcggatcgagaatgagagagttcatctatgaacaagcattcggagatcacccgtacgcccgtcccattatcggtctccccgaacacttgaaaaatccccagttgagtaaactgatcgatttctataatacatggtatggtcctcagaacatgtctatcattctggtaggtaacatcgacgccaaagaggctataccgatgattcgcgataaattcgaaagagttccccgccgagccgagatacatcgggaaaagaaacccgtccgccaattcaaaggtcgcacggaaaagagcgcgaaaattttctattatcctatgctggccctcatttacaatggagttccttcgaacgacaaagaagaaatcgcattggaaatctgttgccaacttctctccaattcacaaaaaaccggtatcctcgacaagctgcaactcgacggcgacatcatgagcgtaggcgcatctcaaaatgccatgcgagatgcagggattctcatgatcaatgccattccctctttcgatgcgaaccaaaatcgttgggacagtcacaaatcggtagaaaaaatcgtattatcctcattgcgtcaactgcaaaacggggagttcgacgaagcgaccctcgaagctatcaaacaaaacctgatacgcgaatacgacctgcaaatggaatcgaacgaaatgaaagcctatatattagcctctcttttcaatacgggagccgatccgtcggacatcgtcaacttcaaagaaaaagtcaaagccgtcaccatcgacgaggtgaaagccgtagcaaaaaaatactttaacgacaattacctcgctttgaatattcaagaagcgaaaaacctcgacagcaaaggacaaaaactgaaaaagcccgattacaaacccatcgagacgaaaaaaggagccaaatcggaatatgctaaatgggtagaaagtataccggtcaacatgcccgaagtaaaatactgcgacttcaactctatccaacaaaagcaaatcaacactcgcagcaaactgttctacaatctcaaccccgagaacgacgtattcacgatgactttgaaatacggcatcggaacgaaaaagatgcctaaactcgaatatgccgtcgccctgatgaacaacgcaggtatgctgcccgatatcgaaccgttggcattcaaacgggctatgggcgaattaaatgcaaattgcacatacgctgtggacgacaactacatgtatgtcatgatgagcggatacgaaaaagatttggtaaaagcctgccagcttctttccaaacaaatccttttccccaaactcgacgacaagcagttgcaaagcctcatcggtagcgcgttcggttctcgccagatggaaaaaagcagcatcgggacattggaaagtgccctcacgtcgtatgtactatacaaggatagttcagactacctgcaacgcatccccactcgtgatttaatagacctttcgattacagatctgacgactcaattccaagccgccacgaattacgaatgtgaaatctattacgtaggtacggcgccgttcgacgatgtatatcaagtattgagccaaaacttgccgttgaaagcgcaagaaatgccctctacctctcccgaattacgtcctcgacaacaatataccgaaaatacgattttcttcctgcccaacagcaaagcgactcaaagtaaaatatacttctttatagaaggaaaaccattcgatgtaaaagacgatatattcatcgaagccttttcaagctactttggagccggattcgggagcctcgtcgtagatgaaattcgcgaaaaacgagctatggcatatacctcctacggtatagtggggactccctccgttgccggtcgaaacacgctatttcaaggatttgtcggcactcagggagacaaaacgctcgacgctatcgaaatttacatgaatttgttgaaagatatgccgtccacacccgaacgtttcgacgtagtaaaaaccaatatcaaagaatctatcctcagtgcgaaaccgggattccgttctgcaagtgccgtatatgaggcatggaaacgaatgggctatacacaagatccggccatcgacaaaatgaaaaagatcgaaacgctcaaattcgaggacatcatcgatttctacaacgaaaacatcaagggaaaaccggttgttatcgccatcgtaggaaatccgaaagatttcgatactaaggcgctcgaaaaatacggcaaagtaatcaaagtttccgaatcgaaactattctccgatagcttctga

SEQ ID NO: 688 - DNA, 2091 bp, Barnesiella intestinihominis
atgatgatggcaggaactttattagtaacggcctgtcagccgaccggaaaaaccggagacgtaatcggcaaacaacccgtaaaagtcgagaatggaatcatgaccacagaagtgctcatggcattcggcagagtaagcggtcccgtagtttctcctgacaagagtaaaattttgtatggtgtctcttacgaaaatctggaacagaacaaaagtaaccgtgagctcttcgtcatggacatcgacggacaaaacaaaaagcaaatcacctgtactcccgaatcggaaggtaatgccgtatggatcgacggaggcaaacaaatagcatacctgtcgggaaagagcggagattcacaattatggattatgaatgccgacggtagcaatgcccgacaaataagctaccatgagaaaggtgtccacggttttttattctcgcccgacgaaaaacatatacttttcatcggcaacgtgaaatacagcgagaaagcctcggacctctatcccgacctcgataaggcgacaggacgtgtgatcgacgatttaatgtacaagcattgggacgagtgggtggaagagataccccacccttatatcgcttcattcgacggtaaacagttaaccgatattaccgacattatggaaggagagccatacgaatctcccatgaagccattcggtggtatcgaatctttcgcatggactcccgacagtaaagccgtcgcttataccagccgaaagaaaaccggtatggaatattctttatcgacaaattcagatatttatctgtatgacctctccacccaagaaaccaaaaaccttaccgagggcatgatgggatacgatactacaccggcgttctcgcccgatgggaaatatctggcatggggcagcatggaacgcgagggttacgaatcggacaaaaatcgactcttcatcatgaacatggaaacaggagaaaaacaagacctgacctccgacttcgattacagcaccgatgaattggcttggagtcccgacggaaaatctctatatatccgttcggcctatcagggagaaatacacattttcaaagtagggctcgataaaaaaatcgaacaaatcacgaccggatattacgattatgcctcattggctcccgtaaacgacaactgtttgatcgccatgcgccactctctgtctcagcccgatgaaatttatagtattgacccgcaaagcaaagaagtaaaggaaatctctttcgagaataaagatattctggatcaaatcactatgggtaaagtcgaagaacgctggataaagacgacagataacaaaaagatgcttacgtggatcgtttatcctccccatttcgatccttctaaaaaataccccgctatcctctattgtcaaggcggacctcaacaaccggtgagccaattctggtcttaccgttggaatctgcaattaatggctgccaacggatacatcgttatcgcacccaaccgtcggggtctctatggattcggtcaagaatggctcgaacaaatcagtggagactacggtggccaaaacatgaaagactatttcagtgcgaccgatgagatgaaaaaagaaccgttcatcgacggcgaccacatgggcgcagtaggcgccagctacggaggattctctgtctattggctggccggacatcaccaaaaacgattcaaagcatttatcgcccacgcaggtatctataacctcgaacaacaatatgtagaaaccgaagaaatgtggtttgccaactgggatatgggcggagctccgtgggataaaaagaatgccacggcacaacgtacgttcgctacatcgccgcataaattcgtagaccaatgggatacccccatactcatcactcacggagaatatgacttccgcattcttgcctcgcaaggtatgtcggcgttcaacgcagccaaactccgaggagttccggcagaaatgctcatcttccccgatgaaaaccactggattttgaagcctcagaacggtgtactgtggcaaagaattttcttccgttggctcgaccgttggttgaagccgcaagctacaactaccgaccaacaaaaatga

SEQ ID NO: 689 - DNA, 1446 bp, Barnesiella intestinihominis
atgatcacattttgtattgctttgttgctgttggttgccggatacttcgtttacggtgctttggttgaaaaagtttttggcgttaatccggggaggcagacacctgcctatgcctcgacagacggtatcgattatattcctatgccgacatggaaagtttttctcatacaatttttgaatatagctgggttggggcctattttcggagccattatgggtatcctttacgggccttcggcctatttgtggattgtgttcgggactatattcggtggagctgtgcatgattatctgtcgggtatgctttcggttcgtcggaatggggctagcctgcccgagttagtcggcgatgaactgggggcgggagttaagcaagtcatgcggattttctctctgcttttaatgatattggtaggggctgtgtttgtcgtaaatccggctaatctactcgatttacttacgggggaaaatacgaccacgaccatgtggattgctattatattcgggtattatatattggctacgttgcttcctatcgataaactgatagggcggctttatcctttatttggatttgctttgctgtttatggcgatcgggattatgatatctttgtttttgcgtccagacagtttaccggaatttcacgaagcgataggttatacacgaccggactctgatgtaaatcccatatttcctatgatgtttatttcgatagcttgtggagctatttctggttttcatgctacacaatctccgatgatggctcgttgtctgaaaaatgaaaaaatgggacgtcgggtattctatggggcaatggttgtcgagggtatcgtcgctttaatttgggcggctgcggcgattgcctttttcaatgggtcattcgatgcactttctgagttcttgaaagggaaaactccggctattttagtcaatgatatatcggtgggctggttaggaactttcggtggaattttggctatgctcggtgtcattgcggcgccgataacctcgggcgatactgcgctccggtcggcacgtttgattgctgccgattttttgcatattcctcaaaagaaaatccgaaatagactattggtttctattccgatttttattcttgcatggctcgtgatgatgatcgatttcgaagtgctttggcgctattttgcatggtgtaatcaaactttggctgtgtttacattgtgggcattgactgtttggttggctaaggaacataaatgttattggctcactttgattccggcgctgtttatgacgatggtgacggttacttacatattttttgctcaggaagggtttcgattgtcctattcggtttcgctgggcatagccgtcttcgttacgttgttattgtcatttttgtttatccggtttctccgtactctatcgaagagggggggctataaagaaataatcgattag

SEQ ID NO: 690 - DNA, 1356 bp, Barnesiella intestinihominis
cttgaactaaaaatgggagaacgggcaaaattcgcgaccaagttaggagtaatagccaccacggtaggatcggcggtaggattaggaaatatttggagattcccttatgaagccggaatgaacggagggggagcattcttaatgatttacattctatgtgttcttatattaggtgtgccggttatgtgtgccgaattcattattggaagaaaatccaaatccgacacggtagacgcattcaaaaaattaatccccggcagtcgatggtactacatcggatatatcggaatattggcctcgattcttattttaggatattatatggtcatatcgggttggacgctcgaatatctttttcaagcagcctgtaacaatctgaccggaaaaacggcagcagaattcaaagctgaacaaaacgcatttatccagaacgattttcggccgttactatggatatacatttttctctttatcaactatatcatcatatctaagggtgtacagaaaggaatcgaaaaaatgtccaacatattgatgcctatactgttcattattctcatcgttttttgtatacggtcgttaacactacccgaagccaacgaaggactgaaatttttcctacaccccgatttttcgaaaatcacaccccaagtcatcgtacgggcaatggggcaagcattcttctctttaagtttaggtatgggtatcctcatcacctattcctcctacttcaataataaaactcatctgataaaaacagccagcacggtagcgatactcgacacaaccgttgctattttggccggagtaattatattcccggctgttttctcttatggtgtggatcctgtcgccggtcccgaccttgtatttgtcaccctccccaatgtattcaatcaaatgccggtatctgcgttatggtctgcattgtttttcttactcctcactgtggcagctcttacttccaccgtttctcttttcgaagttgcagttgcattttttatcaaccacatgcatctgtcaaggaaaaaggcaacccggacaatgatggtcattgttgccatattaagcactatctgctctctttctatcggttcatggagccatatacgcatttttgagaaaaccatattcgatgcctgtgattacttctcagctatcatcttgttgccagtaggcggactgttgataagtattttcatcgggtggatactgaaacgaaatatctcccgggaggaattgactaaccgaaataaattgcacgagccactattcaacgcaatctttttctgtatcaaatacatagctccaatcatcatcattttaatctttttatcaggatttggtattatctga

SEQ ID NO: 691 - DNA, 1695 bp, Barnesiella intestinihominis
acgctcatttccaataaattacactcttttcgtaacttcacgccagcaaatttaattagatatgtcatgaagagactttttcttttttccttgttaattggatattggtcggtagtaagagcttcggatacggtttttataaaagaggcacaagtccccattttgatagaacggcaggataatctattattttatcttcgattcgatgcacgagacagccgaatgcttgatggagtaacagtagatttgtcgaggtgtaaaaatctcgacgatattcaatctgtgaagctctattatggtggaacagaagcccgtcaagaggaagataagaatcgatttgctccggttagttatatttcgagtttcagtcccggtaagacattgtcggcatatccttcttattcgataaaatgtgccgaggaatcgaatgtgtctgagtcggtggttttgaaatgtaattacaaattatttccgggagttaatttcttttgggtgagtttgcaggtgaaacccggtacatctcttttatctaaggtgacggcagatttgagttctgtgacaatagacgggaaagaggctatttgtaaaaaaatgtcgcccgacggtattgtacaccgcatgggagtaggcgttcgtcatgctggtaacgacggtgtttcggcgtttcgtattcccggattggtcactacgaataaaggtacattgttgggtgtgtatgatgtgcgttataatagaagcgtggatctgcaagaacatgtagatgttggattgagccgtagtactgatggcgggagaacatgggagaaaatgagattgccgctttctttcggagagaccggaggcttgccggctgcccaaaatggggtaggagacccttctatcttggtcgatacaaagacaaatacagtgtggattgtcgcggcgtggacacacggtatggggaatcaacgggcatggtggagttcacagccgggaatggaaaagagctatacggctcaactcgtgatgacgaagagtaccgatgacggcaaaacttggtcgaagccgattaatataaccgggcaggtgaaagatccttcttggtatttcctacttcaagggccggggcgaggtattaccatgcaggacggcacattggtatttcccattcagttcatagattcgactcgtattccgaatgctggtattatgtatagtaaggaccggggtaaaacttggaatatacataatctggcacggacaaatacgacagaggctcaggtcgtggagatagagccgggggtgttgatgttgaatatgcgggataaccggggaggaagccgagccgtagccataaccgaggatttgggaaaaacatggaccgagcatgagtcgtcccgaaaagctttgcaagaacctgtgtgtatggcgagtctgattcatgttcgtgccgaagataatgtattgggtagggatatccttcttttctcgaatcccaacacgaagaaggggcgcaaccatattacgattaaagccagtttagataaaggcctgacgtggttgccagaaaatcaagtgatgttggacgaagatgaggggtgggggtatacttgtctgaccatgatcgatcgtgagacagtgggtattttatatgagagtagcgtggctcacatgactttccaagctattaagttgaaagacttaattcgggagtaa

SEQ ID NO: 692 - DNA, 2367 bp, Barnesiella intestinihominis
gagatgaaagtgggtaagttgaaaaaatctatcggggatacatcgcgtattgtgcggtatatgtggtatgcctttgggggaatcgttgttcttgtcgttgcggcctttgcgatgattgcatgggggtggataggatatatgccgccgatagaggatatggaaaatccgaaagataaattcgcctcggagatttattcttccgatatggaagtaataggccggttttatcaaagcaagagtaaccgggtgtatgtacattatgatgaaatttctccttatttggtcaatgctcttatcgctacggaggacattcgcttcaaggaccattccggcatagatgtgaaggctttgttccgggcttttatcaaacgagggctattatttcaaaagagtgcggggggaggaagtacgattacccaacagttggctaaactcctttattctcctaatgccgataatgtggtggaacggttgttccagaagccgcaggaatgggttatagctgtacagctcgaacgtttttataccaaagaggaaatcgtgaatatgtatctgaatcatttcgatttcctgaataatgcggtcgggatacaatcggcggcatacatttattttcatacgactcccgataagttgaaaatagaggaggctgcgacgttggtgggtatgtgcaagaatccctcgtattataatccccgcaggtttaacgaacgcacgagggggcgtcgtaacacggttttgaaccaaatgtataaggccaagtatattacaaaggcggaacttgactctttacaagctttgcctttggagctgaaatatacccgggtggatcataaagaggggttggctccttatttcagagagcaattgagattgatgatgacggcaaaaaagcctgtgaaatcggaatatcgggggtgggaagctcaaaaatttatagacgattccattgcttgggcgaataatccgttgtatggttggtgcgagaaaaatgtgaaggctgacggaaccaagtataatatttataccgatgggttgaaaatctatacgacgcttgatgcgcagatgcaacggtatgccgaggaggctgtggaaaaacatttgggcgggtatttacaacctcgcttcttcgccgagaaaaaaggacggagttatgcaccgttctcccgaagcataactcgggaagagcgggagtcaatcttggatagggcgatgaagcagtcggatcgttatcgggcgatgaaagcgtcgggtgcgagcgacgagcagattcgaaaggcatttattactcctgtcgagatgcaggtcttttcgtatcaaggttcgatcgacacgattatgtctccattggattctatccgttatcagaagtctttcttgcgagtgggatttatgtctatggatccgaatacaggtcatgtgaaggcttatgtgggcggtcctgattttacgcattttcaatatgatatggcttcggtgggacggcgccagataggatcgaccgtgaaaccgttcttatatacattggcgatggaggagggattcactccttgcgatatgtttttaaatgaacagcctacattgattacagaagacgggaagccctggtctcctcggaattcgtcgaaagcgcgtgtgggcgagatggtttctttgcgttgggggttggcaaattcgaataactggatttctgctcgattgatggataagttgtcgccctcgtcattggcgaggttgatgcattcgttcgggattaaaaataagatagatgaagtcatctctctttgtttaggtccggtcgaggtctcggtcgaggaaatggtgacggcttatacagccttttcgaacaaaggcgtgcgtgtagaccctttgtatgtgactcgtatagaggataatttagggaatgtaatagccgagttcacgccttcgatgaccgaggttttcagtgaacaggcttattatcgcattttgccgatgttgaaagatgtgatagatcacggaacgggcggtcgtgttcgtttccgttatggtattactgctcctatgggaggtaaaacagggacgaccaataataattcggacggttggtttatgggatttactcccgatttagtttccggtgtatgggtaggaggcgaggatcgctcgattcacttcgatggtatggccgatgggcagggagccagtatggcattgcctatttatggtctttatatgcagaaagtttatggggatcaaagtctgggttactcacaagatagcgacttcgagattcctgaggagtattccgatccttgtggcggaagttcatatatcgaagaatccgttacagctcccgtggagagcatagagggtatattcgattga

SEQ ID NO: 693 - DNA, 2811 bp, Barnesiella intestinihominis
atggacgaaaaggacaaaaaaatagcacgactcgaagagctgctacaatctatcaaagataatatcgacgaaaccgaatctgtattggattcattatccaatagtgaattgcaagccgaaaacgacaatgatttaccggacgacgaatttgatcgtttactcgacgagtttattcaaagtcaattatcagaagaggagacggaagatgaagaagaaagcgataattccccgtctaataccagccatcatatcatctttaaaaatacttttttctccatatgcgacacaaaagaacaaatacccagagattcactacgcacacaattcagtgttgatgaaggagaatatctattcatttcgacagaatgcataggacaaaacgaatctgctacaatagatgcttgggacgaaacttttttaacagaactaattgcccccgatggaagctcctacatagaaactcaaatttccatgccgatcgacaccgaaaactacgccagtccatcggcatatttcgctcttcctgaaagagaaaacagagaaggctcatggatttactgcctatcccgactctccgacaaagaagaatatacaaccaaaagtgcgacttttatatctttgccccaaaaatacgacgaatgtttcgaggtaaacaattatctattgttcaaaaacgaaagcatcgctcccgacccagaccgtcctatcatctcctacacaagtataaacccgagtatacatagcaactattatatcggattctgcgggataagcaaactaaaagacacggacaaatcgtatgaatatgaaataaaaatccgtacacaaaccggattaaccaaatacgaaacggtcggaactttcatttcacaagacgacgaaggaagaaaccggctatggacattccaagaacccgtcgacttctcggattatgaaaacggagaatatgccgtcgagatctatttcttaggagaaaaagtattgaatgccccgtttcgcattgggaacgaagaagaaggagaatataatctattcaacatacagacacgtcccccgatcggagaaaaaaaagagatagacccgacaaaagaaaaagatgccatggactctttacaagagatgatcgggctaaacaatctgaaacggagcattgccgaacatctcaactatgtaaaactattggccgcacgcaaaagagccgggttaaaagcctcgataccacctcttcacatggtctttaccggaaacccaggaacagggaaaacaaccgttgccgattttatcggtgagattttccacaaaatggggttactcgaaaaaggtcacgtcatacgtaccgaccgtagcaaattggttggcaaatggttgggagagaccgaacaaaaaaccgaagctgccatcgaagccgccaaaggaggggtccttttcatagacgaggcttacagtctgtttaccaatgacaaagatggagacaaacgcgacttcggaaacagagtcatagaaacattattaccgaaactgtcggacgacaacttcgggacaatcgttattctcgccggatatccagcagaaatgaaactgcttttggaatcgaaccccggcttgcaatcccgatttccttttacatttcacttcgaagattattcacccgaagaattattggagatagccgacctcaccatacaacgcgaagggtacgaaataaccgactctgctcgtcaaaccctattagaactgataaaaaaagaccatcgaaacagagaccgccatttcgggaacgcccgctatgtcaacagacttatctcttcgaaaatacttccggccatggccactcgtttggctcaaagcggaatatacgattcggggaatcccgacaaacggtcgctcgtcaccatcgaacaagaagatatacccgataacaccgatgaaaaaataatcatatcttcggaggaattcgatgaacgaaccatagatgaatgcttagcccgactcgacagaatgatcggattatccaatgtaaaagccgcaatccataactttgtaaaaatcgctcggttattacacgagaacggaaaaaatttctttggggaaatccctttgaaatggagcttcgcaggaaatacaggaaccgggaaaagcacagtcgctgaaattatgtccgacttactgaaagccatgaacatactcggtaacggacaatttatagaaataaaaggagaacagctctacaatgtccccgactataaagtggacgaagttctacaagatgccatgaaaaagtcacgacagggacttttattcatcgatggcgactctccgaaattcaaaaatgcatacaacacattcgatagcgaacaactacgaatcaagttggcaggatacacctctgccctgcccggagctcatgctctcatcattgccgaaaaccgggctccccggcaagatttggtagaacagttaattggcaacggcgctcacgaagtcgaccacactttaattttcgacgactatacctcggaagagttattcgaaatcctgaaacaaatgctatcggacaaagatttctcttttgaacaaaaagcagaaagtatcatgcagcattacatagaatacctttgttccgaccaatattcttgttatgcaaacgcccgaaccatgaaaatcatatcgcgaaccattatgcaaaacgcctatctccgactcggtgaggcgggcataaaattttcacgaaacagaatcacacatgccgatgtagcttgctttgaaatagatgagagacagactcttagaaatagaatcggcttttactga

SEQ ID NO: 694 - DNA, 2766 bp, Barnesiella intestinihominis
atgtactctgtgaatgtatcgcaagtagctacggtttctttcgagggggtaatttcggatataggttcgaaagacccgttatcgtttgcaacggtacaattactgcatggagatgaggttcattcggtattgtccaaagataatggagtattttcttttccctctgtgcatccgggcgactatatactgcgtattacttatgtgggatacgatcgttatgaaaaacgggttacactgaaacgggatacgaagctgaccgtaaaaatggtcccttcgggaaattcgttgaacgaaattgttgtgacggcgcgggagtcgcaggggctggtgagctcgtcgaagataaatcgcgaaatgatgacccatttgcagcctaccagttttagcgatttattggagctgcttccggggaatatatccaagaccccttcgatgggacaggtcaattccatacagttgagagaaacgggaacgctgaattcatcgggagaacaatattccaatcccgattatgccattacatcgttgggaactctttttttagtagatggagctcctcttaacggcgatgcgaatctgcaatatattcccgggggaacttcttcggacgggacctcgccggaatcgctcagaaatatgacgaacaaaggggtagatatgcgcacgctgacaacagacgatatagaaagtgtcgagattgtgcggggtataccttcggccgaatacggaaatcttaccagtggtatggtaaatataaagagagtgagaaaggcgacaccccttacagctcgttttaaagccgatgaatatagcaaattgttttcggtggggaaaggttttacagttcccaaccatgatttcacattgaatgtcgacggcggttttttggactcgaaagtagatccccggaataatcttgaaaattataagcgagtgaatttttctgttcgcatttcgaagttatggaagagggataagtgggagatgacatggacaccgagtgcggattatacgggatctttcgataacgtgaagacagatcccgatttgagctatcaaaaaatagacaaatataaatcgtcgtataacagagcttctttgacaaataatttcaaatggacgtttcctcggttaaaatggataaaaacggtaaatctcgatgcgtcggtgagcgctcagtccgatcagttgaaaaggacgaagcttattagtcctcagcgagcgacggttgcacctaccggtaaggagcccggggttcatgacggtacttatcttttttcggagtatgtggcagattatttatgcgatgggaaaccggtgaatgcttttctgaaagccaaaggggagttcggctgggaaggcgcaaaatatcggttgaacgccaaagccggtggagaatggaattattccaaaaatttcgggaaggggcaagtttatgatttatcccaccctatttcgacgagctggggggctcgccctcgggcttatagcgatattccggccttgcagaatctgtcgttcttcttggaaggaaatacattgttcttgctggggaagaataaattggaactgcaagtaggagctcgttctgtgacacagataggaatgagcgagcgatatttgttacaaggaaagccttatatagatcctcgtgcgaatgcacaatggagcttccctgcgattcccgtcgctgggaaagacttgcacatttcgatttcgggaggttatggtgtgacgaccaagatgcctacgctcgactatctttatcccgatttgtggtataacgacatagtacaactcaattattacgatgtgaataaaccgctcgaatatagtcgggtaaatataattacttatatcgaagatataaccaattatgatttgaaaccggctcgtaatcataagtgggaagtacgaggcgatatttcatttgagggaaaccggttgtcggtaacttattttcatgaaaatcttacatcgggatttcggacttcctctttttatgctccgttcagttatcggaagtatgaccattcggcagtcgatgcctctgggttacaagggcctcctgctttggaagacattccttataccgatatgaaggcgttgaacggttatagacagtcggccaatgggagccgcatcgataaacagggtatcgagtttcaatttacttcacaacgtatatcggcactgaggactgccgtcgttataaacggagcttggttccgttcggtatatacgaatagtcgtcctatgttcgagactgtggccgatgtagtggacaatcgtccggtttcggaagaatacgtgggtttgtacgattggaacgacggtcgagtaaacgaacagtttaatactaattttcagttagatactcaaatacccgaatgggggttgattttttccacatcggtacagtgcatgtggtttgtttcgactcgggtaatgtggaaaaatggagtcccggtgagctatatggcagcaagcgacggaaagttatatccctataccgaggagtcagctgccgatcctaaattgcagtttcttataaagacatataacgacgatttgtataaaaaacagacaatacccacggccgtttatgtaaacctgaaagcgaccaaaacgataggcaaatggttgagattgtcattgttcgctaatcgtattctagattatcttccttcatataagatgaatggtctgctcatacggcgcaatgtggatccttatttcggtatggaacttaattttacgttatga

SEQ ID NO: 695 - DNA, 1332 bp, Barnesiella intestinihominis
gcattattaatggaaacattcttaataaaaacagtacaactactattaagcctctccatattagtcattttccacgaattcggacattttatattcgcccgaatgttcaaggttcgggttgaaaaattctatctgtttttcgatccgtggttctctcttttcaaattcaaacctaaaaatagctataccgaatatggaatcggctggctaccgttcggaggatatgtgaagatttcgggaatgatcgacgaatcaatggacagagaacaaatgagccagccgcccaaaccgtgggaatttcggtcgaaaccggcatggcaaaggctcctaattatggtagcgggcgttgtatttaatttcattttagccgtcttcatctattcgatgatcgtctacacatggggaacatcttatataccgttcaaaaacgcttacgctggcatggaatactgtgagtcggcaagaaacataggattccaaaacggagatattcctctctcggccgacggtgtcgatttgaattacatgtcgagcgagacccttcaaaaaatagtagacgccaaagaggtgaaagttttgcgagataacgacacagtaaccatcgaaatccccaaaaactttatgctacgattgatcgataaagaagaactgttcgcattataccgtattccttctgtcgtgttcgaagcctcccccaacaccggagcagcacgagccggtctgcaaaagggagaccatatagaatcgatcgatggagaaaaggcatcatcgctaaatgaaatgcacaaaatactggaatccaaagctaacaccagcgtgtcggttgtctactcccgaggctcagaagtgaaaacgacagaaatcatgacagattctttgggacgattaggcatagccattgctcctttgagcgatagttatgcaatagtcacagaacattatggattctgggaatcttttcccaaaggaatagaattgggagtagacaaattgaagagctacgtgagtagtatgaaatatgtattcaccaaagaaggagctcaaagtttaggaggatttggagctatcggaagtatatttccggcaacatgggactgggaggctttttggagcatgacggcatttctctcggtcatattagccttcatgaatattttacctattcctgctcttgacggaggacatgtcttattcctactatacgaagtgattacaagaaggaaaccgaacgataaatttatggaatacgcacaaatgggaggcatgctcttcctatttgcattattgatttatgctaatggaaacgatatattccgatttttctttaagtaa

SEQ ID NO: 696 - DNA, 2550 bp, Barnesiella intestinihominis
tttatgacaaaaaagatatatgtggtattaaccctttgcctattatttatagggcttcctatttcggctacggcacaaaaggcgacagtgataaaggggatagtacgagattccataacccatgagcctatatcttatgcttccgttttttttgtggggagcgataagggacttatgacggacgatgacggtaagtttgccgtttcggtacgtgataattttctcaatgtccgattttctacgttgggttatcgagagaagacggtttttgtaaagaaaggagccgagaatgatttggttatcgatttggttccatcggattatgtcttgaaagaggtggtcgtgaaaccgaaaaaggagaaatacagtaagaaaaataatccggcagtggagtttgtaaaaaaattgatagagcgtcgccacgtaggagatccgaaaaatcacgatttttataattatgaaaagtatgaaaagatgacttttgccctgaatgaattttcggaggaacaaaagaaaaagtggcttttcaaaaaattccaatttatttttgactatgtcgatacttcggaggtttcgggcaaacctattctgactgtttcgataaaggggaagatcgccgagaattattatcgtcgcagcccggaaactgagaaatctgtggtgaccggtattaagcgggcaggaatcgacgaaatattcagccaagaaagcgtgcaaatgttgtgtgaggatttattccgggaaatcgatattttcaggaatgatattactctgttgaataatagattcgtgagccctttgtccaacataggtacttcgttttataagtattatttattagatacgattctggtagacggcgtgaaatgcgtggatttaggctttgttccgtttaattcggagtcgttcggctttacaggtcatatctatgtgcccgaaggagattcgacctattttatcaagaaggtgaagttgaacgtgcctcgggatatcaatcttaattatgtcgagaatatgtatctcgaacaggattatgaacgtttggaagacgggacgcgtattaaaacgaaagacgatgccattatagagttccggattatgcctgccacgcaaggattgtatgcaaggcgtatgaccacctatgataaatttacctttactcctcccgacgatttgtcggtttatgattttgaaggtcgggagaaagtagaagtggatgctcaggcaaaaccggaagagttctgggtagacaatcgtcatgtgccggtaaagaaaaaggagaatgccgtagataaacttttagctcgactacgagaggttccggtgttctattatacggagaaagttttgggaatactaatcagcggttatatagaaacagggaaagacagtaagttcgattttgggccgatgaatacgactattagtgcaaatgaaatagagggggctcgtttcagaataggtggactaaccaccgcccaactaaatccacattggtttgctcgcggttatgtggcttatggaaccaaagatgaaaaggttaaatattcgggcgaagtagaatattcgttcaataagaagaaatttcattcccgggagttccccatcaattctatcaagctgagccattcgtacgacatagaccaattgggacagcattatctgtacacgaataaagacaatgttttcctttctttgaaacgtaagggcgataataaagctacttatttaaggaagaccgagttgtcttatttgcaagaacgaaaaggcggtttttcattcggtttgggtattcgtaacgaaatacagcagatggcgaccgaccgtatcgcttttgtcgatggatacggtaaaacgataaaggattatatgcaaaccaattttgaggtgaaattgcgcttcgctcccaatgaaaaattttaccaaacgaaaagccaacgtttcccaatcaatttggatgctcccgtgttgacactctctcataattttgctttcaaaaatttcttgggcagcaaatattcatataatcataccgaattcggggttcagaaacgtttttggttttcggcattcggttatttcgatgctattgtgaaggccggaaaggtatgggacaaagttccttttcctatgttgatacttcctaatgcgaatctttcttatacgattcaaccggaatcatatgctttgatgaatgctctcgaatttatcaacgaccagtatgtgtcgtgggattttacttattatgcaaacggagctttgttcaatcgtatccctctgttgaaatatatgaaattgagagaggtgtttgcgttcagaggtttgtacggtagtttgagcaagaagaataatccactgtataataaagatttattcgtattcccgaagggtagtaccgaaatggataaaatgccctatatggaatgtagtgtaggtcttgataatatatttaccattttgcgggtagattatgtatggcgattgacctatcgggaaagtccgaacgtgagcaaaggcggggtacgtatcgccttgcatttttcgttttga

SEQ ID NO: 697 - DNA, 912 bp, Barnesiella intestinihominis
tgggtgacaattaaatgtatgtatataagacggataataggatttttccttttttgtagtatcgctttttcggcttttgccgagatgccgtatcgtactgtgttgagaaaagccgatgatcattttgccaatagggagtggcaagaggctgttgctatgtatgacgtattgttggaacgccgtcccggtagggtgaaaacgtatgtggatgcggttgtcgcatcggccatgatgaacgattcttcgtctattatgcaatatgtggttcgttcggaaatgcaaggactatctttggactcgttgtttaccggcatagacgtgttgtctcgatctatcggacagtcgggcatttatgaacaggtacttttgttggtgaaagaacaacagccgtggtttactcgggtgacgaataattatttattggggtattatgtgtttcggcatgatgctgaaaaaatacttgccgttgccgacgaattgttgtcggtgatgcccgggcaaattaattatttgaaagccaaagccgatgctttgttgttgcttggaaacgataccgcagcggtcgaggttcagaaaactattttggatatagactatcttaattttgatgcaaacttgtttttgggaagctattatgctataaagggacaggaaaaactgaaatcgatagatcaacagtatcttgaagattcgaacggtctttctatctctgcttccgtatataaagaggaaaaaaggcaagtgatcgacgacgatatagcttgtgctaaaaaatattttacgattgctgcacgggttcgtagcaataaatatctttcggaacaactttccatgctgtcgggactttccgatgagttgcctcaaagcagcggggttattcgtccgttcttgaaacgtttaaagcaagaatga

SEQ ID NO: 698 - DNA, 1581 bp, Barnesiella intestinihominis
caatttatgtccagcgaacttgtagtagacgtacaacccaaagagatttctattgcattgctcgagaataatcgattggtggagcttcagaaagaggctcggaacatatcgttttctgtgggcgatatctatttgggacgggtcaaaaagctgatgccgggacttaatgctgcatttgttgatgtaggttacgaaaaggatgctttcctgcactatctcgatttaggtacacaatataattcgagtgcaaagtttcttaaacagtcgcttgccgatcgcaaacgagtgttgtctctttctaaatttgatttattgcccgatattgaaaaagacggtacgattaacgatgctttgaaggtgggtcaagaagtgttggttcaaattgctaaggaacctatttcgtctaagggacctcgccttacggcagagatttcttttgccggtcgttttttagtgttaatccctttttcagataaagtatctgtatcgcaaaagattaaatcgaacgaggaaaaattgcgccttaggcagctcatacaaagtattaaaccccgcaatttcggtgtgattgtcagaactgttgccgaagggaaacgggtcgcagagttgaataacgaacttaaaacgttggtaaggtgttgggaagatatgttagtgaagttgcaaaaggctcagcttccgtcgctcgtttatgaggaaacgggtagaaccgtagggatactgcgtgatatatttagcccttctttcgaaaatatttatgtaaacgataaggagacatataaccaaatatacaactatgtgagtcttatttctcccgatcgaaaagatatagttaaactttacgatggggagttgcctatttttgataatttcgctattaccaagcaaataaaatcttcattaggaaaaaccgtttcttttaaaagtggagcgtatgtcattatcgaacatacagaggctctacatgttatcgatgtaaatagcggaaatcgttcgaaggcttcttccgatcaggagagcaatgcccttgatgtaaatatgaatgccgccgaagaaatagcacggcaactgcggttgcgcgatatgggcggtattatcgtgatcgatttcatcgatatggacgaagccgagaaccgtcagaaactatatgaccgcatgcgtgagctgatggctaatgatagggcaaggcacaatattttgccgttgagtaaattcggattgatgcagattacccgccagcgggtgcggccggcactcgatattattaccagtgaagattgcccgacttgtcatggtaaaggtactattcctccttccttactttttaccgatctgttggagtcgaagattcattatctggtgtataagttgaaaataaagaaattcacattacacgtacatccttttgtagctgcatatgtcaatcaaggtgtattttctttgaagatgaagtggcgttgtaaatacacttttcagctgaaagtaattcctaatcagtctctcgcttatctcgaatataaattttatgatgccgagagaaatgaaattgacctgaaagaagaaattgaaattaaaaaatga

SEQ ID NO: 699 - DNA, 1674 bp, Barnesiella intestinihominis
atggaaaaagaacaatttgacgtttattgtgtaaacacaggaaaaacgatacgtgtaaacggaggtgaaagcctcctcgaaatctataaactggcaaatcctcgactggctcaccgcccgatttgcgcttacgtaaataacaaaaccgaagaattgaaataccgggtattcgggcccaaagacatcgaatttctcgatatttctcacccggcaggcatgcgcacatatgtgcgttccctctgttttgtcatgtacaaagcaatcaacgacattatcccgggaacaagattacgtatagaacattccctatctcacggatactattgcctactcgataatgaaaacgccctcgaacccgaatccatcgataaaataaagcatcgcatggccgaaattatagccgccgacattccgttcaaaaaaatagaatgccacacggccgatgccatagaagtttttcgggaacaaggtatgttcgataaaatagaattgctgaaaaccacacacgagttatatactcaataccatactctcgacggtctcgccgactcgtattacagttggctgactccgtcgacaggatatttacagggattcgatttggtcaaatataacggaggggtgttgttagttcctcccacgcccgatgcaccgaccgaaccggctctgatagaaccgcaagaaaaaatgttgaatgcattcaaagaatacctcacgttcaaccaaattatcggattgagcaatataggagacctcaacaaagccgtggaaacaagacaggcaaccgacttaatcaaagttgccgaagcccttcatgaaaagaaaataggtaaaatcgccgacgatataacccgacgctatcacgaaaacggtactcgtatcgtacttatctcagggccctcctcctcggggaaaaccacattctccaaaagattatcgattcagctcatgaccaatctgttgaaaccggtagccatatctctcgacaactattttgtcaatagaacagacacccctctcgacgaaaccggcgactacgattacgaatcgctctacgctttggatttagatttgttcaataaagacctcaacagattattacaaggcgaaacaatcgagatgcctacttataatttcgaaaccggcgaaagagaatacagagggaatactctgaaattggaacaagggtctgttctcatcttggaaggcatacatggattaaacccggatttgacacctcaaatcgaaactcatttgaaatatcgcatttatgtttccgccttgacgaccatctccatcgacgaccacaactggatacctactgccgataaccgtctgttacgccgcattatccgcgatcataagtatcgcggggcatcggcacagagcaccatagcccgttggggaagcgtgagacgaggagaagaaaaatggatattcccctatcaggaaaacgccgatgccatgttcaactcttcactccttttcgaactggcggtaatgaaagattatgcacaacccatactcagcgccgtaccccatgattgtcccgaatatgccgaagctcatcgtttgctccgtttcttaggatattttcaatccatcaatcaacgcgaaatacctcctacttctcttctcagagagtttctcggcggcagcagcttcaaatattga

SEQ ID NO: 700 - DNA, 1863 bp, Barnesiella intestinihominis
atggctatgtcaagaaaattgaaaatccgagatcttactcttcgtgacgggcaacagtctttgtttgcgactcgtcttacccaagaacagataaaccgcgttttaccttattacaaggatgccggtttctttgcgatggaagtttggggtggtgctgtgcccgattcggtgatgcgttatttgaacgagagtccgtggactcgtcttaaaacaatcagtgaagctattgggggagcatcttatttaacggcactttctcgtggccgtaatttgttcgggtatgcgccttatcccgatacggttctcgacggattttatcgcgaggccgtggcaaacgggttgggtatcatgcgtatattcgatgcactcaacgatttgaacaatgtaaaatcttctgtggaaaagataaatgctgtcggggcgatttccgatggagccgtatgttacacggtagatccgcattataccataacgtttatggatcgagtaaaggcgttgttcggtaaaaaattgccgaaacctatctttaccgatgaatattttgtggaaaaagcactcggttttgaaaagttgggtgcaaagatggttactctcaaagatatggccggattggtgaatccttctcgaatcgcttctttgatgcctaaattgaaacagtctttgaaagtgccggtcgattttcatacccattgtacaccggggtatggcctcgcatcgtcgttgatggctgttatacacggtgtggatattttggatactaatatttggtattttggcggaggttcggcggctccggccatagaattgctctatattttctgtaataaattgggcgtagagatggaagtcaatatggcagccgtaagtaaaatacgtgccgagttgctcggtattcgtcgcgagctggctgcatacgacttgaagaaagactcgttccccattgcgtttgatccgttgatcgataagttgcccgatcatatcgacaagttgttcgatacggctatcgaagccgcgcgtcagaataacgaagccgctttgttggatgcttgtcatgctatcgaagattattttggattcccgaaaccgaatgagttggtgaaggctgcggaggttcccggcggtatgtattccaatatggtggctcagttgaagcagcttaaagccgagcatgtgctcgatgatgccatgcgattgattccgaaggttcgttctgatgcaggattggttcctttggttacgcctaccagccagattgtaggaagccaagccgtaagctgtgctttggataaattgaaagggaatccggaatatacgacggtttccaaccagttcaaggcattggtgaagggagaatatggcaagactccggtccctgtcgatcctaaattccgtgaaaagattaccggcagtccgattgagactccgtatgatacgaactcttacaaggctcccgaaaatcctgttttgccggagtatggcaatgtgaaattggccgaaaacgaacaggagtatttgctgctcgaacttttccccaacgttgctaccacttatttgaagggtgtgcgggcagctgagtatgaggctaagaaaccggctgtcgaggaagtgaaagaagccgcagaggaagcagctcccgtagaacctataacgggcccgactatcgatgctcctatgggagggaaggttgtcgagataaaagtgaaggttggagacaaagtgaaaaaagacgatgtcgtgctggtgtacgaggccatgaagatggagaacgatatactctccacccttgaaggaaccgtgaaacgtattctggtaaaagaaaacgatgtagtgggtactaacgaaccgttgatcgagttcgaataa

SEQ ID NO: 701 - DNA, 2628 bp, unclassified Prevotella
atgaaaaattcttttttggcaaaggtagccgaagaacttataaagcgtggaggagatttctctgctcttaatattgtattcccgcagcgtcgtgcaatagaggtctttagcagtatttggcaaaagaagttttctataaaagatggtggctcgcccaagctttttacaatgagtcgcctgtttcgtaatgcttcgggactgaagaaagccgatagaaccgacatgcttttccgtatatacggtgcatatcttgaggtgtgcaccaagcgtggtgtttcaaaccaaatgacgtttgaggaatttcttccatggagtgagatgatgttttctgatttcgacgatgtggatagaagtcttgcagatgctccttctgtttttcgtgaggtgaataattttcatgatatagacaacatgaaatttgccgatgaagaaagtgtgaaacagctcaaagagtattttacaactttctttcaagcatacgaagaagatatgcgtgggaaatatcatgggatatggaatatgcttgcggatatatatgagtgtgtgaaatcgagcaaagaaaaaactatatacgaaggagcagtctatagacagggttgcgaaaaactactaaaatccagcgacgaaagaaaatatgtgtttgtcggtttcaatctgcttagcggtgcagagagaagcgtaatgaagcatttgaaagacaaaggttgcgcagatttcttttgggattatacaccgggatttgttgacgaggataatgtggcggtatcaaatgttttgcggaacctgaaaagtttcggcggttggactcctcctgccgaagatatggaacataccaatataaatattgtagaaagttccacccaaagcggagaagttgcttatataagcaaatggcttgaagaagtaaatcctgccaaagaagattttacggcgataattccaatggatgacacaatactcggaataatgcgtcattttctgcctcacgaatcttttgctttcaatatgccgatgtcgttaccatatacttctacttttgcaaagttgatgcgttttgccgattcggagattaaaaagaatgcaggtcaggaaggatatgacggtcgtgctttgattgctgctttgaaagaagagataaaaaataaagtcttgaaagatgacagaggaaaataccaggatgaagaattgtcggcagatgcggcaaagtcggctgtagagaaagttgaaacgttgttgcaaaaaaacgatacaattaaagtttcgccacgtgttgcagctatgatattcaagtcgcagtatatttctgctgaaattgaagacgaagaatccgaaacgaaattcaattcatatggcaagcgtcgtgtggatgtaataaatcttcaagacacgcgcactatagactttgataatgttcttttacttgattgtaatgaagggtcgcttcctcagacaaaaaggcatcccacaatgcttcccaatagtgttcgctcggcttacggactacctttgttaaacaacggcagcgtggcggcgtataatttcttccgtttattaaagcgtactcccaatatatccgtagcttattcctcttcgtccatggctataggcagcaaagaagtttcgcgatatatattgcaagtttttgctggacagataatgcgtggatttgaggtaaagaatcttgtgggcaaagccgtattgcacgaacatacaccgcagcccgtgataaagactccccaaatgcttcaaaaaataaagaggcttgaggcaacaccattatatatgtatgtggaatgtccgctaaagttctattataataaagtggcgtgcctgcgtacgcctatgccagacccggaaaaaatgccgtccaatcttttcggtacgatattccatgattcaattcagaaatattatgaagacaaaccggataaacatatagagcgttctaccatagagcaggatcttgcagataagaaatacacatatctttctgcctgtataaagaaagcttttaatgaatcaaatgttcgggacaatagtattataagcggcataatcttgaaatatttgaaagacgtgctgcgttatgatgccgcaaaagctccatttgatatagttccgcagtacatagaaaaatttctttatgtaccgtttgtttcaaaaagcggatatatggtcaaggttggcggcaaattcgatcgtgttcatattaaagacaatatttatgtggttgtggactataagacaggaaaatggagcggacctgtcaaggctgcgaatttgaaagacgtgtttaccaagccggaaactcttaaacattacaattatgttttgcagactatggtctattcactcgctcttgacgaaacactcaataaagaatcgatgcaaaaacattccgtaagacccgaactatattttgttgctgccatgacgcacgaagatttcacgccgcaagtaactgttgacaaacatcccatagatgagttttcaagtataagggatgaagtgagaaacgaggtgcaaaacatggtggatgatatatttgatatttcaaagccctttacaccttgcgaaaacggaaaaccttgtgccatgtgcgattacaaatgtctttgtttccgataa

SEQ ID NO: 702 - DNA, 2340 bp, unclassified Prevotella
atgaaaagcaagtttcccgaaaaaaaagtaatgacccgatatttttgcgtggcggcagtctttgtaattgccggcatagccatattgggcatgactgcaaagattatgttcgtggaacatgcctattgggaaaaagtggggctgcgttttgtaaaacgtaacgtgaaaataaaacctgtacgcggcacaatatattcttctgacggggaagttcttgcttcttcactcccagaattcaagattttcatggattacgtggtagtggaaaaggattctgtgcgccgcataaaggaacaacattgtcgcgattcggtatttcagtcaaaagttgacgaaataagcgagggacttcacaagatatttccggaaaaatcagcaagtgaattccgcaaaaatctcatggaaggttgggagaaaaagagtcgcaactggccaatataccacaagagaatttcttatacccaatatcaggcggtgcgcaagcttcctgttttcagtttgcccgcttatcgcggaggttttcattgcgaaaagatagaacaacgcacaaatcctttcggttctctggctcgccgcacaataggtgcgctatatgcgggaaaagattcggcacgctacggattggaacttgcctacgactccgtattgagaggcaaacccggcgtaagccacaggcagaaggttttgaacaaatacataaatatcattgaccgtccgcaggaagacggttgcgatatagtttccaccattgacgtaggcatgcaggaccttgccgagaaagcactcgttgaccaactgaagagtattgataatgcgcaggtaggcatggcggttctaatggaagtaaaaaccggcgatgtaaaagctatagttaacatggaacgctgcaaagacgggaactatcgcgagactaagaactatgccgtaagcaatcttttggagccgggatctgttttcaaaactgcgtcttttatggtggcttttgatgacggctatcttcatccgaacgacatggtaaataccggttgcggcaaagtaaatatgcacggacgcgaaatgaaagatgcttcgtggaataccaaaggcggatacggagttataagtgcggcggaatgtataaagcattcctcaaatgtaggagtgagtgaacttatagacaaatactatttcaatcaacccgaaaagtttgtaaacggtctttatcgcgtaggtattgccgacccttaccctatagatattcccggatgggcaaaacccaacatccgccaccctaaaaaggaccgtagcaattggtctaaaacagctttggcatggatgagcattggctacgaaacgcaaattccgccaatacgcacgcttgccttttataacggcattgcaaacggaggaaagatgttgcgtccgcgctttgtaaaagcaaagaaacgcaacggcgaactgattaaagagtatcccgtagaggttgttcgcgaacgcatgtgctcgtcaacggcattaaaagacatacaatattgtctcagtcttgtaacccaaccaaaaggttcaggacacagggcttcgtccaaatactttcctgtatcaggaaaaacagggacggcgcaaatttggacaaagcacggaagaacctcaagctatctggtaagttttgtggggtatttcccggcaaatgcaccaaagtatagttgcattgtatgcatacaaaaatcttatcccgcctcgggtggcggacactgcggaccggtgttcaaaagaattgcagaaggagtaatggcgcgcgaaagaaattgggatttgtcttctgcccgcgatgctcaacgttcttcacaaccttttgtacacaacggggatatgactgcggcaaaaaacgtattgagcgaactgcacataccatactcttcagataatcttggaaacaagacatggggaaccgttgctgcagacacgaatgagattattctttcgggcaagaaggttaacaaaaacgttgttcccaatgttgagaatatgggactccgcgatgctttgtttttacttgaaagtttaggaatgaaagtttctgtagaaggtaaaggaaaagtagtaaaacaaagtttggcgccgggctcacatttcagaaaaggaacatgtatcagcatttccttggaagggaacaacaaaatccggcaaaaggaaacagaaacattggaaccgcaaaacgagactacggaatcggaacaaaagaacgacagcagtagctccaagaaagtttcccctgcttcacctaccggcggagagaataataaaaaggaaaacaagccgaccgtagccgaaactaaaaaagaaaagagcaaaaagaattag

SEQ ID NO: 703 - DNA, 1305 bp, unclassified Prevotella
ttgattaaaactaaaaacattgcaacaactttcggaatgagagtactgatagtaaatacgtcagagcataccggcggtgcggcaatagctgctgcgcggttgcgcgaggctttgggcaacaacggcatcaaggctaccatgctggtgagccgtaaagaatcggaagcaattaccgtggcggagccacgcgatacgggcaggatgaaatacaatttccttcgcgaaagatttacaatatggaaagcgaacggctttcgcaagcacagactttttgaagttgatgctgcgaatttcggaatagacataaccgggatgaaagacttcgaggaagccgacataattcatttgcactggataaatcagggtttcctttcgcttaaaggcattgcaaaaattctcaggagcggaaagcccgtggtgtggacgcttcatgacatgtgggctttcaccggcatttgtcattacaacggagattgcgaccgctataaagattgttgcggcaaatgtcccgtgctttacggcggaggctcttcgcgagatctttcgcgcagagtgttcatgcggaaacgcaaactctattccaatgccaacataacctttgtggcttgcagcgactggcttgcaaaatgtgcttcatcaagtgctttgctcgagggaaagcgtgtgttgagcattccgaaccccataaacacgaggctataccgtccgctcaacatggctaaggctcgcgaatcgctggcgttgccgcttggcaggaaactgctcctttttgccgcatatcgtgttacgaataaaatcaagggcatagactatctttgcgaatctatccgcattcttgccgacgaacatcccgatttggcttccaacattgcggttgtggcggtgggaaaggagagtgatgcgctcaaggaactgttgccggtgaaagtttactcgttgggttatgtggcaaatgagaaaaagatgatagacatatataatgcctgcaatgttttcatgattcccacaatgcaggataaccttccaaacacaatcatggagtctatggcgtgcggtgtgccctgtgtggcgttcaatgtgggcggcattccgcaaatgatagaccataaaaccaacggctatgtggctgaatacaaaaacgccaaagattttacggagggcataatgtggtgtcttgctccggagaacgccgattctctgggcgaaaaagcgagaaacaaggtgaattccactttctccgaaaccgccgtggcgcggcgttattccgatttatataacagcttgtcaggaagtaaaaatgactga

SEQ ID NO: 704 - DNA, 1527 bp, unclassified Prevotella
atgagagatgtcagtgtagagattcttgatacgacactacgtgatggcgaacaaaccagcggcgtatcgtttactcctaatgagaaactgaatgttgcaaggacgcttcttcaagaagttggagtggatcgtattgaggtggcatcggcacgtgtttctgacggtgagaaacgtgctgtggaacttatttgtcgttgggcaaaatccgtgggaaaacttgatagagtagaggttctcggatttgtcgacggtcatttgtctgttgattggattaatgattgcggctgtaaaaccatagaccttcttaccaagggttctcttaatcatttgaactatcaactgcgtaagactcctgaagagcattttgccgacataaaagagtgtgtggaatatgctcatagcttaggaatgacagtaaatgcctatgttgaagattggtcaaacggaatgaaaacttcgcttgactatgtctattctttaattgagcatttaagttctatcggagttaagcatattatgttgccggacacgttgggaatattaaatcctcttgaagttttggaatatatacataagatactgcgccgcttcccaaatgtttgttttgatttccatgcgcacaacgattatgatttggctatatcaaacgtacttgcagcggttttggcaggatgtcgcaacatacatgccactattaacggtttgggtgaaagagctggcaatgcccctcttgcaagtgtccaagccattttaaaggaccattttcaggcaaagaccacaatcgtagaaagccaattaataaagatcagccgattggtagaaagctactctggcatttccattccggcaaattctccaattgttggcgacaatgtatttacccaagttgcaggagtacatgccgatggagataacaaacatcatctttattctaacgcgttgctaccggaaagatttggaagaatcagagaatttgctttgggtaagagcagtggcaaagctaatattcttaaaaaccttgaagctcttggcttggaacttactcccgaacagacaaaacgtgttaccaaacgaattgtagaattaggagacaaaaaagaaattgttacccaagaagatctcccttatatagtttccgatgttctgaaacatgatactcccgaagaaaaggttcgtttggtgagtttttttgtttctacggcttacgggctcagaccttccgcttccttacgacttgaggttgacggtaaggaatacgaggctcattcaacgggcgatggacaatatgacgcatttgcaagttgcataagacaaatttatgtggaacgtctgcaccgttctatgccggaattggtaaattacaatgtaactatacctcccggcggacgcactgatgcttttgtccagactattataacatggaatgtaaacggcaaagaaattcgcacgcgtggatttgatgcagaccaaaccgaatctgcaataaaagcaactataaagattctcaacataatagaaaataaataa

SEQ ID NO: 705 - DNA, 1386 bp, unclassified Prevotella
atgacaacagacaagaaattacttacggaacttagcgagaaaccggtgttcagtctgcttcttcaatacgctattccggcaatcgttgccatggtagcctcatcgctttacaacattgtcgacggaattttcattggacaaggcgtaggcgcgggagcaatcatgggattggcaataaccatgcccatcatgaacctctcggcagccttcggcgcaatggtgggagtgggtggaagcacgctgctttcggttaagctcggcgagaaagactataactttgccgccaaaatcctcggcaacgtcataacgctcaactgcataataggcatagggcttggtgcggtgatgctgttgtttctcgaccccattctgagattcttcggcgcaagcgactacaccataccctacgcccgggactttatggtgatagtcttgataggcaacgtattcactcacctgtttctgggactgaacgccatgcttcgctcgtctggcaaacccaagaaggccatgaaggcaaccatcatgaccgtgataataaacatagccctcgccccgctgttcatcttcgttttgcacctcggcatacgcggagccgctctcgccacaattctttcgcagctcatagtgcttctatggcaattcaagctcttttccaatcccgacgagcttatccacctgcggcgcgacacctatcgtcttgaaagaagaatagttaccggaagcctttcgataggcttgtcgccgtttctgataaacctgtgcgcgtgcatagtggtcataatcataaacaaacagctcgtgagctacggcggagacgttgccgtgggcgcgtatggcattgccaaccgaatgatgttcttcttcgtaatggtggtaataggcataaaccagggcatgcagcccattgccggtttcaactttggagccaaacactacacacgacttaatcaggttctgaaatacgccataaccattgccacaggcatttggatagtgggcttcattgtttgcgtgcttctggcaacgcccgtggcaagcgcgtttacaaacgacgaagaacttttgaaggaagccgcacacgcgctgagggtcatgaacctcgtggtgcccatcataggattccaaatgataaccataggttttttccaaagcataggcaaggcgggcataagcatattcctgtcgctcacgcgccaactgcttttcctcgttccccttttgctcatccttccgaactttttcggactcgaaggaatatggtattctgttccaatagccgacggaacagcggctataacggcagcaatagtgctgatataccacatgcgcaaattcaaaatgcgcggaaaacttgaaaactcaaatctacaaaccgaaatataa

SEQ ID NO: 706 - DNA, 729 bp, unclassified Prevotella
atgaataaccttacggatagagaattctggaaagaatactggagcaattacatatatgaaaaggttccgacacgttcggaattcgataaatacttcacgcctgccatgtacggcggcgagggcaagacttccattgaaataggtggctttcccggcacaatgtctctatatttcaaacgtcgcggatacagtcccacacttctcgatttctatgtagatccgaaaataatagacggtctggaagaaagcaacggtttcagtaagggcgatgttgagtatatcgaaagcgatttctttgctttcaaatctgaaaaacagtacgaccttgttttttcaataggtttcattgagcactttgacgacacggcagacgttatacgccgccatgtggatttggtaaagcccggcggaacgcttttcattgctcttccgaatttcagagggcttaacggatgggtgcaaaaggttttcgaccgccgcaactacgatgcccacaacatcagttccatgattccttcgcggcttcgcgctattctcggttcgttgcccctcaaggacgtgaaggtgcagtacaccgccaaacctatgttgtggttggagccgcagaaaggtgttaaaaacaagattgcacgcaaggttgtaaaatttttcagccatgccatgaagttgtttcccgttccctcgcgcctcatgtcgccctacattgtgctgactgctgaaaagatataa

SEQ ID NO: 707 - DNA, 1329 bp, unclassified Prevotella
atgttttctcataagtatttgccacaaacggacagcgatataaaagaaatgcttgccgcttcaggtatcggcaatcttgaagatctttattcggatgttccagagtcgctgcgactgaaaaaggattataacatccctttgggaaaatcagaagcggaagtccgcaaaattttctcttcactcgccaacaaagacaaacaacttatttgttttggtggtgccggagtttacgatcattacattccgtctgtaattgattacataacttcgcgttctgaatttttgacgagctatacgccgtatcaggccgaaatttctcaaggcacgttgcaatacatttttgaataccagtccatgatgtcggaactgacaggattggaagtatcgaatgcaagtctttatgacggagccacggcaactgcagaagctatgatgaccgcgatttccgtaaccaaaaagaaaactcgtgttctcttaagttccactctaaatccgcaagttgttagagttgttgagacttatgcaaaatttcatggcgtaaacctgacgatgattcccgagaaagacggagtaacggatttgtcttttgtaaaacaagaattggcaatcggagatattgccggcgttatagttccgttacccaactattatggaattgttgaagactattccggtttggcaaacgatgtacatgccgcaaaagctgttcttattatggaatgtgttgcggcagatctggctcttttgaaatctcccggagaatggggagcagacattgccgtaggaagcgggcagtctttaggattaccaatggcatacggaggagcaaatgtaggattcttctgtgcgcgtgaagattttttgagaaagattccgggaagaattgttggagcaaccatagattctgaagggaaacgtgctttttgtcttactttacaaactcgcgagcaacatatacgacgtgaaaaggcaacttctaatatatgttccaatgaaggaatgcagactttgtgtgttgcaatctatctttccattatgggaaaacgcggattacaggaagctgcttcaaaatctttttccggtgcgcactatttgtacgaagaacttttgaagacaggaaagtttgaaaaagtttacgatgtgccgttcttcaatgaattctgtttggaatcaaagattaacccggataaatgggaaaaaacttgtgaagttgccggcttcttcggtggcgtaaggatagaaaatacaaatcgcataatgtttgcggtaacggaattgcgcacaaaagaggaaatggatgctttagttgcacttgcaaaagatatgtga

SEQ ID NO: 708 - DNA, 1998 bp, unclassified Prevotella
atgtttgataggataatcaaaacgtttattgctgcctcgcttgtggtcgtgccgcttgcgggagctgcaaaagattatgtagtgaagtcgccatcgggaaacctcgtgctgaaagttgcaacgggcaaaaacctgacgtggcaggtgaatttcaaagggcacgaaattaccgcgccctctgttttgagtgtgaaactgaagaacggcggagagtggggaagcgataatcccggcggaaagcagggaaaagtcagccgcacaatcgacggtgtgaattaccgaaaggcaaagatcgaagacaaatacactctgctcatgcttaaaggcaaaggctattcggtggaattccgtgcttatgacgacgctgcggcataccgcttcattgccaacgcttccgattccgtaacgatagagaacgagaaggtggaatataactttaccaaagactacgaggcttatgtgccttacgtaaacgatttgcgccacggcgaaagatattcaaactcctttgaagcctattacgacatacagaaaatttcgcaaatgcgcccgcaaaaccttgcactcgtgccgtttgtggtgaaactcgacggcggaatcaaggctgcgctcacaagtgtaggcgaattgaactatcccggtatgtatctgcattctgcgttttcaaagggcttttcgctcgagggcgaatttccgggctatcccgattggaaaaattccgttcccggcaaaggcggtacggaaaacttcgctaaacttttccgcaatgactatatagcacgcgttgccgccggggaagctttgccttggagggctataattgtgagcgacaacgatgttcagcttgccaattgcgatttaacccaaaaactttgccgtcccgtggcaaaaggcgactggtcgtgggtgaaaccgggaaaggttgcgtgggaatggtggagcgcagcaaacataacgggagtggacttcgtgtcgggactaaacaccgaaacttataaatactacgttgactttgccgcaaaacacaatctggagtacataatactcgacggcggatggagcggaaaggacataaccgaagccagaaaggaaataaacctccccgaactcgtcaactatgccaaagaaaaaggtgtgggagtaattctatgggcgagctggaaaaatgtaatggagaaaatgcacgaggcaatgccattgtacgaaaagttgggcgttaagggcatgaagatagactttgtggatgccaacgatcagtatgtcatcaactccgtaagagagataaccgaatttgcagccaaacatcatcttataatagactggcatggaatgatgcttaacggaatgcaggtgaattatcccaatatagtaaacatagaaggcgttcgcggtttggaacaatgcaaatggcagagcggcgcaaagggtactcagggcgcggacatgccgggctacgatgttaccataccttttgcgcgtatgcttacggcacctatggactacactccgggagccatgcacaacgccacgagacaagattaccaccccattgatgataatcccatgagtcaggggacaagggtgcaccaaatggctatgtacacggttttcgacgcacctttgcaaatgctttccgacaaaccgtcgctctatgaacggttccctaaatgtacagacttcatttcgaaagtgccgacagtgtttgacgactgccgaactctgcaaggagaaatgggagaatacattgtaaccgcaaaaagaaaaggtgcaacgtggtttgtaggggctatgacaagttggaaagagcgtgaattggaactgaaacttgatttccttgacaatgcaacctataaagccgtgattttccgcgacggcgtgaatgcgtcaaggaatgcggaggactacaaacttgaggaaaaaacagtgaaaaagggcgacgttcttaagataaccatgaagagcggcggcggatggactgcaagattcgagaaaatgtaa

SEQ ID NO: 709 - DNA, 1425 bp, unclassified Prevotella
atgacaagaccgaacggaaatgccataaacgcctcggtgcgtaagaatgtggaccgctatgaagcaatgctggtgagcggacgacgcgaatattttgacgaagacgatttgctcgacgttgcagattattattataacgacatgtcgcgtaaagagaatgctttgcaatgtattgagtatgcgttgtctcttcatcccgaatgcttaatggcattactgatgaaggcggaaatatatttctattcgggaaagcgtgatgaggcttggctgataatagattctgtaagcgacagaaccgatcaggacgtgctgtattataaaggacttttctgtcttgaagaaggtaaacttgaaaaggctgacgagttttataaaaaagcgtattttgctcaaatgggcgatagtacagaattgttttgtcaggttgtttcggattatttggaacacaatgttacggacggtttggacaaatggtttgacattctccccgagtcgttgaagaatgataggggtgtgcttgaagtgaaagccgactatctgcgcgctcgcgaaagatataaggatgcaatagcaatagaagaaaaacttatagactcggacccttacaatgttgtatattggaacggcattgcaaagttgtattgtcttgacgagaatttctataaggcacaggaaagcattgtttatgcgcttgacatagatccgaacaatacggaaagccttatattggctgcggaagttgccacgcataacggaaatttcaatgacgctgcggaatattataagagatatcttaggattgacgataaaaacgctttggtatattataattatgcgcaggtaatggcttgtttggaaagttatgacgaagctattgtaatgtcaggctatgctttgaaatatgcagatgagcatcagacaaacaaatcggatgtttatcaattaatgtcttcgctgtattggagcgtgggagatacaaaaaactcaaagagctatttggaagaagctcgaaaggaaaataaaatgtcagaagaggcatacattatgcgaaaactttcgatagacttgaaggaaaataaggcaggaagcgtaaaggatgatgtagaaaaacttacggacataatagtagagcagcaaagcaatccttggacttttctttatattctgacctcttttaacaagtatgagcttgtaagaatggttgtaaagagaatggaaagcgaaaatcctaattatgctgcgaaatgctgccccttcaaggctatgataagttttgtggaaaagaatgtagacgactttcttgaaaagttgaaaacttctgtggaaattgcacccgaagaaacgcgcgatttgttttccggaatttttcccgaaggcttggacgtaaaggattattatgcttatgcattgaaaagcgtgggctga

SEQ ID NO: 710 - DNA, 1035 bp, unclassified Prevotella
atgaagttcaaaatcgaattggaaatcgaaaaagcaggattctcactcgaagcaggagacggcatcctgcttttgggttcgtgcttctcagacgaagtaggacataaactccgagaaaatcgtttcaactgcatttgcaacccgttcggagtgctctacaatccgctttccatccttaacagtttgaaaatcattgcacatactgctctaaacggatgtcccgacaaagaacttgtggaaagtcgtctgttctgcgacaatgccatttggcacagttggcttcattcctcaaatttttcatcgtgcgagaaaaatgagttggaaaagaacatatacgactcgctttctctggcaaccggtgtgcttaaacacgccaaacttctcgtgataaccttcggcaccaaccgtgtgtatttccgcgacaacggaaccggagcttttgccgtggcaaactgccacaaacaaccggcttacgaatttaccgtcaaagaccttgacccgcaggaaataatttcctcttatgacgaagtgcttgaaagtgtgtttcaaatcaatcccgacataaacgttttgttcaccataagtccatacagatacataaaatacggattgcatggttcaaacctcggaaaagctgtgttaatgcttgccgttaacggcattgtgaaaaaccacgaaggcaaatgccattattttccttcgttcgaaatattgaatgatgagttgcgcgactaccgtttttacgctgaagacatgctgcatccgtcaaaacaaacagttaattatatctacgaaaaatttgcagaatacgctttcagcgcaaatgccacggaattcgtcagacaatgggttccgatatataaaaccttgcttcacaaacctttgtttccacaaagcgtacaatataaatcgttgatgacatcgacaaaagagaaacttatgaagctgaaaaaggatttcccgtgcgtaaagttggacaaggatattgatcaaataaacagaattctcatatcaaacaccataacaggaatatga

SEQ ID NO: 711 - DNA, 906 bp, unclassified Prevotella
atgaggcgaataaagtttattcttcttacagcattgctcatggcgggcgcaaactgcgttcgcgcacaaatagcaacaaacttgaagataagcgaagtcgttgtaaacaatcctgcgggacttattgacgaatacggcaataggaatgcttggattgaaatctgcaatacctcatggggaacggtaaatctgcgcagctgttatctgacaacaaatcgaaaaactctcgatccgaatttgtctgtacccgaaagaacaaagctcatgtccgcaattccgcgcggcgacgagcgtacacgtttgaaagcaaaagaatacattgtgttttttgccgacgcacagcaaaatttgggaacgctgcatacgaatttcaaactcgaacccgagaaggaaaacttcttagctctttttgacggcgacggacatacgctgcttgactcggtaactgtccccccgtgtaagcaacccggttcgtcctatgccagattctttgccgacaatggcagagattatgaatggaaatggtgttctcccgaaaaagtaacgccggattgcgccaacagcaacgcaggtactaccgccaacaaggtagcagaattcaaggaaaaagaccctcacggattcggcatggctattctcggcatgggcatagtattgtcttgtctgcttttgctttcgattttcttctatctctttggtaaaatatttgccaaggcaaacagcagaaaagccgaagcaaccacacaagaggaaacaccgcagccgcaggacgagaacgaagttattgcagccgttatagcaatggcattgaggaaacagcaatacggttttcatgacaacgagagtggcgtgttgacaataagacctcgccgcacaaattggacgagaaccggaaacagcaactaa

SEQ ID NO: 712 - DNA, 1224 bp, unclassified Prevotella
atggaaaattttcagacaacgacccttacaaacgggttgaaagttattttcgaaccttcgtccacgggtgtggcttattgcggatacgtggtttatgccggcacgcgcaatgaaaatcctgacgaagagggaatggctcatttcatagagcatgtcagtttcaaaggcaccgaacgtcgcaactcgtggcacataaacaatgcgctcgaaagcgtaggcggcgatttgaatgcctatacaggcaaggaagagacggtttactataccgccattcccaaaggcgagttgcccagagccatagatgtgttgagcgacatggtgtttcacagccggtatccccagcgcgagattgacaaggaggtggaagtcatttccgatgagatagagagctacaacgacaaccccgccgaacttattttcgatgagttcgaggaactgctttttaaggaccatccgctgggcagaaacattctcggcaatgccgcacgcctcaagacttacaccactgccgatgccgtgaatttcacgcagcgtttctaccgcccggcaaactgtacgttttatgtttatgccgatgccgaatttgccagaatagtgaaacttctcgaaaaagccacgtccggactcgactccgcgcctgccgtaaaacaggaagcggctcttccgccgtatgaggcgcgcgaagtggtgcacgacaagaagacccatcaggctcatgtgatagtgggttcacgcgctttcagtgccacggacaaaaggagaacggctttctttttgctcaacaacattctcggcggttcgggaatgagttcgcgccttaatataatattgcgtgagcacagcgcattggtttatacggtggaaagctatgtggcttcttacagcgacacgggagtttggggcgtttacttcggttgcgacccgaaaaatgtggctcgctgccgcaaacttctggtttccgaacttgctcgtgttacttccgcgccgctcactccctcgcgtctttcgatggcaaagcgcaggcttaagggacaactgcaactctcgcgcgacagtttcaacagttacgcaataggcatgggacgtgcgttcgccaaattcaaccgactgcgcgacatcgacgcacagtgccgcgccatagacgctctcactgccgaggaagtgatgcttgcggcaagagatgtcatttctcccgacaaacttacaacgcttatatataattaa

SEQ ID NO: 713 - DNA, 1326 bp, unclassified Prevotella
atgaacaaaagaacaagaatatcgggaattgcaattgctgcggcaatattgctcatatccttacaggcaaacgcccaaaacggtagcaactcgccatattccagatacggattcggcacaataaacgatcgtgcacagggattcaataaaggcatggcaggtgtggcacaaggttttcgcgatgccacagcagttaacttccaaaacccggcatcatattccgcagtagattctctgacacttcttttcgatataggagtttcgctgcaaaacgccaatttcaaacagggaagccttaaaacaaatgccaaaaacacttcggtcgattacataaccgcacagttcagagcctggcgcaatgttggtatgtcgttcggcttgttgccgcttacttcaataggctacagtttcaaaaataagcagacacttcccgacatagacggcagcggagagaaaacagaatcgacatcctactccggcgacggcggattgagagaagtgtatctcggtgcaggctggaacatagtgaaagatttctcgataggtgctaacgtgggatttgtttggggcgactacagccatactatacaggcagctttcaacgacaataacgtaaaccagttccgacgcgtgtattccgcagacatttcaacctacaaaatcgatttcggcgcgcaatacagcaaattgctttcaaagaaagacctcatgactgtaggtgcaagctacacgttggggcataaaataaattccgacgcgaaattcattaatcagacagccaattattcgggttccgtttcctcgggcgacacaacaaaagtgaagaatgctttcgaaatgccccattccgtagctgccggtgtggcttggaatcacaacaacaaatggaaagtgggacttgattactctatcgagctgtggaagaacgcaaaattcccgcaactgacctcgaaaggcggcgaaaacaagtatgtttccaccacgggagcctttgacaacagtcaacatgtttctttgggcggagaatatgtgcacaacagcctcggcataaagtatcgcgaccatatacgttaccgcgccggtgtttcatacggcaccacatacgcaaaagccaacgggcaaagcggtgcaaaagacctgttggttacactcggcgtaggacttccgattgcaaacataataaacaatcgctccacactgaacttctcggcacaatgggaaaacataaagcctaaaggaccgggggcaataacagaaaactatctgcgtctttgcatcggcattacctttaacgagaaatggttccaaaagtggaaagcagaataa

SEQ ID NO: 714 - DNA, 1245 bp, unclassified Prevotella
atggcccaaaactcccttatatataaggcgcaggttaaattcgacgaaggcaaaatggacgaagctggggcagccatagaaccagctttaacaagtggcaagaccaagaaccttgcaggtgcttacaattttgcaggcgtaatacagggtaaaatcttaagcgcagaaataacaaaagctgcccaaaaacaacctctggatacaatgaaattcattaatgcgcttgacaaatccgttgaatatttcgaaaagagctacaagttggacaatgctcccaacgaaaaaggcaagataaagccgaaatacaacaataatgcagaagctcctttccaaagtaacaccaaaatgatttcccaaatgatgaactactatgcttatgctggtcaattccttaatgcaaatggcaatcaaaagggagcttacgatgcttttgagaaattcatagagatgccaaaatcttctgttttcacaaagcagcaggctgactctatttacaaggcaaatgcaaatgagtattacaccgttgcattctacgctacgctactcggctaccaaatcaaagattacgatcgtgctttgaaacacattgattttgcactgcaagacactgcgcagaagaacaagaacgacctctactttataaaagcacagtcattactgcagaaaaaagatacggcagcatgggtaaaatgtgcaacagaagcaattacagccctgcctaacaatacccagtttgttcaaaaccttctttactactacaacataaagcatttggacaatgaggcagtagctacagcaaaagatttggtagcaaaagctcctaacaacaaaaatgcatggtattctgccggctgtatatatcttaaccaaacaaaagatttcgataaagcacgtgaatgtctgcagaaagcattggaattagatccgaacttccctgacgcaaactataacttgggtgttacatatgtaaacgagcttatctcaaaaaaagatcaattcgtaaccaatccgcgtaatccccaatacaaaacagatgtagaaaaagtcaaggattattaccgcaaagcactcacctattttgaaaagacaagagaacttgttcccgatcaacccaaagtttgggctctttcattgaagaatatctattataaccttgagatgaaggacaaagaaaaagaaatagacgaggttctaaagaacgaaggtttggcatcaccggattctgataacaacaaaacgaaataa

SEQ ID NO: 715 - DNA, 1176 bp, unclassified Prevotella
atgagaaagatgaacggtgttccttccactccttattatattttatatgaggacaaactgcgcgaaaacttgaaacttataaacaaggtttcaagcgaatcgggtgtggaaattatattggctttcaaagcttttgccttgtggaagacttttgatattttcaaagagtatatctgttctacaacggcaagttctccttttgaggcaaagcttgccaatgattatttcggtagccttgcccatacctattctcctgcttatgaagaaaacacattcaatacaattttggagtgttccaagtgtattacgttcaattctctttcgcaatattctcgcttctacgacaaaattaaagattggaacagcaatcctgcgaaccataacatatccgcaggaataagaataaatcccgagcgttcggagattgccaccgacatctacaatccgtgtgcccccggaacacgtttcggaatttctgcatccgatatgcccgcaaacttacctgacggaatagaaggctttcactgtcattgccattgcgaaaacgactcttacgcactcgaacgcacccttgacaccatagaatctaaattcggcaaatggcttggaaacataaaatggctaaatcttggcggcggacatttgatgacacgcaaaggatatgacattaaccatcttgtcaaaattcttcgagacttcagacatcgccatcccaatcttgaaataatcatggaacccggttcggcttttgcatggcaaaccggagatttgattgcaagtgttgttgatattgttgaggacaaaggcataaaaacagctattctaaacgtcagctttacctgccatatgcccgattgtcttgaaatgccttatcaaccggaagtagaaggtgcgttgtctctggggaatgaaatcaaaaacattacggatgaaaacattttccgccttggaggaaacagctgcctcagcggagatttcatgggatattggttgtttcctaacgggcttaatgttggcgacgaaatcatattcaaggacatgatacactatacaactgtaaaaacaaccatgttcaatggcattcaacacccatccatatgcatgaaacggcacaacggaaacattcaaatgcttcgcgaatataagttcgaagattaccgcgacatgatggactga

SEQ ID NO: 716 - DNA, 1377 bp, unclassified Prevotella
atgacgtttacagaaaaagtttacagcacaatagtccgaaattctttgccacttgccggtaaggaagtgatagttgcgctcagcggcggggctgattccgtggctttgctgcgtgttcttttggaattgaattgtcattgcacggcggctcactataattttcatcttcgtggcaaagaatccatgcgcgacgagcgttttgtgcgcgaactttgccgttctttgggagttgatgtcagagttgccgaggctgacacggtttcttatgcggcggaaaagagggtgagcgtggaaatggcggctcgtgatttgcgctatgacttttttgcgtcgctttgtgaggagctacgtgcccccgttgcggtggctcatcatcgcgatgacaattgcgagacgcttcttttgaatttaattcgcggcacagggcttcgcggtttgtgcggaatggcttatgaaagcgaaagagtctgttcgtgcggaaaaaatatcaggattgttcgtccgcttctcgatgtttcgcgcgaggagatactggaatatctgaaaagcaagcaacaatctttcgttaccgacagcaccaatctcgtggcagacgtgaaaagaaacaaaatacgccttgaaataattccgcagctaagggaaataaatccgtcggtgtgcgatacattgcaaaaagaaatacggaaattttcggacgcatacaatatatataaggatgcagtagggaaagttctcgacgaaatagaacacaatgtttacggcgatgagattctttatgccgagaagctgaatgtttgtgtttcttccgagattgtgctttttgaatggctttcgccgaaagggtttaacgaggatcagatagaaaacgcctcacgaaacgagcgggaagaggcaagacttatggaaagcaacgattatattctttatttcaacaaatgtcgttatgtggttgtgcgcaaggattctgtaacaaaaggcaacaagtttgttctgcaacccggatgtgaggtgaatacaggcttttctgtggtgcggattgccgatgtcgacaaatttcctcccaagaaaaaactaacggaaactgaccttgcatacatagatgcggacaaggtgagttttccacttgttttaagacgcattgaaacgggagatcgttttgtgccgttcggaatgaaggggagtaaactggttagtgattttttgaaagactgtaaagttccggtggaagagagactgcggcaacttgtagtatgcgacaaagaaaaaataatatggattgtggggcgcagggtcgataatcgtgtgcgcatatcgcaagatacggcgaacataaagtgtatgagtgttaacgcgaacgattatcaagacaccccatga

SEQ ID NO: 717 - DNA, 1050 bp, unclassified Prevotella
atggtacagctcctcggtttgattatagttgtctgcattgccctttcgttcattgattgtatgggatataagttcaaatgtgggtggaaagccatttacatagccattggttgcattctaattgcctacgcaggcttgcgccctgtgggttttgaccacgattcaaaggtttacgaagatgctttttcaaactacgacaaaccgaaatacattcttatgcttgaatttactttcagatatatttgccaatttgtcaactggctcggcggaaacatcacgtgggttttcatgatatatgcaattgcaggcatatcgcttaaactttttgccataaagcgaatgtcggcattctacatgcttccgcttgtaatatatcttggaaactattacatttaccacgaccttacgcaaatccgaggcggcatagcttctggaatattcctgctaacgattcccatgcttgccgacggcaaaaaatggaaatgcgcaggactttacctgttgtccacatgtttccacatgtcttcgttattgttttttccaatgctgtggctcaacaataaagaactcacacgcaagggaaaatatttgttggcatcgctcgtacctttgggatatttaatttatttcacccacataaacgtcctgagtttcattcctttcgtaggcaaaaagatagaaatctaccagactctcgcagaaaaaggaacaggtgtggaaatcaacgtctttggtatggtttttctcgtaaaggttgccatattcctgttcacactccttatgtacgacactataagaccgtcaaacaaatatctgcctatacttcttaaggtaatgggatgctcggtatttgtattccttctctttaccgcgctgcccgtgttgtcttttcgcataagcgaactctatggcattgttgacataatcatttactccagccttttctatacagtcaagcaacgcgcggtgggtacgtctatcgtcggcatcgtaggtctgagcctctatgccataaatgttttctacatgaatcttttggagaatgtataa

SEQ ID NO: 718 - DNA, 522 bp, unclassified Prevotella
atgcttaacaaaaagattgaagaggcaataaacgcccagataaacgccgaaatgtggtcggcatatctttatctttcaatggctgcccactgccatgccaacggaaatcctggaatgggtaactggtttgaggtacaatttcaggaggaacaggaccacgcaaagatactgttcaactacgtcatacaacgcggcgggcgtgtggaactgaaacccatagacgctgtacccaccgagtggaaatcgccgctcgacgtgtttgaaagcacactggcacacgagcagaaagtaaccgctttgattaacaagctcttcgcactctccactgccgagaacgactacgccacccaaagcatgctgaaatggtttgtggacgaacaggtggaggaagaggaaaacgcccagaacatcattgacaacctaaagatgataaaagacaacggttacggcttgtacatgctcgacaaagaactcgccgcacgcacttatgtgcaggcttctcccctcgcagcaaaagcataa

SEQ ID NO: 719 - DNA, 816 bp, unclassified Prevotella
gtgatttttccgtatatttgcataaaagaaaatagtgaatatatgaaacagcaatcccgactcattttattgtcgaacgatgacggttatcttgccccgggcataaatcttctgatagactggcttcgacctctggcggatataatagtagttgctcccgacggtccgcgttccggtgcggcaggttccattacttccacggtgcccattactttctcgcccgtgcgcatggaagatggtttgaaagtttactcgtgttcgggaactcccgtggattgtgtcaagcttgctctccatgacattgttccgcgcgagccggatttggtggtcagcggcataaatcacggcgacaacgcttctataaatgttcattattcgggaactctcggtgcggcaatcgaaggagctttgcacggcattaagagtgtggcgttttcttcctgtaatcataatccgcaagccaatctcatgcccttgaaaccctatgtcgagagcgtggttaaggctgctcttgaaaattccatgcccccgctcacatgtttgaatgttaatttccctgcgctttcaagcttcaacggtgtaaggatatgccgcatggggcattgtcgttggattaacgaatttgaaagatgcgatgtggaaggacgcggaacgttttatttcctaacaggaaactataccgacaccgacccgggagcaaaagacaccgacagtcatgcacttgccgaaggatatgtggcggttactcccacaactctcgacgttacttcgcaccggcttgccgaagaagttagaaactggggcatagaacaatga

SEQ ID NO: 720 - DNA, 504 bp, unclassified Prevotella
atgaatttagacataagaataatgagccgcgacatcaacgaaatgctctggaagacaaaaaaaactctttctacggcagaaagttgcacgtccggacgtgttgctgcggttttgacttctactccgggaagttccgagtattatttgggaggcattgtttgctatgcagaccatgtgaaaacagacatattgaatgttgatgccaaggtaatagaaaataggagtgctgtttgcgaggaagtggctaaacaaatggtcatcggtgcaaacaaactttttcattccgactattcaatagccgtaaccggatttgcaggtcccggtggtggaacagatgaagcacccgttggaactatttggattgctgttggaaatgcagagaaaatagtaacacagaaattagagaaagactgtggtcgtgataagaatcttgctgttgcaactttttatgctacaaagatgattcacgattatttgaaaaatctgcttcccgatgaaccgtaa

SEQ ID NO: 721 - DNA, 846 bp, unclassified Prevotella
atgaaaagaaacaaggatgttatcacgttacggcaagataatttccccaaacagatgaaacgctatttcatatacctgtcctacgacggaagtaaataccacggttggcaaatacaacccaacggaataagcgtgcaggaagtgttggaaaaaagtctcaccaccctgctcggaaaacaaacatccgtaaccgcagcaggaaggacagacgcaggagtaaacgcttcgtcaatgcccgtacattttgatacagacgaagaattgcccatgccgaacaaaaaacatcccggcgaaactcccgaacaacacttggcttacaagctaaaccgcattcttccgcgagacattgccgtgaacaaaatcgtaaaagtgaacaacgatgcccacgcacgcttttcggcaacaaaacgcacatactattattatgtaacattgagaaagaatccgtttctgacgcaataccacctgcggctgacctatcccgtaaatttcaatcttatgaacgaagctgcaaaaatgcttttgggtcggcacgatttcgattgttttgcaaaagcacaccctgacgtgaaaacttcgttctgcaccgtagacaaagcacaatgggtggaaatatcaaaagacgaatggcgttttgaaataagtgcggacaggtttctgcgcaacatggtaagagctatcgtgggaaccctcctcgacattggcagaggcaaagtaagcataaacgaattgcacgaaattataaacagtcgcaacagaagccgtgcgggagaaagtgtgaaaggcgaagcattgtttctggaaagcgtggaataccccgaagaaattttcatctcctccatataa

SEQ ID NO: 722 - DNA, 774 bp, unclassified Prevotella
atgaggattttaattctcggcgcgggcaaaatggggtcattctttgtcgacctcctgagttttgatcacgaaacggctgttttcgataccgatccaaagcgtttgcgtttcatgtacaacacgcagcgtttcacaaggcttgaggaaatagatgcattccgtccagaaatggttattaacgcggttactctcaaagccacgattcctgctttcgaaaaagtcattccgcatatccccgacaactgtatattgagcgacattgcttcggttaagacgggcatgaaagagttttacgacaaatgcggcttcaaatacgtttccacccatcccatgttcggtcccacatttgccaatctcggctcgttaagttccgagaacgcaataataattaaggaaggcgactatatgggacgcattttcttccgcgatctctacaatcgtctaggactgaatgtgtgcgaatatacatttgaagagcatgacgaaacggtggcttactcgttgagcattccttttgtctctacttttgcttttgctgccgttatgaaacatcaggatgcgccgggaacaacgttcaaacgccacatggcaatagctcgcggcgtacttggtgaggacgacacactgcttcgcgaaattcttttcaatcctcttacctccggtcaggtagaaaaaattcgcacggagcttagcgaactcattgacatcatagatcataaggacgaggcgagactcggagcttatcttaccaaaatccgtaagaacatagagtaa

SEQ ID NO: 723 - DNA, 885 bp, unclassified Prevotella
atgtattcaaatcaaaaaacagtcgcattatttggcaacatgcaccaaacaaataaaagcaaatacgcaaggcgtgttgttgatttgcttcgtgcaaaaggctgcaacgtgattgtggaaagcggattctacgagagttctgcgcaatatcttgacacaattgacaaaagcaatatctttgaaggcaaagatttcaacgcagatttcgccataagtctcggaggcgacggaacttttctgcgcactgcaatgttcgtggaatcgaaaggaatccccatactcggcattaatataggacacctcggcttcatgtcggaaataaaaccagaaaatttcgaagaagccatagacaatattttatcgggaagctacaaaatcgaatcgcgaagcgttattgaagtggcggcaggcaggcataatctcggcgtttacccttttgctctcaacgaagtggctgtgctcaaacaggacatctcatccatgataaaaataagggttttcattaacgacgaatacctcaccacctactcttcagacggtcttgtgcttgccacacctactggatctacgggatatgccctgtcgtcgggcggaccggttgtggttcccgaatccaattcaatagtcattgttcccgttgcgccccacagtttgagcgtaagacccattgtaatttgcgacaacgttgagataaaaatgaacgtgatgagtcgcacgggacatttcctcgtagctgttgacggcagaaactcgagttgcagcgaagaagactgtatcaccattcgccgtgcgccttacgacataaaaacaatacactgcggaaacaaaactttcttcgacaccatgcgcgaaaaactgatgtgggacggagacctgcagaaataa

SEQ ID NO: 724 - DNA, 549 bp, unclassified Prevotella
atgaagaaatatctttttttgatagcagcagctttgacaatgggcttcacctcttgcgacagcgatcccagcgacagcagcacaaatgccggcggcacaaaggttgagaaattggcaggcgcatgggtggtagatgtctttacatgcgatgagcaaggcgatgttgcaaatatcgacaattggaattgggaagatcaaggcgctttcggcagtgatctcatgacctacaacactgctgccaacaaaggcaacgagatgtgggttgacgatcagggagaaagcaacttcggcggcgttaacgactacagccataaggtgaaagttaacgttaagggcatgacattctccgtaaacgaaggcgagaatgaatacggctctcccgttacaatcgtaggcggtaaggtgttgaaaaacgctgcaaccgttgagaaagatcgtggtcagagcatcaagaccgacagcatagtttactatgttaaggttaacggtaccgagtacggttatctcaagatttccggatatttgagcgcatcaaccggaaccaactaa

SEQ ID NO: 725 - DNA, 1668 bp, unclassified Prevotella
atgggaatcatacataccacgaaaatcatcactacaaaggctattgtcaacggaaagtttttcaacttcatcgtttttgtttttatttatgtgtttatacgccgcgaaaatagcgaatttcacgaatcttttgccatttcctttattcaaagtatgggtttctcgaatctttatgtgccggattatcgcaattgtaattcaaaacgcacgaaagcaactgcttatgccgcaaatttttgtacttttgtaaacgaaactcaaataaaacgattaaaaataaatatggcaccaagaagtaattttggaagtaagttgggagcaatactcgttgcggctggttctgcagtgggtctcggaaatatttggaggtttcccacagaggcgggaaacaatggcggcggcgcgtttctcattatatatataatatgcgtgcttgtaatttgcattcccctgcttcttgctgaatttatggtaggtcgtcattctcacgccaacacgggttcggcatacgcaatcatgtcgccgaaaaaacattggggcttcatcggtaaaatagaagtgttcacctcttttttgattctgtcgtattattcggtagttgccggctggacgcttttctatacctttcaatcgctgctaaatcgctttaacgtcatggcgcaacagcacgacagcgaagaaatattctccgtaaacttcacaaactttgtgagcaatccctggcaaccgcttctgtgcatggctatattcatgttggtaactcactttgtcattgtgcggggcgtgaaaggcggtatagagaaatctgcaaagatgttgatgcctgttttgtttgttctgcttataatcctgatggtttgctcgctttccacaacgggtgccgccaaaggtttgcagtttctttttgcgcccgatttctcgaaaatcaattccgaggtagtaatggcggcaatggcgcaggcgttctattcgctcagcctcggcatggggtgcatgtgcacttacgcttcgtatttttcaaaagagacaaatatcaccaaaactgcgctcacggttagcgtcattgacactattgtggctgtaatggcaggtatcgtgatttttccggcggttttcagtgttgcaggattgaatcccgatgcaggaccgtcgcttgtgtttattgcgcttcccaatgtgttccaacttgcattgggaggtatgcccgtcatggcgtatatttgttcgctggcattctattctcttctcgttgtagccactttaacttccactatatcccttcacgaagtaattacagcctatctttccgaaacccgaaagataaaaaggcgcaaagctgcatggtttgtaaccggcggatgtctcgttttcggtgcgctgtgttcgttgtccatgggtgtgcttgccgacttcaagattgcgggaatgggtctgttcgatgtctttgactatgttaccgcaaaaatactccttctaattgcaggcttcttcacttccgtattcatggggtggattgttgagaaaaaggtaatggagtacgaactcaccaatgacggaaagttaaaactgcgttgcttcggacttttgatttttgctctccggtacattgtgcctgcgggcattgcgcttgtctttctcgatggtctcggaattttgaacctgttctga

SEQ ID NO: 726 - DNA, 1872 bp, unclassified Prevotella
gtgaaagcgaaatacttgctcattactgcggggctgctgactgccttttccgtgaaagcagaaacggtgaacgacactctggaaaccgaaactctgcgcccggcattggttacgggaacccgaaaccttaccgacgcacgccatctgcccatgaccgtgagccttgtaagccgcaaggaactgaccaaaaactaccgctcgtctgttttgcccactgtgtgcgaacaagtgccgggattgttcataacttcaaggggcatgttaggctacggagtgtcaacaggagctgcgggaggcattaaagtacgcggcataggcggtggcgcggaaatgttggtgcttatagacggtcagccgcagtatgccggacttatgggacaccccatagcagacgcttatcaaactatgatggcggagaaagtggaagtgattcgcggaccgtcctctgtgctctacggctcaaacgccatgggaggagtgatgaacattgttacacgaaaaataacccgagacggttcgcacacaacctttcaggcagaaggcggatcttatggcactgcacaggcacaggtttcaaaccagacaaaagccggcaagttttcgagcacggcaggcataaactacggaagaaccgacggacatcgccccaacagcaactttgaacaatattcgggctttgtgaaattgggctacgacctttcggaacattggaaagccgatgcagacgtaaacctgacgcatttcaaggcttcgaatccgggagaagagacaaatccttacatagacaatgactccaagattactcgcgggcttgcttcggtgcagttagccaacaactacggcagcatgtcgggagcgataagagcgttctacgattggggacatcacaacataaacgacggatatcaccccggaggaacgccgcaaacccagttgtatttgcacaacgacattatgagcggaataacagcctatgaaagcacgtcattgtttgaaggaaacaggattacactcggtgttgactatcaacatttcggaggtaaggcatggaacaaggtaatagccaccggcgaacacaaaagtcttgctaacaagaagcaggacgaaatagccggttacctggattttcgtcaggatttgctgtcgctcgtaacactggatgccggattgcgcgttgactatcactccacggcgggaacagaactcgtgccgcagggcggacttacgttccacataaacaacgatgcgcagatacgcgcaatggtgagcaagggatttcgaaatcctaccattcgcgaactctacatgttccgtcccgcaaacaaagatttgaaacccgagcgcatgacgaactatgaactcgcattcagcaacaatcttttcaacaacagcctccgacttggtttgagtcttttctatctcaaagccgacaacatgataacaactgccatggttgacggtcgtccgcaaaacgtgaacaccggtaaaacggaaaacagcggagtagaattcgaggcaaagtataaagccgacaagcacctctcattcaacaccaactacagctatcttcacatgagcaatcccacttcgggcgcgccggaacacaaactttatgtgggtgcagactatgttaacggtaaattcagcgcatctacgggtgtgcaatacattgccgggctgtatcttgccgcaggcaaaaacgccgacaaggaatatttcacgctttggaatcttactgcgagctacaaaatactcaaaaacataaccgcttatgcgcgcggcgaaaatctgttggcgcagaaataccagacaatgctgggattcaccatgcccaaagccactgtcatggcaggcataaagattgatatttaa

SEQ ID NO: 727 - DNA, 2055 bp, unclassified Prevotella
atgaaatattgtaatgtatttatcaccaaactgctttcgcgaatattgttcgcgtttatggctttgatagtttcggttgccataagttcctgctccgacaacattgacgagtcgaacctttatgtgttttcgggacagagtgtaaccgactttgtgaagcagcagccggagctgagcaagtatctcgttttgctcaaaaaggcgcgttcgggcatggggcgcggttccacaatggaccacatgcttgaaagtcgcggcaattatacttgttttattcccacagacgatgccattcaggaatttgtggactccgtggaaaaccggcgcggctttgacgttaacaatgtcagcgattcgctggcacaagtcatagtttttaacagcataatagacaacggcgacatagaagcctataagtccaccgactttcaggagggtgttttgcaacagaagaccatggcggaccgatacatagtaataaattttgcagcaaacgacagcggaaaagtaattaccagaataaacacgttctcgcgcatagttagttcggacaacaaggtggaaaacggacaaatccacgtggttgaccatgtggttatgcctgcctccacttcgcttccgggacttctgagcatgtcggacaacacacgcatattctcgtatctgctcgaagttacgtcgtgggcggacagtatggcaaaatatcgcgacgacgaatacgaacttcaagaccatccgcaaaactacaagcatatatggtatggcgaattgcttaacgagccgcttcatcataatagcggttacacggcattcgtagaacccgacagtcttctcgaagcagagtggggcataaagctggaagtggtgaacggaaacgtcgttaactgggacgaagtcatgcccgtgataaaccgcaaggtgaaagaatactatcccaaggcaaattccgacgacccgaaaagccttgacaacgcattgaaccagtttgtgggctatcatatcatagatgtcggcatggcatacaataatattgtaatcacaaagggacaactcggatattcttacagtcgtcccgaacaactcggcatagataagtttgaatatttcgagactatgggcaaagaccaccgtatcattaagttcactctcggagaacaaaccgaaggcatcagaataaatcgctacgtaagcgaatatgacaacgacagctaccgcgaactcgaagtgcccataaagggattgctcgtacaatcgggcaacggcgcacacgacaatcaggcgttgaacggattttatcacatgatagacggaatactcatatataatgatgatgtaaaatataaagtactcaacgaaagaatgcgttgggatacgcagacaatgcagcacgaactcatgacaaacggtctgcgccaacagccgtcaaatatatattatatgatacccgacggatatatgcgcaaagtgaagttctcgaaccagacattgatgatttccataaacaactacagtgtgaactggctcaactacgaagcagacgacttcgtacttgaaggatattacgatgtaacctggcaacttccgcccgttccctatgaaggcacctatgaactccgtctcggatattgcaatgacagtggtcgcggcatggttcagttttattatggcaccgatcccaataatcttgcggcggtgggcctgcctatcgatgcccgcatagaacctgataaagccgtgatagggtgggtgaaggacgatcccgataatccggacgctaatcgcgaaaatgataagaacatgcgcaatcatactttcatgaaatgtcctaacagtttcggtttcaattcaaccaatgttaccgaaggcggacgcagtcacggaccgagcggagcaaagttgcgccacataataactaccgagaactgccgccccggtgttacatattatatgcgtatgaaatcgctgctgaacggacctgccaatttcggtcccgatttcatagagtgggttcccaagagtgtttacaacggcgagaagcccgaagataaatggtaa

SEQ ID NO: 728 - DNA, 2028 bp, unclassified Prevotella
atgcacagattcaagatagattctccctataagcccacgggtgatcaaccgcaagctataagaaaactgacggaaggtgtggaacaaggtcttcctggacaagtgcttttgggtgtaacaggttccggaaaaacgtttacaatagcaaatgtcttggcaaatgtaaatcgtcccacgcttgtgcttagtcataacaaaacacttgcagcccaactctacggagaattcaagaggtttttccctgaaaactgtgtggaatattatgtgtcgtattacgattattatcagccggaagcatatatcccttcaaccgatacttacattgaaaaggacttgaacattaacgaagaaatagacaggcttcggcttcgtgctttgtcttctttgctgtcgggaagacgtgatgttattgtggtctcatcagtgtcgtgcatttatggaatggggaatccttctgcattctacgaaaacgtggtgaacgtaaagtgtggcgaaaccatagacagggataagtttttgaaaagacttgttgataatttgtatgttaggaatgattttgctcccgaaagcggtcagtttcgtgtaaaaggcgaaaccgtggacgtgatgctcgcatatagtgaggaaatggtaaggatttcgttttgggacgacgagattaccgacatagaggagaggaatccaacggatggaagcttgatttctacttatgaagaatatcgtatatatccggcaaatctgtttgttactgcagaaggcactcttgaacgcgcaatgtcggagataaaaaaagatcttgccaatcaggtaatgaaattcaatgtggaaggcaaattcaccgaggcaaagcgtttacaggaacgtgtgaattatgacatggaaatgattaaggagacaggacattgcagcggaattgaaaactattcgagatatttcgatggcagagagcctggtactcgtccgtattgccttcttgatttctttcctaaagattatcttatggttatagacgaaagtcatgtaagtgttccccaaataaatgctatgtatggcggagaccgttcgcgcaaagaatcattggtggattatggtttccgtcttcctgccgctcttgacaatcgtcctttgaaatttgaggaatttcagaagctcgctccgcaagtaatatatgtcagtgcaactcccgccgaatacgaacttgtgcaatcggagggcgtagtagtagaacagttgataagacctacgggattgcttgatccgcaaatagtggttcgtcccgaaacaaatgaaattgatgatcttgttgaagagattcgtgtcagaatagaaaggaacgaacgagtgcttgttactacattgaccaagaaaatggcggaagagttgtcggcatatctattggatataggcataaatacaagttatattcacagtgatgtggacacacttgaacgtataaagataatggaagggttgagaagcggaatttatgatgttcttgtaggagtaaatcttctgcgtgaaggacttgaccttccagaagtttctttggttgctgtgcttgatgccgataaggaaggttttttgcgttctcatcgctctttgatgcagactgccggacgcgcagcccgcaatgtaaacggacttgttataatgtatgcagaaaagataactgacagcatgcaaagcgtaatagacgaaacggagcgtcatcgcttcattcaaatgaaatataacaaagaacacaacattactccaagacaaataaagaaaacaataggtggaaacgaattggtagcccgtgcagattatcacgaagagaaaataagcaccatgacaagtgccgtgaaagttgcggaagacgttgtgcagtataacactcccgctgatataagaaaagctatagaggttacgcgcaaggaaatgactgatgcggcacaccgtatggagtttgaaaaagcagctttactgcgagacaaaataatagaattggaaaagtcgctaaatgaacaaagcaaaaagcatgtttaa

SEQ ID NO: 729 - DNA, 1068 bp, unclassified Prevotella
atgaagaaatataatttcaacgcgggaccgtccatactgccccaacaagtaatcaaagccaccattgacgcttgcactgactttgagaacaccggtctctcgcttatggaaataagccaccgcagcaaagaattccagcctgtcatggacaatgccgaagcacttatgaaagagattctcgacattcccgaaggctacagagtgctcttcctcggcggcggtgccagcacacagttctgcatggtgcctttcaacctcttggaaaagaaagccgcttatctcaacaccggcacatgggcaaagaaagccataaaagaggcaaaactcttcggagaagttgttgaagtggcttcgtctgccgcagacaactatacatatattccaaaagattacacagtacctgccgacgtggactatttccacatcaccaccaacaatactatttacggaactgaaatacgcaaggaactcgacagccccgtactgatggttgcagatatgtcgagcgacgtactttcacgccctgttgacgtatcaaaatacgccctcatctacggcggtgcacagaagaacctttctatggcaggcgtaacattcgtaatagtcaaggaagacgttctcggaaaggttagccgccccatccccacaatgctcgactatcgcacacacattgcaaaaggttcaatgttcaacactcctcccgttgtgcccgtttactgcgcaatgaaaacccttgagtggattaaagaaaaaggcggagtgaaagccatggacagactcgctcacgaacgtgcagacatactttacagcgaaatagaccgcaacaaacttttccgtggcacagtgaaagaagaagaccgttcgctcatgaacatctgcttcgtaatgaacgacgaatacaaagaactcgaagccgacttcatggcatttgccaccgaaaaaggaatggtgggaatcaaaggtcatcgttctgtcggcggtttccgtgcttcctgctacaacgccatgcctgtggaaggtgtgaaagcacttgtggaagcaatgaaagaattcgaagcaaaacattaa

SEQ ID NO: 730 - DNA, 1530 bp, unclassified Prevotella
atggcggtaaaatctctgttttttgttaaatatttcgtctgcaaaattagttgtttggtcggtttgcacaatgatttggtcgattattttagggaaagagaatttacggttgcgcataaaagccttttaatcaatatttttgcagcaaacaaaacaactatcaacaaaacaacgatgaacagacttttgaaaacattattcattatgtttctgccaatgctcgcaggcacggcaatctctgcacaggacacaaaagtatggtctctgcaagaatgcctgaactatgccacggaaaacaacatctccgtgaaaaagagcaaagtcaatgaagcatcagccgccaccgatttaagtcaggcaaaagccgcattgctcccgagcctttcggcaagtatgacacaatctgtcaattatcgtccgtttcaggaaacggcaggcaatttcgtgaacggttccataacctcgagcagcagcaacaaagccaccgaaagcggcagctacggcataaatgcacgctggaacgtgtggaacggagacataaaccaaaacacaataaaggcacgcaaatcagaccttgccgtggcaaaactccagacacaggttgaagccaacaccatacaggaacagataatgcaatattacgttcagatactctattccaaggaagcggtgaaagtgaacaagaacatatattccaaagactcgcttacctacgttcgcggagaggaaatgctgaaacacggaaagatgagccgcagcgaagtgaagcaactcgaagctgccaaaaacgaatcgcaatacaatgtggtcaattcccaaacagtggttgaccaatatcttttggaacttcgccaacttctggaactgcaaccgggaagcagtatggatatttccaccgttagcattgacaacaacgcagcccttgccaacattccggcaaaacttgatgtctacaacgaagcacttcaaaaccgtcccgaaatacttatgggcaaagagagcataaacgcttcggatttgcaactgaaaatagccaaagcaggctacatgcccaccgtaagtctgacagcaggaataggagataaccacatgaccggaacacaaaacaacttcggaaaccagatgaagtacaacctgacgggaagcgtgggagtaacactcagcattcccatactcgacaatcgcgaagccaaaagtgctgtggaaaaagccaaatacagtcgcacaacagcagaacttgacctgcaggacaagcaaaaacagctttacagttccattgaacgttactggcaaaacgccactagcaaccgccagaggtatattgccgcacaaagcaacgtgaacagtcaggaagaaaactataattccattgccgaacagtttaaggtgggactcaagaacgtggtagaactcaccacagcccgtacaagtttgttgcaggccgaacaggaaatgctcgaaagcaaatacaccactgttttgaacacacaacttctgaaattctacagcggcgaaaacatcaacatctga

SEQ ID NO: 731 - DNA, 1455 bp, unclassified Prevotella
atgaaaagaatagttttcttcctgttcgccttgcttttaaccgccacgacacaggggcagaatctgctcacactcgacagctgccgctccatggctcttgcaaacaataaaaggttgcttataggcgaaaaggaaatagaaaaagccggctacgacaacaaggctgcaaaaaccaattacctgcctaaacttaaggcaacggctgcatattttcgcaacagccgtgaaacacatctgcttaacaattccacacgccacaaactgaacaatctcggttcgtcgatagcacaaccgctcgcctcggtggctcaaattgtggaaaaataccaccccgaactgaccgatgcgcttaacgaattcggcaacaacgtgattgacgaattttcgggcgtgggaaagaaaataaacgaaggcttcgaaaccgacactcgaaacatgtttgccggcgcactcaccattacgcagccgctgtatatgggcggaaaaatccgcgcatacaacgaaattaccgactatgccaaacaaatagccgaggaaaaacatcgcggcggggcgcaggaggtggtgctcgaagtggacgaggcatattggcgtgtggtttcgcttgccaacaaaaagaaactcgctgaaagctacgtgaatctgcttaaacatcttgacgacgacatgcaaaagatgattaaggagggagtggcaacaaaagctaacggacttacggtgagcgtgaaactgaacgaggctgaaatgacgcttaccaaagtggacaacgggcttacgctttcgcgcatgttgctttgccagctctgcggcatgcccattgaaagcaatttcacccttgaagacgaacaaaaagagcaattggcaccggttaagaacaatgccgctttcgacatgaaccaggcatacgtcaaccgtcccgagcttcgcagtctggaactcgccacaaaaatctacgacaagaagattcagatagcccgttccgaatttctcccgcaagtggtgctgaccggcaactacatgctcaccaacccgtcggtttacaacggcttcgaaaagaaattcaaaggcatgttcaacgtgggagtaatggtaagcgcgccactattcgagtggggagaaaacaaatataagattcgcgccgcaaaatcagaggcggcaatagcaaaatacgagcttgaagaggcaaaagaaaagattgagctgcaagtgaaccagcaatcgtttcgtgtgaaagaagccgaaaaaactctggcacgcgcacgcaaaaactgcgaaagcgcagacgaaaacatgaaaaccgccaacgcgggattcaaagagggagtaattccaacgagcgaccttcttgcggcgcagacagcctgggtgtcggctcacagcaaggtgattgacgcggaaataaacgcacgcctcacacaagtatatctgaaaaaatcattgggaacactggaataa

SEQ ID NO: 732 - DNA, 2616 bp, unclassified Prevotella
atgagtgtgcgtaaaacaatactactttcattgctgacgcttttgacttttacctgcaatatcaaagcacaaaaagtaagcggtatagtggttgacgcgcaatccggacaaggtttgccatacgtaaatgtattctatgacgggaaaggtgtaggagcaatgtccgacataaacggaaactttaccgtgccataccataaaggctggacacagctttcgttttcttctgttggtttcaaaaagaaaattgttaccatatccggtccgatgaacggactaactgtaaaacttgatatggacgcattagtaataaaaggtgttagcgtaaaaggaaaacgtaagaaatacaacagaaaagataaccctgccgtagaactaatgcgcaaagtaatagaagccaagaaagattacgatctgcgcaaaagacatgattatttcagctatcagaaatacgtgaaacgcacactggcatttaatgactttacagagaaggctctaaatgacgaacactttaagaaaatgccatttctcaaaaatcgtgtagaaacttctccagagacaggaaaattgattcttcctatttctgttgatgaagttttttcaaaacgtatctacaaaaaagacggaaatgtagataagacaataatagaagcaaaaaagaacacaggaataaacgaattcttcacaaccggagacatcctaacaacgttgctcgaagatgttttctcggatatagatatatacaaaaacaatatacacgtacttcaaaaagaatttgtcagccctctttcctctacgcaaggaatagctttctacagatattttatagcagacacattagacattgaagggcaaagatgctgcgaagtaacttttactcctaacaatccgcaagactcgggctttaacggaagtctttacattcttactgatggttcctaccttgtaaaaaaagcagttctcaacattcccaagaacaatgatgtgaatttcgttaatgatatgcttgttacccaaaactttcaaaaacttcccacgggtgaacacgttctcatagacgacaacatgattgtacaaataaatatggtaggctacatcactaaagttcacgtaaaacgaaatactcattacagcgatttttcatttaatcccattcccgataagcaattcaaattttcaggaaacgaaaaaactcttgccgatgctactgttaaagacaaagagttttgggaatcggtacgtccagttcctcttacagaaaaagagagcaccatggacgatttcttgaaagaaatgatgaatataaaaggtttcaaacctatacttttcgttgccaaagctttcatagagaatttcgtggaaacttctacaaatcccgaaaagccttcgaagttcgatattggtcctgtaaacactattatttcaaaaaactttgttgatggttatcgcttgagacttagcggacaaactacagcaaatctaaatcctcacatatttgcaaaaggatatgttgcttacggattcaaagacaaaaaggtcaaaggtatgggcgaagttacttattctttcaatcgcaaagattatttgcccagagaatatcccgtaaacaatcttacttttacatatcagtacgatgacgcttctccttccgacaaattcatgcctaccgacaaggataacgtctttacagctttcaaatggacaaaagtaaaccacatgaactatatgcgtaaatatagtttactttacgagcgtgaatggggaaacggactaagattcacttcgcaattcaaacacgaagacacagaacctaccgccgcattattctatcaacctctcgacggcaatgatgcgccttctcaagaccgcagtctttataagcgcaatcttaaaaacacggagattatgttaggattacatttccagcccggtgcaacatatataaacaccaagcagagacgcatgaccacaaatcatgatgcgcctatttttgagcttcagcacagcatgggacttaaaaatatctttggcggagaatataatcacaatcttacagaagccgaaatatacaaacgtttccaactttcaacctggggaagaatcgacacttacctcaaaggtggtattgaatggaacaaagttccgttccctttactcattatgccggctgcaaatctttcgtatataaaggaaagagaaacctttgcacttatcgacaacatggaattcctcaacgaccgttacgtttctctcatgacaagttgggatatgaacggaatgattttcaacagaattccaatacttcgcaaattaaaatggcgtgagtacattggcgtaaacatgctttggggatcgctttccgacaaaaacaatcctttccttgaaaagaacgcaaacgacagtagacttttctattttcccggagaattcaacagcgaaggaacttttgaataccaaagtcatttgatggacaaaaacaaaccttacatagaatggatagccggaatacataatatatttaagattgtccatgtggaatatgtcagacgagtaaactatttccgtcccaataccaagaaatggggcatacgcttcatgattagaatgacattctaa

SEQ ID NO: 733 - DNA, 1071 bp, unclassified Prevotella
atgaacaaatcattcatattttcctgcctgttggctctcacaagtgcaggtgtttcagctcaaaccgaggttacgccatacactccgggcataacgccggaaggaattacctattatcttccgcgaacagaattaagaatcagaataaccgccacctgcgtcaaatatactcccggagatttcagacaatactccgaacgttacctgcgattaggcaatattcccaaagacgcagccactacatggaaaattgatgacgtaaagattttcaccgaaggcgttcccgacgaaagcaaagtgttctctataaaactggctcagaagacttccgcgccgcttgcagggcttacgaaatcaggaatactgatgtcgataaacgcacaagccacggctcccgaagcaattcccgaaatgccgaaacctgtcattgtgaacaataatttgaatccccgggattatatgacacaggagattcttacggcaagcagcatatcaaaacaggcggaacttacggctgcagaaatctacgacatacgcgagtcgcgctcggctcttgctaaaggcgaagccgacaacatgcctaaggacggcgaacagctgaaacttatgattgacaacctgaatacacaggaacgagccttactacagttgttcaaaggcacggaaactacagaaacacgctcatttgattttgtttatatccctaccgaggacaaagaggaagtactctttcgtttttcaaagaagcttggcgcggtcaatgcggacaatcttgctggcgaacccatttatattagcataaaggacaaacatacagttccgactcctgcggttacggacaagaaaaagaaagaagttatggacgttcgttataatgttccgtccgaagtggaggttaagattttcaattccgataaagtttttgcctcgggtacatatcccatgggacagtttggcaatgtggaacatctcggagcggagcttttcaacaagaaaatggaaactcaggtgtttctgaaccctgttacgggcggaatagagaaaattcagctgcccgaaccctcgaaataa

SEQ ID NO: 734 - DNA, 1479 bp, unclassified Prevotella
atgccgcgtgtgcgccagatagcgcgttacgcctctgaaacggaggagattcagcgcggagtgctgagacatctcgtatcgcaagccgcacaaaccgaatggggcaaagcccacggctacgacaacataaaatcatacgaagattttgccgcccaagtgccggtgagcacctatgaagaaacaaaaggctacattgaccgcatgcgccacggcgagaaagatgtgctttggaaaggaagcgtgaaatggtatgccaagtcatcgggcaccacaaacgacaagagcaaattcattcccgtgagtgcggaaggactgaaacgcatacactacgccggaggacgcgatgccgtggcactgtatctgcgcaacaatcccgaaagccgcatattcgacgggcgcacactgattctcggcggaagccatgcgccaaactgcaatcttccgggcagtcttgtgggcgacctttcggctattctcattgaaaacatcaatccgctggtcaacatgataagggtgccgaaaaaacaaacggctctgctttcagacttcatgaccaagcgcgacctcatagcccgcgaagccattaacaagaacgtaagcaacataagcggtgtgccttcgtggatgctttcggtgcttgaccgtgtgctcgaaatctcgggcaagagccacataaacgaagtttggcccaacctcgaggtgttctttcacggcggtgtggctttcaccccctatcgcgagcgttacaaacaaatcatcacgagttccaaaatgcactacatggaaacctacaacgccagcgagggatttttcggacttcaggacgacccttccgatccggcaatgctgctgatgatagactatgacgtgttctacgagttcatacctctggaagaagttggaaatcccgaggcaaaagccgtggcattgtgggatgtggaaaccgggaaaaactatgccatagtgatttcaacctcttgcggactgtggagataccaaataggcgacaccgtgaagtttacttccaaaaatccgtacaaattcataataagcggaagaaccaagagcttcatcaacgcctttggcgaagaactcatggtggacaacgccgaaaaaggacttgcagaagcatgccgcgaaacaggtgcgcaggttgccgaatacaccgcagcccccgtgttcatggacattcacggaaaatgcaggcatcagtgggttatagaatttgcaaaacgccccgaaaacatggatgtctttgccgaaaaactcgacaaggctctgcaaagaatcaattccgactacgaggcaaagcgttcgaacaacgtaacactgcagcagctcgaaataaccgaggcaaaaccgggacttttcaacgaatggctcgcaagcaaaggcaaactcggaggacagcacaaggtgccccgcctgagcaacacccggaaaataattgacgaaatactgtcgctcaacagcaaatga

SEQ ID NO: 735 - DNA, 711 bp, unclassified Prevotella
acgaatatttatgcattcgttttttgtgttcacgccgacctgttttcgattgaaattttaccggctcctgcacaccctgacctcaaaaaatattgctacatttgtccgtgttcaaaaacaaacctaaaacctgttgaaatggaaagaatgaaaagtttcggatcaaaagcatggcttttgccgcaaccggtactgattataggcacatacaatgaaaacggcgaaccaaacgctatgaatgcggcgtgggcgggaacttgggactatcacgaaataatgatttcgatgggagcccatgccacaacggaaaatctaaatcgctgcaacgaattcacggttgcatttgcaacggcagagacactcgtagcttcggatttcgtgggtattgtgagtgcaaagaaagacaaggacaaaatgaagaaagccggatggaacgcagtaaaatccgaaaacatcaacgcccctgttttcaccgattttcccatgaccatggaatgcagaataaaacaaaagctaaacgaatcggaaagcggttactatataatagcggaagtggtgaacattctctgcgatgagaaatatcttgccgaagacggtaagcccgacacggagaaaatgaacctcattacctttgatcccatacacgacaattacatacagctgggcaaaaaagcaggaaatgctttcgaagatggcaaaaaactgaaataa

SEQ ID NO: 736 - DNA, 1038 bp, unclassified Prevotella
atgcttgaagatacatttgatatacgtaccgaacagacaggttctccgcaagaacgtgaatatgaaaacacccttcgtccgttgagattcgatgattttgccggacaaaagaaagttgttgataatttgcgtgtttttgtggaggcggcacgtcgtagaggtgaaccgcttgaccatacattgctgcatggtcctccaggattgggaaaaactactctttcaaatattatagctaatgaactgggtgttggtttcaaacttacatccggtcctgttctcgacaaaccgggcgaccttgcaggtctgttaacgtcgcttgaggctaatgatgtgctatttattgatgaaattcacagacttgctcctgttgtggaggaatatctttattccgccatggaagatttccgcattgatataatgatagataaaggaccttcggcccgtagtgtgcagataaatctaaatccgttcaccttgataggcgcaacaactcgcagcggtttgcttacagctccattgcgtgctcgttttggtataaatctgcatcttgaatattatgacgcttcggtattgtctcaaattgttgtgcgttcttcacacatacttaatatggatatagattccgaagctgctgatgagatagcttcgcgcagtcgtggtacgccgcgtatagctaatgctctgttgcgtcgcgtcagagattttgcagaggtgaaaggctcgggcagaataaatcttgaaattgctaaagttgctcttgaggctttgaacatagaccgatacggattggacgaaatagataacaagatactcacaactataatagacaagttcaagggcggtcctgtaggaatttctacgatagctacggctattggtgaagacgcaggaacagtggaggaggtttatgaaccttttctcataaaggaaggatttatagtgcgcactccgcgtggcagagaggttactgatcttgcttatcgtcatcttggacgtatgccgcaaaacagagacaatactccatctctcttcgattga

SEQ ID NO: 737 - DNA, 1764 bp, unclassified Prevotella
atgatacgtttgggatataaatataaattactgctttcgttcacaggcatctttgcggtgtttgccgtggtaatggttcttttcgaaatgcactatgagcgcgggcttcgtataggcgacttccgtaaccgtatgagcgactatgccgatatggtggggcgcgaaataagtcaaagcggcggagtgctcgactcggcaagaatgaaaatgttcctccagtgccttccaagtgaggtaagattcaccgtcatagaccgcaaaggctatgttgtttatgaatcgggcaatatgaatgggcgcgtggagggaaatcatgccgaccgtcccgaggtttccaacgccatgaaggtgaaaaccggcagctatgacgttcgtcattcggaaacactcgataccgatttcttttatttcgcaaaagcttacggcaattatgtggttcgtgttgcccgtccctatgacgagggagtgcgaaacattctccgccctgccaatgtgtttctgctttttgttcttttggtgcttcccatagccatagtcatacttatatatatatccgacagtttcgggcgttcggtttcgcgtctccgtcgtttcattgacgaagccggaaagggcggaataggttacgatgaaatcagtttccctcattccgagctcggcgacataggtcgtgaaatcatgaatctgtatcgcaaactcgacgagaaaggtcgtcaggcaaagacggagcgtgagcggcttttgaaacattttcagtatcttgaaggcggaattgccattttcaacaccgagaaaggcattgtttatgccaatccgcgttttgtgcaatatgtaaattccatacttcctgtgcctacgggcgatgtcaataccatttggactaacgacgttttccgtcctgtcagcgagtttgtgggactcaacagccgcgagctcagccccggcgaggcagctcctgtgatgcgtttcaatatttcggcgggcagtgcgcattatgctgtacaggtagtggtttacaacagcagtgattttgaaatgactctgtacgatgtaacgcgggcagagaaaagtcgcattctgaaacagcagatgagcaacaacataacccacgaactccgcactccggtgagcagtattcggggatatatcgaaacaattctcgagtgcaagggcttgtcggacgaccgcaaacgctattttctcgagcgtgcatacactcaggtcataagactcagcgaactcatccgagatgtagccataataacaaaagttgaagaggctccggaaaccatgcacaaggaaactctgatgccgtgtgagattgtaaacgatgtgattgaggaattggattcgaaaataaaggatgccgatatgcaggtttacaaccgcatcgaccccgaaataaagattttcggcaactattcgcttgtctattccatttttagaaaccttgtggaaaacagtgtacgctatgccgggcggggaacggaggtttgcgtggaatgttacaattccgacgatgatttttgctattttaatttctacgacacgggcaaaggctgtcccgaggagcatctgccgcgacttttcgagcggttctatcgtgccgaagagggtcgcacgcgcgaacttggcggttccggtctggggctttccatagttcgcaatgccgtaacctttcatcatggcaacatttcggtgcgcaatcgcaaggaaggcggtcttcgtttcctcttcaccctgcaaaggcacgaaatgaaatga

SEQ ID NO: 738 - DNA, 1119 bp, unclassified Prevotella
atgaaaacgtatcttgttacgggagccgccggattcatcggcgcaaatttcataaagtatatgctgcgcaagcacacggacataaaaatcgtggtgttggacgcgcttacatacgccggcaaccttggcaccataaaaaacgacatagacaacgagcgatgcttttttgtgcgtggcgacattggtgatcgcgcccttgtttcgaacctttttgcagagcataactttgacgtggttgtgaactttgctgcagaaagccacgtggaccgaagtatagaaaatccgcaggttttcctcaccaccaacatcctcggcacgcagaacctcatggactgtgcacgcaaggcatggaacaccgggaaggatgcgagcggctatcccacatggcgcaagggtgtgcgtttccatcaggtttcaaccgatgaagtttacggggcactcggagccgaaggtttctttcgcgaggacactcctctctcaccccacagcccatacagtgcttccaaggcaagcgcagacttcattgtgtgtgcatatcgcgacactttccactttccggtaagcattacccgctgctcaaacaattacggtccataccagtttcccgaaaaactcatacctttaatcatcaacaacatacttgaaggcaagaaacttccggtatatggcaaaggtttgaacgtaagagactggttgtacgtagacgaccactgcaaagcgatagacttggtggtcaacgaggcaccggacggcagtatatataatgtaggcgggcacaacgagcagaaaaacattgacatcgtgcacctgataatagacatcattcgccgcacaatggagcagcgtccggagttccgcagtctgctggtcaaaagcgacgacttgtcgtggattaactacgacttgataacctacgtaaccgaccgtctggggcacgacctgcgttacgccattgaccctgcaaagataaaaaaagacctgggctggtatcccgagaccacgtttgccgtgggaatagagaaaaccgttttgtggaatctggaaaaccgcaaatggattggcgaagttacttcgggcgattaccaaaagtattacgaacacatgtacggcaacagatag

SEQ ID NO: 739 - DNA, 2622 bp, unclassified Prevotella
atgaaacatataaagaatacagccatattgattgcagcacttttagcagctgcaaccttttgccgtgcttccgtgtcgcgagacagcgtgattgttaagcccgacatcatttactccatgcaacagaacaactatattctcggcggattcatagttgacggcgtggcaaactatgacgaggaactcttgcgcaatatttcggagctgcgcgaagggcagactctgacaattccgggcgcagacattacaaacgttttgcaacgttattggaaacaaaagatattcagcgatgtttctatctctgcagacagtatcgtgggcaataaaatttatctgcatataaaacttaccgcacgcccaaagatttctacgataaactatcacggagttaagaaatcgcagcgcgaagatctcgaacaacgtctcggacttaaagccggaagtcaaatatctccggacatcgtggaccgtgcaaaaatcataataaaacgctacttcgaagaaaaaggttatcaaaacgccaaagtagaaatgttgcagcaggacgacgtatcggctgcgaaccaagttatagttgatataaacatcgacagaaacgaaaagattaaggtaaaacacatttactttaccggcataaagcagggaaacgtaaagaaactcaagaaggcgatgaagaaaacccacgaggttaataagtttgccaatctgtttcgcgccaaaaagtttctgcccgaagaatacaagaaagataaaggtttcttgatagacaaatacaacgaatggggctttagagacgcaatcataaccagcgacagcgttacgccttacgacgaaaagcacgttgatttgcatattaatattgaagaaggtcagaaatattatctgcgcaatgtgagctgggtgggaaatacagtgtatagttccgaatcgcttgcccgtgcactaaaaatgaagtccggcgacgtttacaaccaaacctttctgaaaaaacgtttgaacgatgacgaagacgcaataggcaatcaatattacaacaacggctatgtgttttacaatctgaaccctgtggaaaccaacatagacggagattccattgatttggagatgcgtatttacgaaggacagcctgctactcttaaccacgtgcgtatcagcggaaacaaaagagtttatgaaaacgttgttcgcagggaacttcgcacaaaaccgggcgatttgttcagcaaagaatccgttatgcgttccattcgagaccttgccgcactaaacttctttgatcccgaaaaaatagaaccggacataaagcccgatcaagagaacggaacggtagacataaactataaactcgaacccaaacccagcgatcaggtgcaaatatcctttggttggggtccgacaggtattgtgggaactgtgggattgaagtttacgaacttctccatgcagaatcttttcaacagcaagaaccgtcgcgctctcttcccccaaggtgatgggcaacagctctctctttcagcgcaaacaaacggtacatattaccagaattactcgtttaacttcctcgatccctggtttggcggcaaacgtcctaactctctgtcgctttcagcctttttctctaagcaaaccgatgtaaacagcaactactacaacagttcttactggaacaactaccaaagctatttgtacggttatggaacttcgggcggatattacaataactacaactactacgaccctgacaaatatgtcaagatatacggtgtttcattaggttggggcaaacgtctgcgctggcccgacgattatttcacacttactgccgaagcaactttccagagatatgacttgaaatcgtggcaatacttcattatcaccgacggaaactgcaacaacttcaacttgagcctcagcctttcgcgcaactccgtagacaatcccattttcccgcgtagaggttctgatttccagctttctgttgccgccactccgccctattctctttgggacggcaaggattacaagaatctcgccagagattatcgcgcagcttcctataacaaggagatgcaggagaagtatcgttgggtggaatatcacaaatggaaattcaaactccgcacctacacggcacttacaggcaaaaacaaatgcccggttctcatgacgcgcaccgatttcggcttcctcggtcattacaacaagtacaagaaatctccgttcgagacattctatatgggtggtgacggtatgtcgggatattcttcgggatatgccaccgagactatcggtttgcgcggatacgaaaacggatgtctcactccctacggagcggaaggttatgcctacagccgtatgaccgtggaacttcgttaccctcttatgctcaaaggtcagactaacatctacgcacttgcatttgccgaaggcggtaatgcatggtacgacacaaagaagttcaatcctttcgacatgaaacgctctgccggtgccggtgtacgtcttttccttccaatggtcgggcttatgggcattgactgggcatatggatttgacaaagtgttcggttcttcgaaaaacggcggctcgcacattcacttcataataggtcaggagttctaa

SEQ ID NO: 740 - DNA, 993 bp, unclassified Prevotella
atggctgttacaatagcagaaatccaaaaacttcgcaaacttaccggtgcgggaatgatggattgcaaaaaagctctcgaggcttctgaaggcgatactcaaaaagccatcgaaataatccgcgaaaaaggtcaggctgttgctgcaaaacgttccgaccgtgaagcttcggaaggatgcgtactcgttaaatatgctgacggcttcgctgcgattattgccctaaagtgtgaaaccgacttcgttgccaataatgcagactttgttaagttgacacaggacatcattgatgctgccgttgcggcaaaggcaaagactcttgacgaagttaaggctttgaccatcggaaacgagaccgttgaatcagcaatcgttgctcgcagcggtatcaccggtgagaaaactgaacttgacggttacacctatatcgaaggcgacaacatttctacttatgatcatatgggcaggcacactctctgcaccatggttcagctcaacaaaaacaatgaagatgctgctcacaagcttgcaatgcaggttgctgcaatgaaacctattgcacttgacgaggcttctgttcccgaagaggttaagaaatcagagtttgaagttgctgttcagaaaacaaaggacgaacaggttgaaaaagcagttatcaacgctttgaagaaagccggaatcaacgcaaatcttgttgacagcgacgaccatatagaatcaaatatggcaaagggctggcttagcaaggaagacgctgaaaaagctaaggaaatcaagcagactgttgctgcagagaaggctgcaaatcttcccgagcagatgattcagaacatcgcaaaaggtcgtttggcaaaattcttcaaggagaattgccttgtagatcaggaattccaattcggcgatgagaaagaaagcgtttcggcatggctcaagaagcaggacaaagacttgcagattgtaacatatcgccgtttcactctcgctgcagaataa

SEQ ID NO: 741 - DNA, 987 bp, unclassified Prevotella
atgaacgtcggtaatcagcgtatgataaaggtaggaattgtaggcgcggcgggttatgcggcgggcgaacttataagagttttgctcaatcacccgcaggcggagattgttttcgccaattcggggagcaatgcgggaaatcttttctcggatgtccatgaaggtttgctcggagataccgattttcgattcaccgacgagcttccgtttgaaaagattgacgttttgtttatctgcctggggcatggcaagagtgaggaattccttaaaaacaatcccgtgcccgcgaacgtaaaaatcatagactttgctcaggatttcagaatagcagctccgggaaacgattacgtttacggtttgcccgaaacccatcgctctctcatagccaaggcacaacacgtagccaatccgggatgttttgccacctgcatacaactcgcgctgctgccgctggctaaggcgggagtcttgaagggagatgttgtgatcaatgccataacaggcagcaccggtgcgggagtaaaaccgcagcccaccacacatttcagctggcgcaacggaaacatgagcgtttacaaggtgttcactcatcagcatttgcttgaaataaaccaaagcatcagagaatttcaacccgatttcggaggagatttggattttgtgccttatcgcggcgactttgcgcgcggcattttcaccaccgtcttcatgcgcaccggattgtcgcaggaagaaatcgacaaatgttactcgatgtatgcaggagaaccgttcacccactacgtgtctcgcgacattgacttgaaacaagtggtcaacaccaaccgcgcacttgttcatgctcaaaaatatggcgaccgtctgctcgttacgtcggtcatcgacaatcttttgaagggtgctgcgggtcaggcagtggagaatatgaacatcatgttcggcattgccgaggatgcgggacttaaactgaaggctgcggctttctaa

SEQ ID NO: 742 - DNA, 1695 bp, unclassified Prevotella
ctaacaatggctgaaaaaatagttatatatcaggttttaccgcgtctttacggcaataagaataaaagattagtgaaaggtggcacgaagagacaaaacggttgtggtaaatttgcttctttcactcaaaaacgtttggaagacataaggaatttaggtgcaactcacatttggtttaccggaatactcgaacatgctacgcaaacagattattcgaaatacgctataaggaaagacaatccttctttggtaaagggacttgcaggttctccttatgccattaaagattattatgatgtagatccagatttggctgaaaatgtaagcaagcgaatcaacgaatttgaatctcttgtaaataggacacatcgttgcggcttgaaagtaatgatggattttgtgccaaaccatgttgcgcgtcaatattacagtgattcttctcctaagggagtagaaaattttggagaaaaagatgatgttacgaaaaacttttcttcgggaaataatttctactatatagaaaatacttcattccatagtccgcaaagtgaaaacggaaacgaaaagtattacgaatctccggcaaaagcaacgggaaatgattgtttctctccgaatcccggcaaatttgattggtatgacaccgtaaaattaaattatggggtggactatattgacggtggaagcaaacattttaatccaattcctaacacttgggaaaagatgtatgaaatcttaatttattggagtgccaaaggagtagatgcttttcgttgcgacatgagtgaaatggtgccggtagaattttggcattgggctatatccaaagtgaaagaagcatatccgagtgttatgtttgttgcagaaatatataatccgtttctctacaattcatatataaactatggagggtttgattatctgtacgacaaagtaggtctttatgacaaattacgcgctgttattgtcgggcacagtcctgcaaatgaaataacaaattgttggcaacgtttgggagaacttcaaaagaatatgttgaattttatggagaatcatgatgagcagagaatcgcttccgacttttttgcaggaaatgcaaaatgtggtaaacctgcaatgattgtttctgcattgatgaatgttaatcctgtgatgatttattccggacaagaatacggcgagcggggaatggattatgaaggatacagcggtatagacggacgtaccaccatatatgattattggtctcctctgaaaatcaggaaagctttgttctatcctcaagaattgacggaggaagaaaaagaattgaaggaattctatacggtattgctaagtaaagtatgtaagaataaagcagtttcttctggttacttttttgatttgacttattgcaacctttctgactattcaaaatatccttttgataagttgtattcgttcttgcgcaaaaaaggaaaagaattacttcttgtagttgcgaactttgatggcaattcgcgtggcgcgtatgtaaaaattcctgcacacgcgtttgactatatgaatatagaagaaggtatgtacaagtgtaaaaatattttggattgtaatgcaaatgcaatatcagaacatcttgtgccggaatgttctataagagtggaagttcctgctttatccggtcttgtcttgcgctttgtcaaacaaagttgttaa

SEQ ID NO: 743 - DNA, 1185 bp, unclassified Prevotella
atgaacagtaagaacataacgctaaaacgcggcaaagatgcaagtttgaacagatttcacccgtggatattctccggcgcgattgctaaaatgaacaatggcataacagacggagatgtagtgaaagtttataacagcgaaaacaaatatgtcgccacaggacattaccaacgtggctctatagctgtaagagttctttcattcaagaacgaagaaattaatgccgatttctggcacgaccgcataaaaaaagcatttgatttgcgtaaaatcatatttgcaaacaatcccgacactgacactttccgacttgtacatggcgagggcgacaatctttccggacttatagttgacatctatggtgcaactgccgttatgcaagctcatagcacaggaattcatttttcgagaaacgatattgcccaagccataattgatgtcatgggaggcaaagtttcttctgtgtattacaaaagcggaactacacttccttttgtggaagaaaccgacgaacacgatgggtttctaataggaaaaacggcagaaaacgttgctttcgaaaacggattgaaatttcacatagattgggagagaggacaaaaaacaggcttctttgttgatcaacgcgacaacagaaaactaacggaaaactacgcttacggtaaaaaagtattgaacatgttttgctacacaggagggttttcggtttacgcattgcgtggaggagccaaactggtgcattcagtggacagttcagccaaagctattgacattacaaatcaaaatgtagaattaaacttccccaactgcaataatcaccaagcatatgccgaagatgctttcaagtttctgcaaaacatggaaaaagatgcgtatgacttcataatacttgatcctccagcctttgccaaacatcttaacgcagtaaagagtgcgttgcgcggatatacaaggctaaatcaaaaagccattgaaaaaatatcatcgggaggcattcttttcacattcagttgctcacaagcagttagcaaggagcaattccgtcttgcggttttcactgcagccgctcaaagtggcagaaaagtgagaattatccaccaattgcatcagagcgcagaccatccaataaatatttatcacccggaaagcgagtatttgaaaggtatggctttatatatagaatag

SEQ ID NO: 744 - DNA, 990 bp, unclassified Prevotella
atgaagtactccgtaattattcccgtttacaaccgccccgccgaggttggcgagctgctcgaaagcattgccggacaaccgcgtcccgatgtagaaatcataatagttgaagacggctcgcaaacaacctgcgaggaagtcgtggcacgctttcaaaaccgtctgaacatcacctatctaaaaaaggaaaacggaggtcccgccgccgcacgcaattatggtgcgcagcaagcctcgggcgaatggctcataatacttgacagcgacgtggttttgcctccgggatatttcgaagccgtggacagcggaacggaaaaccttggttgcgatgcctttggcggacccgacaaagccgccgactcgttcacgcccgttcaaaaagccataagttacgccatgacatcgtttttcaccaccggaggtataaggggaggaaaaaagaaaatggacaagttctatccgcgctcctacaacatgggtatcaggagcgaagtttacagaaaactcgggggatttgccaaaatgcgtttcggagaagacatagatttcagctatcgcattgtggaaaacggctacaaagcgtgtctcatacccggggcttgggtatggcacaaacggcgcacggatttcagaaagttcttcaaacaggttcataactcgggcatagcgcgaataaaccttgaaaaacgccatcccggaaccatgaaactcgttcacatgctccccgcagcattcaccataggctgcctcgtattcattgcaggcgcgttcttctgcctgtggagctttctgccgctgatgctctacgccctgttggtgtttttgggaagcctcgtccaaaacaaaagactaaaaggggcgtggctgtccgttcccgccgcattcatacagctcaccggctacggcacgggcttcatagtggcatcggtgcgccgatacattctgaaaggtaaggaatttgaggcgttcaaagacaatttttataaatga

SEQ ID NO: 745 - DNA, 1455 bp, unclassified Prevotella
atgacaaaagtaaaaatggagccggcggaagtgtttgcctgttttgcagaaataaataagattccgcgtccttcaaagaaagaagaaaagatgattgagtttctgaaaaactatggcgagaaactcggtttggaaacaaaagttgacgaagtaggcaatgttataattcgtaagcctgctaccaaaggctatgaagacagagaaacaaccgtaattcagagccacatggacatggtttgtgaaaaggattcgaatatcgagttcgattttatgaacgatcccataaatacagaagtagatggtgaatggctaaaggcaaaaggtacaactcttggtgcagatgatggcattggagttgccatggaacttgctgttttgaaagatgatagcatagaacacggacctttggaatgtgtttttactcgtgatgaggaaacacaacttaccggtgcaagtggcatgaaatccggttttatgacaggcaaatatcttttgaatcttgacagtgaagacgagggcgaaatttttattagttgtgccggtggtgcaagtactaaagccgttttccattttaatatggaagaagccccaaaagattattatttcttcaaggttggtattagcggactcacgggaggacattccggagatgatatagaaaagaaacgtgcaaatgcaaataaactgctcgttcgcttcctttataatgaaatgaagaagtttgatctgcgcatttccgatattcaaagcggaggtctccataatgctattcctcgtgatggttgggcagtttgtgctgtgcccatgaaagacaaggaaaatattcgcattgacgcaaatgtatatgtttccgaaatagaagaggagtattctgtaacggagaagtctttgaagttctatgtggagagtgcagatgccgcagatgtaatagagaaagagtgcgccaagaagataattgcttctttgcaggctgtagacaatggtgtttttgccatgtctcaagatatagattggctggttgaaacgtcgtcaaatcttgcaagtattcataagaatggcaatgaaatagaaattgttacttcgcagcgctcaaatattggtagtgcgcgcaagaatatgagcgcaactgttgccgcagctttcgaattgggtggggcagaagtgtttactactgacggataccctggttggaaattaaatcccgatagtgaattattaaaacttgcggttgattcgtacaaacgtctcttcaataaagaaccgaaagtccttgccatacacgcaggtttggaatgcggattgtttagtgagagatacccgcacatggatatggtttcttttggtcccacacttcgcggcgttcactcgccggaagagaaattgcttataccgacggtagaaaaagtttgggatttccttcttgaaattctcaaaaacatacccaagaaaaagtaa

SEQ ID NO: 746 - DNA, 1767 bp, unclassified Prevotella
atgtacagaacaaaaacatgcggagaattgcgcctgagcgataccggaaaagttgtaacgcttgccggctgggtgcagcgcattagaaaaatgggtgtgttgactttcgttgacctcagagaccgatacggaataacacagcttgtatttaatgagaacgaaaacaaggaactttttgacaaagccaattctcttggcagggaatatgtgattcaagccacgggaaaggtgaatgagcgtagttcaaagaatgaaaaaatagacacaggtgagatagaaattatcgttagtgagcttaatgttctgaacgaaagccttgttccgccgtttacaattgaagaaaacaccgacggaggtgatgatttgcgtatgaaataccgctatctcgatttgcgacgcgccaatgttcgccgcaatcttgagttgcgccacaagatgtgcattgcaatacgtcagtttctcgattccaagggatttcttgagatagaaactccggtgcttgtgggttccactcccgagggagcaagagattttgtggttccttcgcgtatgaatcccggacaattctatgctttgccgcaaagtcctcagactttgaaacaacttcttatggttgcgggcatggacagatacttccaaattgtaaaatgtttccgcgatgaagatttaagagccgaccgccagcccgagttcacgcagattgactgcgaaatgagctttgtggagcaggacgatattatatccatgtttgaggaaatggctaaatatctgttcaagaacgttcgcaattacgatcttggcagtgaacctttcctgcgattgccttggattgatgccatgcgccgttttggcagcgacaaacccgatatgcgtttcggaatggagttcgtggaattggcagacactttgaaagatacgggcgaatttgccgtgttcaattccgcagaatatattggcggcatttgtgcaaagggctgcgccacatatactcgcaagcaactcgaccagctgaccgactttgtaaagagtccgcagataggtgcgaagggtttggtctatgccaaggttaacgctgacggtagtgtgaagagttctgtggataagttttattcgcaggaggttcttgagaatctcaaaaacaaaatgcaggcggaaccgggtgatttgttgttgataatgagtggtgatgatgccatgaagacacgcaagcagcttggtgttcttcgccttgaaatggctgacagattgggcttgcgcgacaagaacaagtttgctcttctgtgggtagtggacttcccgatgtttgagtggagcgatgaagaaaatcgtttgcttgccatgcaccatcctttcactatgccgaagcccgaagatatacccatgcttgacacaactcccgaaaaggtacgtgccaatgcctacgacatggtatgcaacggcgttgaagtgggcggaggttccatacgtattcacgacagtaagcttcaggcaaaaatattcaagactctcggttttactcccgagcgtgcgcagcaacagtttggcttcctaatgaatgcctttaagtatggcgcgcctcctcacggaggacttgcttacggtcttgaccgttgggtttcgctctttgcgggacttgacagcatacgcgactgcatagctttccccaagaacaattccggtcgcgacgtgatgctcgatgctcctgccgaactcgatgcttcgcagcttgaagaactgaaaatcagtgtggtaaaagaagaaaagtaa

SEQ ID NO: 747 - DNA, 561 bp, unclassified Prevotella
atgtttgatgtgaagcaatgtctcaacgacagcgagaaaaaaatgtcccaggctgtaaagcatcttgaggaaactttggcgcgaatacgcgccggaaaggcaaatgtggaaatccttgacgaggtaagagtggaaagctacggcaccatgatgcctctaaatcaggtttcggcagttaccacgcccgatgcacgcaccattgccataaaaccgtgggacaaaagcatgatgcgtcccattgaaaaagccattatagactctaacgtgggaatcatgcccgataataacggcgaaataatccgacttaccattccgcctctcacggaagaacgccgcaaagagcttgcaaagcagtgcaacagggaaggagaaactgccaaagtaagcattcgcaatgtgcgccgtgagactatcgacaaacttaaaaagtcaataaaggacggagtaagcgaagataacgaaaaagatgccgagcaaactttgcagaaactgcacgacaaattcataaaacaggttgacgaacttcttgcaatcaagaacaaggaaataatgaccgtctga

SEQ ID NO: 748 - DNA, 2418 bp, unclassified Prevotella
cttcctgatgtgcgtgacggatttaagcccgtacaccgcagaatactttttggtatgatgggattgggcaatactcatgacaaaccttacaagaaagctgctcgtatcgtaggagaagtgcttggtaaatatcacccgcatggtgattcttccgtttacggtgcccttgtacgcatggcacagaattggaatatgcgatatactctcgtagacggacacggaaacttcggaagtgtcgacggagactctcctgcagcaatgcgttatacagaagcccgactgacttctttaggagaagccatgatgagagacatcgacaaagaaaccgttgatatggcgaacaactttgacgatactcttttggaaccgtcagtaatgcctacacgaatacctaatcttcttgttaacggagcaagtggtattgccgttggtatggcaacaaatatacctacacacaacctaagagaagttattgacgcttgcgatgcatatatagataacccagatatagatgttgacggactaatgaaatatataaaagcccccgacttcccaacaggaggctttatatacggaatgtctggagtaaaaagcgcttacgaaacaggacgcggacgcgtagttatgcgtgcccgtgcagaaattgaagccggtgaacagcatgacaagattgttatcagcgaaattccatacggcgtaaacaagaaagaacttattatttatattgcccaactggtaaaagaaggaaaagttacagggattagtaatgtaaatgacgagagcgaccgtaagggtatgcgcattgttgttgacgttaaacgcgatgccaacgcaaatatcgtactcaacaaattatttaagctaactgcactgcaaacgagtttcagtgtgaattgtatagcacttgtaggcgggcgtccaaaacttttatcgcttaaagattgcataaaatattttattgaccaccgacatgatgttgttatacgccgtacaaattatgaaaagaaaaaagcacttgaacgcattcacattcttgacggtttgataattgccagcgacaatattgacgaagtcattagaattatcaaaacggcaaaaactccgcaggaggcaatcgaaaatctttgcaagcgttacgaacttgacgaaatacaagcacgcgcaattgtagaaatgcgtcttcgccaacttacaggacttttacaagagcaactccatgcagaacacaaagaattggaacaaaaagtagaatattacaatcagattttgcatgacgataatgtttgccgtcaagtaataaaagacgaactcatcgaagtaaaagagaaatatggtgatgaacgccgcagcgaaatagtatatggtaatgaagatttcaatccggaagatttcttttctgatgatgaaatggtaattactctaagccatatgggatatatcaaacgtactccgcttgcggaatatcactcacagggacgcggaggcgtaggaagtcgtggcggcagcacacgagacaaagactttatagaatatatgtatcacgcaacgatgcacaacaccatgttgttctttactcaaaaaggacgttgctattggctgaaagtttatgatattcccgaaggaatgaaaaattccaaaggtcgcgccatacagaatatgctcaatttagctcctgacgacaatgtaaatgcttgcctttatataaagaatctttccgattctcaattctgcgacacacattatgttgttttctgtacacagaatggcattataaaaaagacaagtctcaaagaatattccagaccacgcacaaatggtataaacgctatcaacattcaagaaaacgataaagtggtaagcgtttgtctgactcgtggagacgaagaaataattgttgcaaataaagaaggacgagccattcgattcaacgagcaaaccgttcgtacaatgggaagaaacgcaactggagttcgcgccatgcgaatagatgaaggagacgaagtcattggaatggttagtgtttgtaatcctgaaaaagacactgtactcgttgttagcgaccaaggatatggtaaacgcagtgatgtagaagactaccgtattacaaatcgtggtggaaaaggagtaaaaacaatgaacatcacagacaagactggtaaacttgttgcactgaaagttgtaaacgacgaagacgaccttatgataataaatgtcagtggtataactcttcgtctacatacttccgacattcgagttatgggacgcgccacacaaggtgtacgccttataaatctctctaaacgcggcgacacaatcgcaagtatatgccgtgttccaagagaagacgaagaaaatatcaatgcggaaacctccgaagcaacaacagaagatagcgatcatccggaaaatgacaattaa

SEQ ID NO: 749 - DNA, 1308 bp, unclassified Prevotella
atgggcttgggaaatgaaaaaacttttatctttgtaaatggtataacaggctatagaaaaatgaagataatacatactgccgattggcatatcggaaacactttctacggttacgaccgctccgacgaacatcgccatttccttgatttccttctcagagtcataaaggagcatgaggctgacgctcttgtggttgccggtgatgtttttgacaatcccaatccttcggcagaggctcagcatatttattatgactttctcagtcgcgccgtcagtgagaatccgggtttgcagatagtggtaattgccggaaatcacgatagtgcggcacgtctcgaggcgtcatcgcccattctcgagggacagggcgtttatgtgcgcggatgtttgcacaccgacgacaagggcaatcccgaatatgaaaatctcatgattcctcttcactcgcgccgcgatgccgatgacagggtggtatgtcttgccgtgccttttctgcgtcagtccgagcttccgcgtgaggaaactttcagcaaaagcatgggcaaattctttaagaatcttgccgacgaggcacgccgcgaatacggcaggaagcagcgcatgatgcttgccgcacatttttatgcaagcggcagtgaaataagcgatgaggagcacagcgagcgcatagtgataggtggagaggaaaacgtggatgcctcgaaaatatgcggggaattcgaatacgtggctctcggtcatatccacaaggcacaacgagtggcaggattcgaacatgcacgctattcgggatcggcacttcccatgtcgtttggcgaacgcggctacaaacacggcgtgaatgtggtggatatgcagcccgaaggcactgtaaccctgacccccgtggaatatgttccgttgagaacacttctcacaattccgcaaaagggaacggctacacccgacgaggctgtgctggtggcaaaatcgttcgcgaaatccggcaagaaggacgacaagtcttcgtatccttatgttgaggtgcgactgggcgagattcccgattccacaacggttcattccataaaggaaagctttgaagaccgcgccgcaatactttgcataatacgcaacatgaacagcgtgaaatataaccacgaggaactggacatgaaaaccgaagagcagttgcgccaactcgaccctctggtcatggtgaagtctatttataaaagccgcaacggaggagaggaaatgccgcaggcgttggttgacaaattcaatacggcggtgaaaattgcaaaagaaaacgaggaggaagaataa

SEQ ID NO: 750 - DNA, 1338 bp, unclassified Prevotella
atgaagaccgaactaattttatcagccttgcaggcaaaacacccaggagaaaaagaatatttacaggcagtcaaagaagtattgctatcagttgaagatgtttataacagacatcccgaatttgaaaaagcaaaaataatagaacgtcttgtagaaccggacagaatatttacttttcgcgtaccttggattgatgataaaggttgcgtacaagtaaatctcggataccgcgttcagtttaataatgccataggaccgtacaaaggtggaataaggtttcatccgtcagtaaatttatccatccttaaattcttaggatttgaacagacattcaaaaacgcgcttactacacttcctatgggcggcggaaaaggcggcagcgactttgctccgcgtggaaaaagcgatgcagaaatcatgagattctgccaagcattcatgttggagctatggaaatatataggacaggatatggatgttcctgccggcgacataggtgttggcggacgggaagtcggttatatgtacggcatgtataaaaaactgacacacgaacataccggaagcataacggggaaagggttggatttcggaggttctattctgcgtcccgaagcaaccggatacggagctttatattttgtgcgccaaatgatgcagacacacgacatggatataaaggacaaaaccgtagcaatatcaggattcggcaacgtggcatggggtgctgcaaaaaaagcagttgaaatgggagccaaagtagttaccctctccggtcccgacggatatatctacgacccggaaggcatttatggagagaaaattgactatatgttggaactaagggcaagcggaaacgacataatttctccatacatggaaaaatacaacaacgcaatattccacccttgcgagaaaccttggaaagaaaaagtggatgtcgcgctatgttgtgccacccaaaacgaattggatgagcaagatgcgcaaagacttatagataataaaactctgtgtgtggcagaagtttcaaacatgggatgcacagagcaagccgctaacctgtttattaaaaacaaaatgctgttcgctcccggaaaagctgtgaactccggtggcgtagctacttcgggacttgaaatgactcagaatgcggagcacatatcatggacaggtgaagaagtggataggaaattacaccacataatggcggctgtgcatgaacaatgtgtaaaatacggtaaaaacgaaaacggttatatagactatgtacgcggagcaaatattgcaggattcatgaaagtggcaaaagccatgctggcacaaggcatcatataa

SEQ ID NO: 751 - DNA, 2520 bp, Clostridium sp. CAG:230
atggacgaaaatatctttgacaaagttcatgaggtggacttaaaaaagacaatggagacatcctatattgattatgccatgtccgttattgcagcaagagcacttcctgatgtaagagacggtttaaagccggtacaaagaagaatcttatatgcaatgatcgaattaaataatggtccggataagccacatcgtaaatgtgcccgtatcgttggtgataccatgggtaaatatcatccacatggtgacagctctatttatggtgcattggtaaaccttgcacaggaatggtctacacgatatccgttggtcgatggtcatggaaactttggttctgtcgatggtgatggagctgctgcgatgcgttataccgaagcaagattaagtaagatttcaatggaaatgcttcgtgatatcaacaaagatacagtagattttataccaaactttgatgagacagaaaaggaacctgttgtattaccatctcgttttccaaatcttttagtaaatggtacatccggtattgcggtaggcatggcaacgaatattccaccacacaatcttcgtgaagtgatcaatggtgttgtacgtctgatcgatgatattgaagaagataaagaaacaacaatggaagaaattcttggaattatcaaaggacctgacttcccgaccggagcacagatcttaggtacaagaggaattgaagaagcatatcgtacaggacgcggaaagatcagagtgcgtgctgtgacagagattgagccaatggataacggtaagaacagaattgtagttactgagcttccgtatatggtcaataaagcaagactgatcgagaaaatagcagaattacataaagataaaaaggtcgatggactgacagatatacgcgatgaaacgagccgtgaaggaatgcgtatctgtatcgaactgcgtcgtgatgtcaatccgaatatcgtattaaatcagctatacaagcatacccagcttcaggatacgtttggtgttatcatgctggcattagtcaacaatgagccggtcgttatgaaccttttacagatgttaaaatattatctgatgcatcaggaagaggttgtaacacgtcgtacaaaatacgatttaaataaagccgaagagagggcacatatcttagaaggcttattggttgcattagataacattgatgaagtgatccagatcatccgtggatcaaagaatgccaatgaagcgaaagaaaaattacagcagagattttctttatcagaggcacaggcaaatgcaatcgtagaaatgcgtttgcgtgcattgaccggtttggaaagagaaaaactggagagtgaatatgcagaattagaaaagaaaattgccgaatacaaagcaatcttagcagacagaaaagtattgctttctgttgtaaaaaaagaaatcattgagatcagagacaagtatggtgacgaaagacgtacttcgatcggatatgatgagtacgatctttcgatggaagatctgattccaaatgaaaatacgatcattacgatgacaaagctcggttatattaagagaatgactctggacaattttaagagccaacatcgtggaggcaaaggaatcaagggaatgcaaacgatagaagatgattatatagaagatctctttatggcaaccacacatcattatctgatgttctttaccaataagggaagagtatatcgtctgaaagcatacgaaattccggaggcaagcagaacagccagaggtactgcaatcattaacctgttacagttattgccggatgaaaagatcaccgcagttattccaatcagggaatatcaggatcagaagtatctgtttatggcaacgaaaaagggaattgttaagaagacatcaattgtagaatatgccaatatcagaaagacaggacttcaggcaatcagtcttcgtgatgaagatgaattgattgaagtaaaagtaacaaacaagaagaaagatattattttgatcacgaaacatggtcagtgtatccgtttcaatgaaaatgatgtaagacctacgggacgtacttctatgggtgtgatcggtatgaatctttcttatgatgatgaactgatcggcatgcagcttaatacgcaaggagactgtctgatgatcgtatcagaatatggtatgggcaaaaagacagatatcaatgagtttggcgtacagcatcgtggcggtaaaggtgtgaaatgctataagatcacggataagaccggaaatgttgtaaatgcaaaagctgttaatgacgataatgaagtaatgcttattacaacagaaggcatcatcatccagttaaaagtatcagaaatatcaacacttggacgtattacatcaggtgtcaaactgatcgatctggatcctgaaaaagatattgttgtagcaagtatggcaaaagtcagagatgcgattccggaagaaaacggtaattcagaagaaaaattattagaagaattgcaaaaagaaatggatgaagaagaaaaataa

SEQ ID NO: 752 - DNA, 1581 bp, Clostridium sp. CAG:230
atggtaaatttgcctgaaaaatattgtgaaaatatgaaagaactattgcaagaagaatatacagactatatagatagtctgtcagaaaaaacatatcaggcgatacgcatcaataccaagaaaatatcgttacagcaatgggaaaagatcaatccttttcggacaagtccgatcccatgggtggaaaatggattttatattgaagatgcaatggaatatggacagaatgaatcaggtcaacaggagagtccgataccatccagacatccttattattatgccggtttatattatattcaggaaccgagtgcgatgattccggcaagtctgcttccggtaacacccggagataaagtgttagatctttgcgcggcaccggggggaaaagcaacggagcttggtgcaaagttacagggacatggactgctggtagcaaatgatatcagtgtatcaagaactatggcattagccaaaaacctgcagatcgcaggtattcaaaattgtcttgtgacagcagaaacaccggagaagcttgcttctgtttttacaaacttttttgataaagtgttgatcgatgcaccatgttccggagaggggatgtttcgaagagagccgcgtatggttcatgattgggaagagaaaggaccggcatactatgctaagatacaaaaagaaattttgacacaggcatatcagatgttaaaacccggtggaaaaatggtatattctacttgtacattttctttgcaggaagacgaggctgtgatcgaatggttcttagacatatatcaggatatgaaagtgtgcccggtggaacgaaaagaaggctttttgccgggaagaccggagaggatcgcagcaagagaggaattaaagcattgtgtcaggatctttccgcataaagcaaaaggggaaggacattttgctgtacttttgcaaaagggagattctgtggcagatgcagaagaaacgcagcgcagcagggaaagtctgacaaaagagcataaaaagcaattagaagattcgatagaagatcttacgatcacaatagaggacagatcgcaaaaaggcagtttttctaagaaaaaagaatatcagcgtaacaagtctgataagaaaaaaggaaaatcaggaagggagaaattcgaaaaagcatcacaagggcagacagtgcaaaaagcagatatgcagacaaaagagtttttagctcatcttccgtttgaagaaggaagatatgtttcacacaataatcagatttcttttgagcctttgtggatcgaatcgctttctaagctgcggattgtgcataaaggtgtagcagtctgtgaaataaagcaaaaaacagtattatcccatcagctggcgttgtgtttgagggatgaagattttgatcaggtgatcaattttcaggcagccgatccacaggtgatccgttacctgaaaggagaaagcatacagacaggtatggcgtatcgaggcaatgtattggtctgtgttgatggatttggcttgggctggtgccagggcagcggtaccacattattgaaaaataaatattatccgggatggcgttaccaatag

SEQ ID NO: 753 - DNA, 2226 bp, Clostridium sp. CAG:230
atgaagaacaagaaaaaggggttattgcaaattattctgatccttgcaataatcggtctctgtggcttcacaactttagttggctttacaaagcaccataaaggtagcgcacagaacatcaagcttggtctggatcttgccggtggtgtcagtattacatatgaagctgtcggagatacaccttctcagaccgagatggaagatactcgtaacatgatgcagaaacgtgccgaggtatatagtacagaatcttctgtagtaattggtgatggcggacgtatcacaattgacattcctggtgttgcaaatgcagatgaggtacttgcatcattaggtaaagaaggatctcttgactttgtagctcaggatgatatgtcatttgaagataatgatcagacaaagcccaaatatacaaagacagtttgtaccggtaaagacgtaaagactgcagaagctacgacacagcagaatgaagtaacaaagaagaaagaatatgtcgtatctttgaagtttaagtcaaaaggcacaaagtcatttgcaaatgcgactgcagcagcagctccatcaaataaggtcatttatattgtatatgatggtaaggtgatttcttctccggctgtacagagtgagatttcgaacggagaggctgttatctcgggaagttttaaaacatatgatagtgcggaagaacttgcttctatgatccgaatcggtgctctccctgtagaattaaaagaagtacagtcgcaagtagtaggtgcacagctcggacaggatgcaatccagtcaagcttgcttgccggtgcgatcggttttgcattggttgtgctgtttatgattgtattttaccgtttgccgggtcttgcagcttctattgcgttggtgttctatctggtagtgatgctggtaggcttaaatgcattagatattaccttaacccttccgggtgtggcaggtatcatactgaatatcggtatggcagtcgatgcgaacgttattatctttacacgtattaaggaagagctggctaagggcaagacagtacaatcaagtattaagcttggttttgataaagcgttatcagctatcgttgatggtaacgtaacaaccctgatcgctgcgtttgtgttatatattaaaggttccggtacagtaaaaggtttcgcgacaacattagcgatcggtattattttatcaatgtttaccgctctttacattacaaagattcttttgaaggcaatgtatgcattgggtgtagacgatattaaatactttggtgttgaaaaagaaagaaagacgattcactttgttgaaaataaagtgaaattctttgtgatttccggcgctttaattgtagcttgtgtggtttgcctgtttattaacaaggcaggaagatgcaacggaaatatcctgaattatggtctggatttctccggtggtacaacatttgatatcacatttaacaaagatcagaagattgactctgatatgaagaaagatattgaatcagtatttagtaaggaaagcggttcgaatgatgttgtcatttcagaaattgccggttcaaacggtctttctgtaaagacagtcgaattatcagagaagaaacgtgatgcattaacaaagtcattagttaagacatatagtgtagaagaaaagaatatccagtatcagaatatcagtgcttcggtatcggatgaaatgaagacggatgcaattgtagcagttgtgatcgctgcaatctgtatgctgatttatatctggttccgttttaaggatatcgtatttgccggtagtgcggtattggcattacttcacgatgcagtagttgtattattggtatatgcagtatctaagatttctgtgggtaatacatttatcgcttgtatgcttacgatcgtaggttattcgatcaatgcaacaatcgttatctttgaccgtatccgtgagaaccttggttcaaagacaagtgaagaagctcttacagaggtcgtaaaccagagtattacacagacgttaacacgtagtatcaatacttcattaacaacattctttatggtaatcatgcttgcaatcttaggcgtggattctgtaaaagactttgcaattccattgttagtgggtattatctgcggtggttattcttctgtatgtatcaccggtccattgtggcttacaattaagaaacgtgttcatacaggaaaaggaaagaaagcaagaaaatag

SEQ ID NO: 754 - DNA, 2997 bp, Clostridium sp. CAG:230
atgaaatacgcagcatttataagctaccgccatggtgggattgatgaaaaagtaggtatgcagatacagcacgatctggaacgatataagataccttcaaagattgcaaagagtattgggaaaaaaagtcttggtaaagtctttcgtgacgcagatgatctgcgtgcagccagcgatttatcggcaatcatacgtgccggaattgatgaatcggaatatctgatcgtgatctgtacgaaacgatatcagaaatccgtctggtgtatggaagagattgaatatttcttagaaacacgcgacagagaacatattattgttgttttagtcgaaggagaacctcaggaaagctttcctgaaatcctgacgcatatcgagcgtgacggtaagatcgtagcgattgaaccgttggcggttgatgtccgtgccgaaacggaaaagcagatcctaaaaaatgtaacaaaagaaaagcttcgctatatctcacagatgttagatatggattacgatgatctaaagcagcgccagaaagaacgtcaaagaaagagaaatgcaattcttgccggtattgtttttgccggtgttgctgtctttgcaagtgtagtatcttataagaatgtacagttaaatactgcatatgacagtctggatcattcgatgcagcagacattaaaaggacaatcttactatctgtcggaatactcaaataccgcctatcttaatggagacagggcaaccgcagcacttctggcactgaaagcactgcctaagaatcttgaagaaccggacaggccttttgtgccaagtgtaatgcggtctttgtcatcagctctgggagtctatgatttcagcagcggctatcagccggacaaggtgtatgattttaatacagaagcctatcatacgaaagtaacgatcagtaagaaaggaacgtatctggtcattgaacgttatcaggcagcagctaataacatgttgaatggaaaagcctatatttaccggattgataaccgtaagctggtacagtgtgtcaatctggatgacatcagtaaaacagcgatacatacctcttcacatatggcttgtcttacaaatgatgaaaagatattttattatcttggaaaagacggactttgtgccatggatctaaagagcggtaaagagctttttaccgggcagaaaggctgtcagatggtattgagtgagcaaaatgatgtgatttctgtttatgatgatgatacggcaacgttatattcttatgctacagatggcagattacaggcacagacagctttatccgcacagaaaaaatatgcattatattgtatcagtcctgacagcagcattgcggttctgtcacaggatgctaaagacggtgtcggaatcttacttgctgacacgtcgaatggcggtacactttttgcagacaaaagcgaaagctgcagtcagatatcctttattaatgatcacagcttatgttttgtgcggcaggatacacagatggggaagagtcatatcgttgtttatgatctgaatgaaaacgcagatgattacctcgtagattccgaacgaagcagcattggaacgattgccatgtcaggcaatgaaacctgctttttctatgtcgataaagacgtttgtgaagtcagcaacaagaccggaaaagtgatttggaaaaatacatattcttccgatgtgacttctgtgaaagcacagggcaattatttaatggttacactcaaaaacggacagagttatttttataacagcaaaaaacatctgttgatcaaccagtctgccggaaatgaagaaaatttctatgcaatggcgttaaatgaagattatgcctgtagtgcggatttttgggggaagaatattcgtttatacagcaataaaaagaagacaagaaaagacgtgacaacaaaagagattataacaaataccacacaacgtcctgaaaagtggtatactgcttcatcaaatggaaagacaatcctgctggattttaaaaatggaatgcaggataccgtaaaggcattccgtgcggatacacttgagatgattggcagtacaacattaaaggatatggattatgagtcctttaataatctttctgtttctgcggaaaatgacaaatatatcagcattcaggattacgcctatggagcaaatgctcattttaatgcaaaaacgatgaaaaaagtattttcttatgatgaagattcgtattatttctataatgatgaccgttctctgatcacgattgcacaaaaaaatgagttagtgacctatgatgcggcgacaggaaaagtcaaaaagaaaacagcgattccggatgcctatgaccgtggattgcaagtcggagactatacgatctttggaaatgataagaaaatagcaattcggaaaaaagggaaaaaagacgtgatcttaaaagatgccgtgatctatacttcaaatgaaaagcaaaagctgctatgttatcgcagcgtggatgcaggcaaatggtatgtctattcgttagaaaagggaaaaatcatcagtcagggaaaagcaggaacatttgcgtgtacgatcttttttgatgatggaacttattttctgaatgattataatgccgtttatgatgcacaatcagggaaaaaagttctggatttatccgatatcagcaccggagtatatggagtatatacgaataaaaagattccgtattttgttgtatggtatcaaagcggagaatccgatgcaaatggtaaatccagcggaagtaacatggcatatctgtataacaaaaagcatccggaagagattgttgcaagtattccgaattttgtggcaatggcagaagatggcagcgtgatcacatttgacggagatcatacattatataaaacaccattatattctgaaaaggaactgttacagaaaggaaatgaatttgttaaaggtatgaagcttacaaaagagcagaaagaaaagtatcatttgtttacagaataa

SEQ ID NO: 755 - DNA, 1938 bp, Clostridium sp. CAG:230
atggaagagaacaactcttttaaaccttatgtcagtgcagacaaggtattgccggaatttacggtttcatcgattctgatcggtattatccttgcgattgtctttggtgcagccaatgcatatcttggacttcgtgtaggtatgacagtttctgcatctattccagcagccgttattggtatgggtgtgtacaagctgctcggtggtttttcttcgaaaaaagaagaaacgattctggaaagcaatatggtacagacaattggttcagccggtgagtctttagcagccggtgctatttttaccatgcctgttctttttctgtgggcagcagaaaagaaggcacagatgcctagcattgtagagattgcattgatcgcaatgatcggtggacttcttggtatctgctttatggtacctttgcgtaaagcattgatcgtaaaagaacatggaacactgccttatccggaaggaactgcttgtgctgaagtgctgcttgcaggtcaggaaggtggcgcaaatgcagcaatcgtatttatcggaatgggaatttctgcattagttaaatttatcgtagatggattgaaagtagtatcaaatgttgtaacgatctctattcagaagattcatacagaagtcagtgcagaagtgtatccggcattgatcagtgttggttatatctgtggttttaagattgcatcttatatgtttgccggtgcgatcctcggatggcttgtattgatcccggcaatctatctgtttggtgcaaataccattttatatcctgcgacagtaacgatcgcagaagtatggaagagtagtggggcatccggtatctggtcaaattatattcgttatatcggtgccggtgctgtagcggccggtggtattatcagtcttgtgaaatcacttcctctgatctgccgtacatttgtagatgcacttcgcggaatgatgaacaaagaagcaattggtaaagaagaacgtactaaccgtgatatgaatatgggacttgttctgggaatgcttgctgtattgatcattctgatcgcagtattacctgttattccaatcggtgtcttaggagcaattattattgttatctttggtttcttctttgcagccgtttcttcaagaatggtaggtttagtcggcagcagtaacaacccggtatcaggaatggcgattgcaacattgctgatcacaagtctgatcttaaaagcaaccggtaattcaggcgcatcaggaatggttgcggcgatcgcaatcggttctgttatctgtattgtggcagcaatggccggcgatatgtctcaggatcttaagacaggttatatccttggagctacaccggtaaaacagcagtatggtgaattgataggtgctgttgtatccgctattacgatcggctttgttctttatcttttaaatagtgcatggggatttggaacacctgcacttgcagctcctcaggctactttgatgaaaatgatcgtagaaggcgttatgggtggaaatcttccgtggacattggtatttatcggtgtatttattgcaattatggtcgaactgctgtcaataccggttcttcctttcgcaatcggtttatatctgccgattgaactttctgcctgcattatggtaggtggtatccttcgtctgatcttagaaaaagtatatgaaggaaaagcaaataaagacaaagtgatcaataatggtgtgctttgctgttcaggaatgatcgccggtgaaggtcttgtcggtattctgcttgctattcttgcagttgctacagtaaatggtaagacgattgcagagatcgtagatctgtcaggagttgtgaacttaggacagattggtggactgattgtaatggcattgatcattcttctgatcctcaaatttacaatctggagtaaagaagcaaaggaaacaaaatag

SEQ ID NO: 756 - DNA, 2316 bp, Clostridium sp. CAG:230
atggatgaaaagaaagaattcacggagggaagatatatggatattatattaggtattatcttatatgcagaaatgtttcttttgggattttgtacatggagagcaagaacagcgtcgaaaaaagcaggacgtatcgtatattattattgtggactttcttttatttgcagcatcttttttgcaatctatacttatgtaccgcagttagcaattaaggatttttccaagggtatcacatttatctgttttgactggcttctgattctgctgatgctttatacggaatactataccggtttgtttaaagggattcgtgctattaagtatataacatatgtttatgcaatgattgactctgtatcgttatttgctaatacatggactcatcacatttttgaatatcaatatgtcgataatgcagaaagagcgatgcgcattgtacataattattatttgtttgatttgcattttatagtcaattatctttttatgataatggttattttgtcttacttaattatgatcttgcgttcctctaaattttatcgttttcgttatgaagttgtatttatagtgatttttgtgggattcattttggatctgagctcaatgtattctcattttctttataatatatctatgcttgcatttggatgtatgtcaatcctgatatattattttacattggaatatgtaccaaatatgttgattgaaaataccatgtctttggtgattaaagacatgaacaatggaattgtttgctttgataatagtggaaagtgtatttatacaaatgaattgattcagaaattatatgatacagacggcaatgtagaaattttagaacaaaaatatcataaatggctgcatacgacggatcaggtaaaggatgccatgcaattccgtttttctgtcaaaaaggaagaagcagaaaaaacatatgaagttacatataaaagaatttatgacgataagcaaaactggatttgtgattgttttatatttaatgacaggacggaagaaattgcgtctttagagtatgagagatatcgcgcttctcatgacagcatgacgggattgttaaacaaagaacaattttatcaggatgtttatgagctgattcatcagaatccggataaaaaatattgtctggtttgcagtaatattaaagattttaagtttgtcaatgaattgtttggaatggaaaaaggagatactgttctgcttcgtcaggcagaactcatgcgtgagtatactccaaaaggaaccttattagcgagaatgcaaaatgaccgttttgcaatgtgtcttccacgaaaggatctcagagaagatgtagttcataaagcgatttttaaattacaggaggaaacacaaaacagtgcgttccgtatgcatatctttgtgggggtatatgatatcacaaatattgaagaaccaatcagcattatgtgtgataaagcaaatcttgcaagcacaacgattgagaacgattatcatagtgatattgctttttatagcaagaatctctttgaccgatcaatcgaagaaagaagaatcatcggtgagtttgaaggtgcattaaatcgcaaagaatttgtgatgtttttacaacctcaggtcaatgcgaaaggtgaactgtatggtgcggaagctttagtacgctggcagcatgcacaaagaggactgctttcaccggcgatgtttattgatgttttggaaaaagcaggactgatctataaactggatcgatatatatgggaaagcgctgcacaaaagttaaaagaatggaaggacaagggagcagagcaatatcatatatcggttaatatttctacgaaggatttttattttgtagatatttatgagacatttaccggactcatagaaaagtatgatatctgtccggatcgcctgaatcttgagattacggagacggcattaatgtctgactttgataaaaatatggagattctaaaacagcttcgggaatatggatttaagattgagatagacgattttggaagtggatactcttcgttgaatatgttaaaagatatcagtgcagatgtattaaagattgatatgggatttttacgtgcatccgaaaatgaagcaaaaggaatggatatcttagaaagtatcattatacttgccggcaagcttggaatggatgtgataacagaaggcgttgagatgaaaaaacagtttacgatgctaagtaacatgggctgtggtatttttcagggatattatttttcaaaaccaattccaacgaatgagtttgaagacaagtatcatatttttaacgtataa

SEQ ID NO: 757 - DNA, 2292 bp, Clostridium sp. CAG:230
atggatgtgtatgataggacgcatcgcaatgtggaagagagggagagtatgtacgagaacgaaattgcacagattacagcaagaaattcgaatgaggagatttattccggtctgttagaactggcaggaaagatcacacagcagaaagggcgtattgaaggaaagaagaagttatattatatttctgccgaattcctgatcggtaagttattatcgaataatctgatcaatcttggaatttacgatcaggtggcagaaagtttgaaagcacatggaaaatccatggctgagattgaagagatcgagaacgaaccatcacttggaaatggcggactgggacgtttggcagcctgctttttggattcgatcgcaacgctgggacttccgggagatggtattggtctgaactatcatcttggactttttaagcaggaatttgagaaaaatcttcaaaaagaagttccgaatccatggatgacacaaaaaagctggcttcgcagaacagatgtaagctatccggtgattttaggagataagaaagtacagtctgttatgtatgagatagacgtaacaggttatgataacaaatgcaatacattaaagctttttgatctggatactgttgatgaatcaattgtacaggatggtggtattcagtttgataaagaaaacatttctaagaatttaacgttgttcttgtatcctgatgacagtgactatcagggacaattacttcggatctaccagcagtattttatggtcagcaatgcggctcagcttattattgatgaagcacaggcaaaaggaagcaacttgtatgaccttcccgattacgccgtgatccagatcaatgatacacatccaaccatggttattcctgagatgatccgtcagcttgtgttacataatatcgagatggatgatgcaatcgagattgtttcaaagatgtgtgcatatacaaaccatacgatcttagcagaagccttagagacatggcctttgtggttcttggatcgtgttgtaccgcagcttgtgccgatcattaagatgttagatgtcaaggtaaaagaaaaatatcaggatgaacgcgttgcgatcattgataaagatcaaagagtacatatggcacatattgacatccattatggttttagtgtcaatggtgttgcagcattgcatacgaagatcctggaagaaagcgaattaaagccatttaaagatatttatccaaataagtttaataataaaacaaatggtatcacattccgccgctggctgttacattgtgaccacgaactggcagcgtttattaccgaaaagatcggtgacggttataaaaaagatgccgcggaattagaaaaattgctgacggctgcggacaatgcagcagatcttgaaaaaatccttgcgatcaagaagacaaagaagcagcaattaaagagttatttagagcaaaaagagggtgttacgatcgatgaagattccattctggatgttcaggtcaaacgtttgcatgaatataagagacagcagatgaatgcattgtatattatttataaatatatgcagatcaaagcaggtcataagccaaagagaccgatcacaatgatctttggtgcaaaggcagctccggcatatacgatcgcaaaagatatcattcatctgatcttatgcctgtctgaagtgatccgtaaagatcaggaagtcagtccatatctgaaagttgttatgttagagaattataatgtaacatatgcggaaaaagtaatcccggcagcagatgtttccgagcagatctcattagcatcgaaagaagccagcggtaccggtaacatgaagtttatgttaaatggtgcgatcacactcggtacggaagacggagccaatgtagagatccacgaatttgtcggtgatgataatatttatatcttcggagaatccagcaacgaggtcattgaacattataaaaatgcggattatgtagcagaaaagatttatgaccgggatccggaaattgcaaaattagttgactttatcatcagcaaagagttatttgcggtaggtaataaaaagagcctgatccgtttgtatatggaaatcgttacaaaagactggtttatgacacttttggatatcaaagattatatccgtgtcaaagaacagctctttgaagattacgaagaccgcaatgcatgggcaaagaagatgttagtcaatatcagcaaggccggcttcttctcatcagacagaacgatcgagcagtacaatgaagatatctggaaattaaaatag

SEQ ID NO: 758 - DNA, 1143 bp, Clostridium sp. CAG:230
atgttatttataaaatcggatgaattgaaaatagggatgcgcctggcaaagcccatttataataaaaatggtgttatgctgtatgaacgtaattcgaaactgaccagacagggtattgtcagcattcagaactttggattgatcggtgtttatattcttgagcctgcagagccggttccgccaatgagtgaagatgatattgagtttgagcgttttcaggcaatggcgatctttacaatacgtgatatccttgatgatgtggcagcacagaaagaaccaaaggggatgtatccttttgcaaatcaggtgatcaagaaatacggttctttataccacaagattaattttgtacaaaacttacgcagtacagaagattatgtttataaacatgcattgaacacagctattttatgtgcattgatctcgaaaaagatggaacttgattttaaagcacagcttgatgtggtcgttggcggtattcttcatgatatcggtgaacttatgatgccgcttgcactgcgcaagatcaagaaagaagagaggtcagaggaggatgaaaagaagatcaatacctattattatgcaggatatcagttgatcaacaaagattatgagctggatgcaggggtaaagagaacaacaacacttgcgatgcgtgatctgtatcagattggagatgcagatgttattcaaaataccaaaaagatcaatgaggtagaaatcttaaaagtagcttccgtatttgatacgatgacagcgatgaagtttgaagaagaaccgatgtcagagattacggcacttcgttaccttttagacggagcaaacggatacgatcagctcgttgtgcaggcgttggtcgacagcattaatgtgttgcagccgggtgtctgtgttgatctgagcaatggagacaaaggtctggtaattgcagaaaatccgaccgatatcttacatccgtttgtattatcattccgtgataaccagatcttaaatcttgcagacagttcggttgccagtggagtacatattgtagatatcatgaaaacaatggataaccgtcatattgtcgatcatgaagctttagcaaagtataaaggtgaaaccgtacatttaggtgaagtccgtactaataaacattattag

SEQ ID NO: 759 - DNA, 1923 bp, Clostridium sp. CAG:230
gtgcgaaaagataaaaaagtaattggaatttgtgtcgcatccatgcaaagtgacagttgggaaaagcatgtgcgtgcgatttgcaaagaagcaggaaaaagagattataccgttatgatctttaatacattccagcgcttatatgaggtgactaagtttggtgaaggggaagtcagagtatttgatatgattccttttcagaagcttggggttttgatcgttttttctgagtcgattgcaaataatgagatatcagaacagctggtacaaaaagcaaaagatgccggtgtgcctgttattacgatagacagaaggatgaaaggctgccataacgtattatttgcatatgaagaatcctttgaaaaagtagttcgtcatgtgatcgaagatcatggctgtaaaaagattaatttcatggcaggttttgaacataatgagttttcggatgcgagaatcggcatttttaaaaaagtcttagaacagaatgatctggtctttgagccggaacgactggcttatggacagttttgggagatgccggcaagacacgcctgtgaagaatgggttgcaaaatggcagcgcggagaacaaagtatgccggaagcagtaatctgcgcaaatgatattatggcattgacagtaatgaatgttttaacgaatcacggtatttgtattccaaaagatgttattgtgaccggctttgacggattagagttagagcaatattgtactccgagattgacgacagcaacagatgatgtccgccagatcggaaagagtatgttagacattattgatcgttgtattgaaaatccgacagaagaacccaaagatttgtatattccgtttcatacccggtttacggaatcctgtggttgcgaaccgatcaagagttgcaatccgaatgaacggatcatgcagctttacggatatgcggctgagatgcgtcagcagtcaaccgatacgttctttatgatgacaacgctgacagatggatattctgctgtagaaatgggaaataaattaaaagactatcgtaaagcaattgatgcaaaatatatgatgctttttttggatccttcttattataaggagacagatatcccgacaaaccattttgaaaaagactcgtatgttttgtttacacaattaaaagataatgtatacgatgttccgttagaagaagtaaagaaagatgaatttatagataagatctgctggatggcagaaaaaaaggagcctttattatttattccaatccattgtcaggaggaaaactatggatttatggtaacaacatatgattatgagggaaaagataccagggcattttatgaatttgtattggggttagatcaggtgttaggaacaatccgcagacaatcccagcttcatcgtagttatgtcacggatgccttgaccggtctgtataacagaaggggcttctatcttcgttttgaaaagaagatgaagcagcttgccgatcaggataaatatctttttatggcatctgtggatatggatggattaaagtttatcaatgatacatatggtcatgctgaaggagattttgcaatcaaacgtttggcagaaattttgcaggaaatggtaacggatgggcacggaatctgtgctcgtttcggcggtgatgaatatatggttgtgcagcttatggaagcagaaaaaatagatcatgatttttgtgaccattttgagcagcggcttcaggataaaatcaggcaggacaaccaaaagaaaaaagcggtctatgaattaagtgccagttgtggggtgattggcagaaagattcagaatgcagaggaaattgatactatgatgaaagaaacagatgagaagatgtatcaatgcaaatgcaggcatcataacagcagagaagccagaagcagacagaaaagtatgtaa

SEQ ID NO: 760 - DNA, 1500 bp, Clostridium sp. CAG:230
atggaggaaatcatggaagtaatgtatcagagtacacgcagtacaggaaagaaagtaacagcttcacaggcaatcttaaaaggacttgctgatgatggcggactttttgtgccggatgcaattccgcagttagatgtctctttggatgaaattgcaaagatgaactatcaggaaaccgcatatcaggttatgaagcagttttttacggactttacacaagaagaattagaaaaatgtatcgaacgtgcttatgatgcaaaatttgatacgaaagagatcgcacctttggtagaaaaagacggagtctattatctggaacttttccatggtgcaacgatcgcatttaaagatatggcactttccattcttccacatcttcttacgacttctgctaagaagaaccatattacaaaccagatcgtgatcctgacggctacatcaggagataccggaaaagctgctttagccggatttgccgatgtagaaggtacaagcattatcgtgttctatccaaagaatggtgttagtgcgatccaggaaagacagatggtaacacaaaaaggcgctaatacaaaagtcgttggtatcaccggaaactttgatgatgcacaaagcggtgtaaaagcaatgtttaataataaggaactggcaaaagccatgaatgcaaagggataccagttctcatctgcaaattcgatcaacatcggacgtctggtgccacaggttgtttactatgtatattcttatacaagacttcttgcacagggagcggtaaaagaaggtgaacaggttaattttgtagtaccgacaggaaactttggtaatattttagcggcattttatgcaaagaacatgggtgtgccggttggcaagctgatctgtgcgtcgaatgataacaaggtattatatgatttctttgagaccggagtttacgataaaaaccgtgagtttattttaacaacatcaccatctatggatattctgatctcaagtaacttagaacgtctgatctataagattgccggcgaagatgcaaaagcaactgctgatatgatggcagcacttgctaaagatggtaaatatagtatcacagatgcaatgaaagagcagatgaaagactttatcggtggatgggcaagtgaagaaaagacagcttctgagatcaagagagtttatgaaaagacaggctatgtcatggatacccatacagcagttgcatcggctgtatatcatgattacaaagaaaagacaggtgaccagacaaaaacggtgatcgcttctacagcaagcccatacaagtttgcaacaagtgttatgacagcgattgacaataaatatgaaggaatggatgattttgcgttgatcgatgagttaagcaagacatcaggcacaacaattccaaaagcagtagaagagatccgtacagcacctgtattgcatgataccgtatgtgaaacagcggatatgcaaaagacagtagaggaaattctcggactgtaa

SEQ ID NO: 761 - DNA, 2235 bp, Clostridium sp. CAG:230
atgaagataggtgttgattattacccggagcaatgggatcgttccctgtgggaacaggatgtatgccggatgaaagaagccggtgtagagatcgtccgcatggcagaatttgcatggagctgcttagaacccagggaaggcgtgtatgatttttcctggctcgatgcaatcatagatttatttgaagcaaacggaattgaagtgttcttatgcacaccgacttgtacaccgccacagtggcttttcgaaaaatatcccgaagtgatccaggtagataagagcgggcagcgtattcctatcggtatccgtggtcatcgatgtctgaacaatgctttgtatcgtgaaaaatgtacacagatcattacaaagatggtggaacattaccgggagaagtcttgtgtgacagggtaccagattgataacgaattagaagcaaatcattgctgttgtccgacctgtatacagaaatttcaggaatttgtcaaaaagaaatataaaataatagagagtgttaatcaggcctatggcaacagagtatggagtggggaatatacggatttttcgcagatcaaaccaccattcggaccgtttcagacatggctgaatccatcgtatatgctggattttaatcgttatgcttcgcagagtacggtagaatatgtcgagtttcaaagagaactgatccattctttggatccgaaagcggtgatcacgacaaataactggctctgtgaaaatatgccggatttttatgatatgtttgaaaagttagactttgtttcatatgacaattatccaacaacgaatcttccaaaggacatagaaacgctttattcgcatgcgtttcatctggatctgatgcgtggtatcaagaagaaaaacttctggatcatggaacagctcagcggagggttaggaagttggacaccgatgagtgaaacggtttatccgggaatgttaaaaggctattccttacaggcaatggcacatggagcagatacgattcttcattttcgctggaggacagccgttgccggagcagaaatgttttggcatgggattatagaccacaataatgtattaggtcgcagatacgaagaatttaaagaactttgtcagacgatgaagaaactttcttacttagatggttctatcataaagaataaagtagccattctttattcttcagagcaggaatatggttttaagattcagccacaggtggaaggaatgcattattttacacagctaaaggcttatcatgatgcgtttacctgtcttggtgtcggtgttgatattgtagatgccaaaagtgatctggacgaatatactttagtggtggcaccgaccatgtatatctcggacaaaacgctcgaaggccattttaagaaatatgtaaaacagggcggtcatctggtgttgacgaatcgttccggtgtgaaggatacaaataatcaatgtattatgtcacctttgccgacagtcttttcagagattacgggagcgatcgtaaaagaatataatccgatcggagaaaaggaagagtgcattgaaatccgatcagagcagtggaagaacatctgcgacagacagaacgatcagagcaactcgcatttatcggcattgtctgagccggaaggcaatgaaaaaaattacaaaaacacgcaaagtgatcaggaaagattggatttatcggtattgtttgagtcggaccacaatgaaacggatcataaagacatgcagagtgatcagggcagtttgtatttatcggcattatctgaggcagaatgtaatagaatagatgggggaaaaagagagagcagcacacaaaaacgatatatacagtcgtgccatttatggtgtgatattttagatccaaaacaggcagaaactctggctgtctatggaaccgatttttatgaaggggcggctgcgatcacccaaaattcttattacgaaggaatcggttattatgtaggaacggttccggatagaagaggaatgatctcttttgcaaagcttttgttagaaaatgcatcaattccatatatggagagtcttccgtatggggtagaagtgacagaacgcagaaatgatacaaaaagctgggagctgtattttaataataccatgcacaaacagcattttgatgttatagtacgtcacaaagatcagacagtaaaaaaacatacactggatttgcagccttttgaaatgaaaatcttagaaaagtga

SEQ ID NO: 762 - DNA, 2295 bp, Clostridium sp. CAG:230
atggttatgtgttttggtttggaggggaaaatggataaaaaattatatgatctgatggattgggcggaaattgaaacaattgtatattcagagcacgatcatcctgaaaatatattaggaccacataaagtaaaaggcggtgttttgattcaagcgtttttgcccgatgcaaagactgtttttgtcagaagtaagaaaagtggaatgttcatacagatgagccagacggatgaagacggctgctttgccgcgttgatggaaagccgtaagatcgtgtcatatgaatatgtgattgattatggtgatggaaaggagtattggcaaaaagatccgtatctgtatggaaatctgatccccgagcaggcgttagaagattttaatgcaggaaaagcatacgatatttatcgttatttgggggctcatcctgtagccgtaaaaggcattggaaaagatgttttggtagattggaatccaatggctgccagcacaaaaagatctgatatggtacagggaactttctttgcagtctgggctccgaatgcaatgcgtgtcagtgtcgtaggcgattttaatcaatgggatggcagaagacatccgatgtgccggctcggtgatagtggcgtttttggactgttcataccggatattggctgtggcgatatttataaatatgagctgaaatacaatgcccggacgattgctttaaaatcagatccatatggttttcaatatgaagattccatgacgatggcaagtatcattaccgatttgcaaaattttttatgggaagatgccgaatggatgcaaaaaaggcagaaaatacagattacacaagaagcacttaacatatatgaagtcagtctggatggttggctttccaaagaagacaaggatgcaggaaagggttatcgggacgcagcaaaaactttggcgaaatatgtaaaaggaatggggtatacccatattcagctcatgcctctgatggaacgtgtacagaaaaattcttatggatatccaacagttggatattacgcaattcgttcgtgctatggaacaccaaaagattttatgtatttcgttgattatatgcatcaaaacggaatcggtgtgatcatggaatggataccgggatatttttcgacgcaggagcaggggcttgcaatgtttgacggaacctgtttgtatgagcatctgaatcctttacagggtttgcatccgttttacgatgccatgctttttcaatatgaaagaccggaagttgctaacttcttacttgcgaatgcgttatattggaaagaaatgtatcatttagatggtatctgtgtgggtggcatggagacaatgctgtatctggactacggacgaaaagaaggggaatggataccgaaccgttatggcggtaacgaaaatctgggtggaatcgacgttttaaagaaactggcagctctctttcatcaaaaagaggatggggcaattctgatcgcaaaagaagagatggcaagtcttggagttaccgatccattggaagataacggactcggttttgatctgaaatggaatatatgctggacaagcgattttctgaaatatatgaagttagaccctctgtttcgaaaaggaagtcatggtcttattacgatggaaatgctataccattatagtgcaaactttattctgactatttcacatcgggacacatggaaaaagaaaagctctctttttgaaaatatgccgggaacaatatatgataagtttagtaatatacgtgtcggatttggatacatgatcacacatccgggtaagaaaatgctttttatgggagaagagtttggagtagaagacagaaaaaatactgacggatcgcttgactgggaacaggctcaaagtaaagaacatgcacaattacagcgttatgtcaaagatctgaatatgctatatcgaaatcataccgcactctatgtgatggattacagacaggatggctttgaatggatcagctgtatggatgctgatcatagtattattgctttcctgcgcaaagatcaggatgatattttgcttgtaatctgtaattttacacctgtattgtatgagaattttaaagtgggtgttccgtttatgggaagatataaagagatctttaacagtgatagaacaatttatggcggagcaggttatgcaaattcaaacgaattaacagcaaaagaagtatcatgggacggaagaagtcattcgatcgcaataaaacttcctccatatggtttttgtgtctttcgggcggttcctgaaaaataa

SEQ ID NO: 763 - DNA, 1356 bp, Clostridium sp. CAG:230
atgaccaatggaaaaacaatggacatgacacatggttctttatggaataaaattctgatctttgctttgccattagctgcaagcagtattttgcagcagttatttaattcggttgatacggcagttgttgggcggtttgccagcagtcgggcattggcagcggtaggaagcaacagctctctgatctctttgatgatcaatctgtttatcggtatttcgctcggttccaatgttgtgatcgcacattatatagggcaaaaagcgaaagacagcattcagtctgcggtacatacagcaatcgtggttgctgttcttagcggtctttttgtaatgatcgcaggacagtttattgccagaccggtacttcttttgatgggaacgccaaaagatgtcatacagatggcagtattatatttgaggatctatctgcttggaatgccttttattatgttatatgattttggctcttccattttacgaagtattggagacagcagaagaccattatacagtctgatcgcagccggtattgtaaatactgtattaaacctggttcttgtcattgtgtttcatcttagtgtagcaggggtagcaatcgctaccgtcatatccaatatggtcagttccggtattattatatatattcttttgcatgaagcggaaccgatccgcctggatataaagaagttaaagattgcatccaaacagttaaaaaagatattgatgatcggcatcccggcaggattacagggaatgatgttttcgatcgctaatgtgtgtatccagagtgcaatcaacagctttggttcgaatgcgatcgcaggatcggcagcagcattaaactatgagttcttttcgtattttatggtcaatgcctttgcacaggcagcagttacgtttacaagtcagaactatggtgccggtcaaaaagacagatgcaaaaagatctttcggttatccatgctcttttccattcttttttgtggaacattatcttgcatttttgtgctgggaagagacttctttttacatttgtatacaaccgatgaggcagtataccggtttgcggtacagcgaattttgatcgtaacgacactggaatttctgacctctgtttatgagatcagtgcaggtgccatgcggggactcggacattcccttctccctgctgtgatcacttgtgtcggctcttgtgtgttacgtctgatatggatcgcaacagtatgccggatttatcatacattctgggtgttattgatcatttatccgatttcatgggtgatcaccggagtttcgatgatgacagcgtatcattttatcaaaaaaagagtatttcgcaaaacggtagcagtataa

SEQ ID NO: 764 - DNA, 1482 bp, Clostridium sp. CAG:230
atggaggcacttatgtggacagacagcagaaagacaaaaagacaaaagacagtgatccgaaaaaggacaagtcggggatttttgttctttctgcttttttgtaccatccttttgaacgggctgtccggtaagaatgcacaggcagcaagtgcttcgattacgatcgataccagcaaaaagcaggttgtcaaaggagatacggtgtatgttgtgatcacagtcagttcatctgagagtatcaagagctttaacggttatttttcatatgataaccgctatcttcaatttgtaaacggtggcagtgtggtacatggaaatgatgataagtttttagtagatgatattaatcgtaccggcagtgcgacaaagttaaagtattccatcaaattcaaagcacgtaagaaaggaagtaccacgatcgcattacaaaagccatataaagtgtgtgcagatgacagttcttccggtgagatgtcggtttcttacaatgcgctaaatattgctgttttgtcaaagaaagaggctattgcaagcagtcagccacagcagagtaatacagaagcacttccaaatgctacagatcatccacagacagaagtatccggcaaacctgagacatcaccggatagagccaatgcaaaaaatcaaccgggtccgtcaaaagatcccaaggcttcggcaacaccggaagtcacaagagggccggatgatattgcgggttcttccagacttcgtaaactttcgattacagatgcccagatcgcaccggaatttcagccatcgattcgaaagtacagcggatttgtaacaaccaatcaggacacgcttgacatttcctatgaagcagaagacagcaaggcatctgttacggtaaaaggaaataaaaatctaaaagaaggaaaacatacgattaaaattgttgtaacttctgtcaaccataaaaagaccgtatatcgttttcaattaaatgttgcgaagcaggatcagacaaaagatggagcaaattcgatacaggtgacgcagaccaatggaaagacctatctgagtggcggattgcaaatagaattgttagagttggaagatgaaagcctgcttcctgatggtttttcaaagacaacgatagagatagccggaaatgagcttacagcatttacattagatagtagcacggattacaattatgtgttactctatggaaagggtgatgcagagggatttttcctatatgataagcaggaaggagcactttatccgtatgaaaaagtaaagcaatggtatcgcagtcaggcaaaagacagtcaggacagtacacagacgcagacaatcagaagttatcaatatatcattgcgatcatggctgttttgtgtgtattgatgttagtgatcacggttgcgtttggaatgcatcgcaattatcaaaaagaaatatgggaacaggaaatagaagaaatagataatgatgagatgaaggaggatagatag

SEQ ID NO: 765 - DNA, 2241 bp, Clostridium sp. CAG:230
atgatatttgcagacatcatagttgatgtgtccgtaaaaagccttgaccgtccgtttcaatatctggttcccgaagaaatggtagcagatgctgtgatcggtgcgagtgttatcattccttttggaaaaggaaaccgtgaaatgaaaggctatatcataggtttgtcggggacagccaaatatgatattcataaaacaaaaagtatcctacgagtagaaaagcagggagtggttgcagaatcacacctgctttcacttgcttactggatcaaggaaaattttggcggaacgatgaatgatgcgatcaaggctgttatgccggttcgaaaagaagtaaaggaaaaggtcgcacgccacattattcccgctctttcaaggaaagaaatggaacaaaaaaaggtttatttcgaacaaaaacacaatacagcacgtgcccgtatcttacagggacttttagagcagaaggactatgaaaagggtgcatcctatgaaacgtttcttcaccggtttaaagcgacagctgccctgttaaaaggactcgaagaaaaaggaattcttaaaattgtatcaaaacagatctaccgggatccgctttctgataacagagtcgtcacaaaagcaaaagtcttaaacgaagagcaaagaacgatcgtagagcagtttataacggactttgacgcaggaatccgaaaggattatctgatccatggtgtgacaggaagcggcaagacagaagtctatatgaatctgatcgatcatgtactccaaaaaggaaagcaggcgatcgtgttgatccctgagattgcattgacctttcagaccgtacagcgtttctatggcagatttggttcaaaagtttcgatcatgcattcccgtctgtctgccggagaacgttatgatcagtttgttcgggcaaaaagaggcgagatacagattatgatcgggccacggtcagcgttgtttacgccattttccaatcttggattgatcgtgatcgatgaagagcatgaaagcagttatcaaagcgacagtccaccaaagtatcatgccagagaagtagcagtacaacgggcaaaaatgctgcatgccagtgttgtaatgggatcagcaactccttcgcttgaagcatattaccgttgccagacgggggaatattcccttatgactttgacaaaacgtgccggaaatgcacagatggcagaagtagaaattgccgatctgcgtgcggaattaaaagcaagaaatttttcgatctttagccgtagactacaggaagagattaaagtgcggctacaaaaaagagagcagatcattctgtttattaaccggagaggttatgcaggatttgtatcctgccgggaatgtggagaagtgatacaatgcgacagctgctcggtagcaatgaaaccacatgaatataaagggaaagtcagtatattaaaatgccattattgcggtgcacaaaaacaaatgccaaaagtctgtccggcatgcggttctaaatatatcggaaccttcggtctgggaacgcaacaggtggaagaaatgatccataaacatttcccggaggcccgtgtgcttcgtatggatgcagataccacaagcggaaaagaaggacatagcaggatcttacagcagtttgcacagcaaaaagcagatattttggttggtacacagatgatcgtaaaaggacatgattttgaaaatgttactttagtaggcattctggcagctgatctgtcattaaataccggaagttaccgtgcagccgaacgtacttttgcattgcttgcacaggcttgtgggcgtgccggaagagggaaaaaagcaggtaaagtgatcttacaaacttatcagccggatcattacagtattcaatgtgcggctgcacaggattataaagcattttacaggcaggagatcgccaaaagacaaatgttgcaatatccgccgatttccaatatactagaagtgttggtgttttctgagaaagaagaaaaagcggccatgttagcagaagtattgaagagtaaaaccatatcgtatcatgatatgatcgtactggggccgaatgatgcaccgattgcaaagcttcgggatgtttatcgcaagattttatatattcgttccaaagattatcaaatgctttgcaatgtgaaagatcattttgagaaatttatgcagacaagccatatgtataatgactgcaggatcacattcacgtttaacaatgaatcttaa

SEQ ID NO: 766 - DNA, 984 bp, Clostridium sp. CAG:230
gtgtttggttttggtcaattgattaacattttaaagaagaatcccaaaaagatcgtgttcacagaaggtgaagatgcacgaattttggaggcttcatcaagacttttagcaagcaactttttacatccaatattaattggaaatgcagaaaaaattgcaatagcagcagaagaatgcggttttaatatccgtggtgctgagattatagatcctgaacactttgacagaatggatgaaatggtggatcttttatgtgagcttcgtaagaaaaaaggaatctcgccggaaagagcaagagagattttattacaggcaaattattttggaaccatgcttgtaaagatgggcattgcagatgcccttctcggaggtgctacatattcaacagccgataccgtaagaccggcattacagttgattaaaacaaaaccggagaacaatattgtgtcttcatgctttatcctggttcgaccaagtgcaaccggtgaaaatgaggttcttgcgatggcagactgtgcgatcaatattgaaccaaacgaagatgagcttgtagagattgccggggaagccgcagaatgtgcaaaaatcttcggtgttgatccacagattgcattcttaagttattctacacatggttcaggaaagggcgatgctgttgacaagatgcgtaatgcagcagagaaaacaagagcaaaataccctgaacttccaattgacggggagttacaatttgatgcagccgtttcacctcgtgttgcaagaacaaagtgtccggagtcaaaagtagcaggtcatgcaaatacgtttatcttcccggatatcaatgcaggaaatattggttataagattgcacagcgcatgggtaactttgatgcgtatggaccgatccttttaggattgaatgcaccggttaatgatctgtccagaggatgcaacgcttctgaagtatattctatggcgatcattacagcagctttagcataa

SEQ ID NO: 767 - DNA, 2586 bp, Clostridium sp. CAG:230
atggagcattatagtgtaaccggtatgagctgtgctgcctgcagttcacgcgtggaaaaagccgtttcaaaagtcgatggtgttacagagtgtacagtcagccttttgaccaattcaatgacagtagaaggaactgcggcaccggaaacaatcattcaggcagtaaaagatgcaggatatggagccacgcaaaaagataaagcagcaggaaaacagagcagatcccaggaagatgagatgtcagaaatagaagataaagagatcaaaacattgagaaaccgcctgtgttcatccgttgtttttttgcttttgttgatgtatctgtcgatgggacatatgatgtggggctggccattgccgggatttttaaaagataatcatgtggcaatgggactgatccagatgcttttgacgatcgtgatcatggtgatcaatcagaagttctttgtcagcggttttaagagtcttttgcaccgctctcctaatatggatacacttgtagcattaggatccggtgcggctttcggatacagcacatatgccctttttgccatgaccgatgcccagatgaaaaatgatatgcatacggttatggggtatatgcatgagttctattttgaatcagcggcaatgatcctgacgttgatcacagtcggcaagatgttagaagcatattcaaaaggaaagacaaccaatgcgatcaagagtctgctacagcttgcaccaaagaaagcttccgtactccgcaatggtgaatatgtagaagtttctactgaggaagtaagagtagatgatcttttcttagtccatcccggagagagtatcccggtagatggtattgtagtcgaaggcaacagcgccgtcaacgaagcatctctgaccggagaaagtattccggttgataagacaaaaggagatacggtatctgcggcaacagtaaatcagtccggtgttctgacatgcaaggcagtcagaatcggagaagatactacattatcgcagatcatccacatggtcagcgatgcggcggcaaccaaagcaccgatcgcaaaagtagcagataaagtatcaggtgtatttgttccgactgtattattgattgcagcagtcactacgattatctggcttttggcaggacaggatgttggttttgcattggcaagaggaatttccgtattagtgatcagctgcccgtgtgcacttggacttgcgacacctgttgcgatcatggtcggaaatggtgttggtgcaaagaatggtattatgtttaaaaatgcatctgccttggaagaggcaggaagaatacgccggatcgcactcgataagacaggtacgatcacaaaaggagagccggaagttacggatattgtggcagcagagggtgtcacaaaagatgaacttttattgtatgcctatgcgttagaaaagaatagtgaacatcctttagcaaaagcgatccatatgtatgcacagaaaaaaaagatcgaggcaaaagaagtggacgaactggaagcattagccggtcatggattacaggcaaaaataaatggcaaaggcttatacggtggcaatcgtggttttgttgaagagaaagtggcggttgcaaatgagatattacaaaagggtgagcagtttgccaaagaaggcaagacaccattatattttgcaatggatcagaaaatgcttggtctgatcgcagtagccgatgtgttaaaagaagaagcggcacaggcggtacaggaattacaggatcttggtattcatgttacaatgcttaccggagatcatgaagaaacagcaaaagcgatcggccgtcttgccggtgttgatgaagtgatcgcaggtgtacttcctgatggaaaggaaagcacgatccgtactttacagcaaagaggaaaagttgcaatggtcggagacggtatcaatgatgcaccggcattaacaagagcagatgttggtgtagcaatcggagccggaaccgatattgcgattgatgccgcagatgttgtcttaatgaagagcaatgtcagagacattccggcaatgatccggttaagtcgtgccacgttacgaaatattcatgaaaacttattctgggcatttatctataatgtgatcgggattccgctggcagcaggtgcatggatctccttattccattgggagttaaatccgatgtttggtgctgcggcaatgagtttatcaagtttttgtgtagtatcgaatgcattgcgtttgaatttatgtaagatctatgatgcaaaaaagaagcataaccataaaatggaagaacccgtcatagaaaataaagcaagttcacaggaaccgctcgcagagcagtcactgaataaaattaagaaagaagaggacaaaaagatggaaaaagaaatgaaaattgaaggaatgatgtgtggtcattgtgaggcaagagtgaagaaagcattagaagcggttgatggtgtgaaagaagcaatcgtcagccatgagaaaaagaatgcgatcgtaacattagaaaaagaggtcgcaaacgatgttttaaaagaagctgttgaagcacaggactatgaagtaacatcgatccaataa

SEQ ID NO: 768 - DNA, 1194 bp, Clostridium sp. CAG:230
atgttaaaaggaaagacagttgtattaggtgtaaccggaagtattgctgcctataagatagcaaatcttgcgagtatgctttctaagcttcatgcagatatacatgttttgatgacagaaaatgcaacaaattttattaacccgatcacatttgaaacactgaccggacacaaatgtctgatcgatacttttgatcgtaattttcaatatagtgtagagcatgtgtctcttgcaaagaaggcggatgttgtattagttgcaccggcatctgcaaatgtgattggaaaaattgcaaacggaattgccgacgatatgctgacaacaaccgttatggcgtgcccatgcaaaaagatcatttctccggcaatgaatacgaatatgtatgaaaattctatcgtacaggagaacttagacaaactaaagagacatggttacgagatcattgaaccggcagtcggactgttagcctgtaaagatgtgggagcaggaaagctgccatccgaagaagttttactcgaatatatcttaaaagagatccgctttgaaaaagatatggcaggcaaaaaagtattagtcactgcaggaccgacgatggaagcaatcgatccggtacgctttatttcgaaccattctaccgggaaaatgggttatgcgatcgcacgcattgcgatgcagcgtggagcagaagttactttagtaacaggacctacgcatcttgaagcacctccgtttgttcgtgctatcccggtcacaagcgcgcaagatatgtttgaggcggttgcatccaatgcaaaagagcaggacatcatcatcaaatcggcagcagttgcagattacacaccggtatcggttgccaatgaaaagatcaagaaaatggatggtgacagtcagatttcactaaaacggacaacggatattttgaaatatttaggcgagaatcgtaccaaagagcagttcttatgcggcttttcgatggaaacagaaaatatgctggaaaactccaagaaaaaattagcaaagaaaaatctcgatatggtcgtagccaataatctgaaagtcgaaggtgcaggatttggcgtagatacgaatgttgttacgctgatcacaaaagaggatgtcaaagagcttccgtgtatgaccaaagaagaagtagcaatcgctattttagatacgatcaggaagaaaatgaaataa

SEQ ID NO: 769 - DNA, 2529 bp, Clostridium sp. CAG:230
atgaaagcatattcgtatgaagagaaaaaggcaacagcacatatcggaatgatcgggacaaatgtgcttattctctttgcgttttctttacttgtgggaattctgttttgcgaattcgtttgtcataagaatattacgatctatcaggggctcgtgcttgtatgctgttgcgttgtcatatcatttctttggtattttttaaaaaggaaagtacatcatccctttttgataggaagtgccgggatctgcctgctttctttgcctggtggtgtcttttggtggaatggtgcattacagacaataaatggcattttgcaatggtatagcaaacgaacaggaaatcttgcagaagaatatgctgtcagtgaccggtttgtggcagttggaactatcttttttgcaagcagtctgttactgctttccttatggatcatacaatattttctggatcgtcggaacgtaccgggcatggttatcggtatgcttccgttttatctggtcgcatttttctttggaaagcattttgtgataatgtgtgcgatcggattgtggatagtatttttgtattgtctgcatgatgcatttcgttatggttatgttctttctgcccaaaaagagaaatgcacaatcgggcttttgacattgtgtatattgttgacagggattgctaccggagcaggaattgtttatgaggatcagtttgtgcagtggaaaagggcagaaaagaacaagatagaaacaaaagcgtttggtacagccgatctttacgaaggcgattttacaggaaagagaaaagcgaccgattcaaaagagctgcgtcttacagtagagacagacagtgacagcgtattttatctgaaaggttttgtcggcagtaattatcaggatcgacaatggaaagcattggatgattcagtatatgcaaagaagcaccaggaacgtttccgctggcttgcgaaccggaattggagtgtctggacgcaggaatttaaagcattgtcggcaacttcttatagagagcagggtacgaagaaagttcgtgttaagaatgtacaggcaagcagaaaatatcaatatcagccgtattttggcatgacaaatgccggaagtatgcttaaaaaaggtcatgacagtacattgcaaaatgaatggtacgctgtcaaaaaagacacgacataccggatgatcgaaatgaaagatatggattatctgacgattcagactttggcacagttagaagccagacaatcccaaaaagaaatatctgattatctggaaagtgaatggacttacagagaatttgtaaaagaagaatatcttaccattccaaaagaatttcaacgcttttttacacaacagatcaaaaagaatgtacaaacaatgtctgtgcaggaaaaagcaacgatgatccgccagtatttattagatctgacagatggaaatgaagagacagccgatgattttactgatcagaactatgctgatccgatccttgcttttttgcagaaacaaagagccgggggaagtgtttcttatgcgtcagccggaacgcttttgtttcggtatctgggagtcccggcaagatatgtggaaggatatgtgtctttaccggagagtatgaacagtacggctgccgatacacagacagatgatgagacagacggaactttgcacgaaaaaaacagcggaatgtccgcgcagactatccgtaatatctatgcagacgaagctcatgcatgggttgaaatctatcaggatggacttggatggataccggttgaggtctctccgaaatattatggagaaggcgagaaggcacacagaaaacagcgtgtggatcaggttaaaacagaagaattgcaaatgaatgttaagatgccgccgaaaaaactttctgagaaacatacaataccgattcagagatacgttggcattatgcttggcatgattgtgctattaattgtatttttgcttttacatcggagtatctgccgatatcagaggaagaaaggaaggcagcagggaacactgccggatcagatcggctatcttgcaaaagaattgtcctattggttaaaagcagatggaatgcatgaaatgatacaaagaagtgatgcctttatcgatcagatgcaaaagtatgagcgtctatctgatgatcgtactcaaaagagcccgtcaaatgattggtcacagcaaagtgaaaatgattggaaagagcatcaagatgaaaaatctaagaatggttttgctaagacagataaatatattcaacggaattttcagaaaaaagcttcttcaagcgattttgcaaaagcaggaaaaaatatatcgtccgatatttggaaaaaggaatgcaatattgagcaggttcttacaattttagagcgaagagctttctcggaagaagaagcaaaagcagaagaaaaacactctatggaaatctacgtagaacatatcagaaagcagatttttcggaacgcaagtcgtttcaaaaaggcagttcttgtaatctggtatggtatttaa

SEQ ID NO: 770 - DNA, 1290 bp, Clostridium sp. CAG:230
atggaaaaacataataatgtcaaagggaaactgatcggtgggattttagcggttgtgcttccgtttctgatcatacagggagtcatttatgagttgcttcagtatggagtgatcaagacggcaattgcatttgtattaaatgcaattgttgcggcaatcgcattttttattatatacaacatttttaaagttttactgcttccgtttcaggctgccatcactggagaaacaatccgaaaaaactcggtggttgctaaaaagatggaaaaattaacttcaagagatgatgagattggcaaagtagcaagagaaattcagtccaatgttgaaacatttgcggaaacgatcagtgcgatccgcatcgcaacttcagaattagaggaagtttctggcgaatttgcacagatgtttgaaaacatgaatgaagtagcggatagtaccaatagtgcagtagaaataatcacagataatacatcgatccaggcagacaaagtaagtgatatcaagaagatgacagagcagatcagtgagggtgtggatcatatcttaaataatgtggaatcattaaagcaaagtgtagatacggtattagattgcaatcatgctgcatccgagatcatgaaagaacttgtagatatcagtgaagaaagcggacatgcaatggaagaagttggcacacagacaacacgtaccaacgagtctgcacaggagatccagaaggtgacgggtattattgccggcatttccaatcagacaaatcttcttgcactgaatgcaagtattgaagcagccagagcaggtgagaatggaaaaggttttgctgttgtagcagaacagattcgtgagctggctgaccagtccagagaatcaacagaacatatcagcgagatcgttaacggtctgattgcaaattcaaatacaagtgtagagattaccaagaaagtatccgaagcttttgaaaagcaggatgagaagattaaagatacagagtctgttttcggtacattaaattccgagatcaagagagtcggttctgcaatcgatgagatagatcgggaggtatctgatcttgatgagcataagaatgtgattgcagaaggtgttgaaaaccttgcacaatttgctcaggaaaatgcagagagcggacgtgttacaaaggaaaatatggacaatcttggacaggttatgcagcagtgtaagatttcgacaaagaagattggttctgtatcagaaaaactagtagaaaagattaaaaacttaaaatcagaaggaatgaaaaaacttcactaa

SEQ ID NO: 771 - DNA, 1905 bp, Clostridium sp. CAG:230
atgctgagaaaagaggagcttatgaaaaatattagttttaaggtagtgataccacagattgttttagcaatcgtctgcattgtttcggctgtatggggaatccggtcaacacaatatctgaaagcagaaagtatacaaaaatcagaagaaaatattaatgcgattcattcgcttgatactttgtcgaatgactttcagatcatgcagaaacttcttttgacgcatttccttaccggtaatgaggacgagatcgttgttgtcagaaataagattgatgacacaataagcaatgtagaaaaggaaatgaaaacctatcagaaatatgttactgatccgacagaaaagaaattatattcggagttcttagagaaatacaattctcttcatgacctttatatgaaatctttgaaatatagtgaaaatgaagaaaaatcggatgcgatcgagttagcaaacggtgatatttctgatgttgaatctgagatggaaggtatcgttgataatctgatcagtaatcgtcagaagtcagctcagaggtctgcccaggaacaatcgaagacatttgataattcgatcagtatgaataatgcattgattgttatttcaattgtgatcagtattattgcaatcatttcatgctatatcacgatcgttacaccgacgaagcgttctatcaaacgtttgcgccatattatcaagaaaatagagaacaaccagtgtgatcttggtgaaagaattccggttcgcacaaaagatgaagttggtcagctcgttatgggtatcaactctatgttagaaacattacagagtgttatcggtgatatttcagatgaatctgttaatttagatcaggctattgctaatgtgacagaaagtgttggcaatgcgaatgtaaattcaagcgatgtgtctgaagtaatggaacagcttgcagcttctatggaagaagtggcagcaactatttcgaatgtagaagacaaagtcgaagcagttggaacaaacatttcagcatttgccgagaagagcgattcgatcatgaaatatgctcagacaatgcaggaaagggcagaaggtcttgaaaagtcagcaattgacagtcagagtgtaacaggtcagatgacaagtgaaatgattgaaaagatcaagcatgcaatagaaaacagtagaagtgtagaacagattgaaaatctgacaaaccagattctttcgatttcaagccagacaaaccttcttgcattgaatgcatccattgaggctgccagagcaggagaagccggtaagggctttgctgttgtagcagatgagattcgccaattggcagacagcagccgcgagacagcgaataacatccagaagattaatgcttctgttattgcagcagtaaatgaattaagtgataattcaaatcagatggtagaatatattgataacacaatcttaccggattatgacggcttcgtagattccggaagacagtataatcaggattctatttatgtcaataatgaaatgttgatgtttgtaaaagaaacagacgagatcacacagatcacacaggagcttgtaaaatctattgaacagatcacacaggttgttgaagatagtgcacttagtgtagaagaagccgctaagggagctgtttctctgtcaaatgagattgctaagatccagcaggatatgaatgtcagtggtaatgttgccacgaatatgaagaaacagtgtgagcgcttcatggatacagacagtgcgaatacagtaacagaagacattgcaacaagcgaaatggaaagcatccatgaaacagactctgaagcacaggaagtttctttagaaacagaagaggaagctgaggatgctgctccaacagttgaagactctgcacaggaacagtcagtagaagagtaa

SEQ ID NO: 772 - DNA, 2004 bp, Clostridium sp. CAG:230
atgaaagaaattctatttggtgctgcatattatttagaatatatgccatacgaccgtttgaaagaagatttagacatgatgcagcaggcaggaatgaatacaattcgtattgcggaatctacatggagtacattagaaccaacagacggagagtttgatttttcttatattgatcgtgtgttagaggaagcacaaaagagaaagatgaatgtgatcatcggaacaccaacttatgcgattccatcatggctcgaaaagaaatgtcctgaagtgatggtatataacaaagaaggacgagccagatacggacaccgtcagatcatggatatcatgcatcctgtttttcgaaaatatgctgaaagagcaatctgtaaactggcagagcatacggcagcacatccgtcagtgatcggttttcagatagataacgaaacaaagcactatggtacagcttccagagaagtacaggaacttttcaaagaacatttaaaagaaaaatatcatacaacagaagctttgaataaagctttttatctggcatattggagcaactcgatccatgactgggctgatctgccggatatgttaggctgtattaatggtggactggcaaccgagtttgcggcatttcaaagaagccttgccgcacaatatctgcaatggcagtcggatctggtttcaaaatataagaaaaaagagcagtttattacacataattttgactttgagtggaagaagtttggggcagacatcgcacaggacggttattcttatggagtgcagccggatatcaatcactatgaagcatccaaagccgttacgatagcaggaacggatatttatcatccgacacaggatgaactgacaggagcagagattgcttttggcggtgattcgatccgcagtttaaaatatgataattattttgttttagagtgtcaggcacaagcttttaaatattggacaccatatccgggacagctcagattacatggatacagtcatttagcaagcggtgcgcagagtattttatattggaactggcattcaatccataacggatatgaaacttattggaagggtattttaagtcatgatcttgcaacaaatccgacttacgaagaagcaggagtgatgggacgtgaatttgaaagacttggacaagatacgctttgcattaaaaaagaaaataaggttgccctgatcgttgataacagatctcttgacgcattcaagtggttcccgattgataaagatctaagttacaatgacgttgtccgttggatgtatgatagtctgtatgagatgaatatggaatgtgatattttagatatccatgctttgaatgagagaaatattgtaaagtacagtatgcttgtaactccggttttatatagtattgcagaagaaaagattgctctgatccgtgagtttgtcaaagtaggcggtgtattggtaagttcttttaagtcatttgttgccaatgaagaacttagtgtatatccggatgcacagccacatggtatgacagaatgtttcggtatgcattataatcagtttacagaaccgggcaagacaaaatttgccggagaaccattgtcttattttgcagaattacttcaggtaacgacagcgggttcttatgaaaactacgatcataaatattggggcagatatgccggccttaccgaaaatgcatatggcaaaggctgtgcattttatattggttgttttacatctaaagagatattaaaaaagatttaccgcaaagcatatgccaaagcaaaagagactgtccctgcatttgaatggcctgtgatcattcgcagcggtatcaatgcaaagaacgatacgattcattttctattgcattatagtgaagaagaatgtgagattacttctccatatgatcatacagtagatctgctgagtggcaaagagtatcaaaaaggcgatacgattcatctgactgactgggatgtctgcgtcttaaaagagcaataa

SEQ ID NO: 773 - DNA, 1323 bp, Clostridium sp. CAG:230
atgatgagcgcaatattaacaacttaccagggagcttttttagggccgattgcccgtgtactcggaaagattcttgaggcaatttattatgtattgtcacttgtaggaattgaaaatacaggtatttgtattgttttatttacatttttggtaaatgcattgatgcttccgcttcagattaagcaacaaaagtttgctaaaatgtcgaatataatgaatcctgaaatcatggcgattcagaacaaatataaaaataaaaaagatcaggcatcccagcagaagatgtcaatggaaacgcaggctgtatatcagaaatacggtgtcagtccggcaagcggatgtcttccattgttgatcacatttcctattttatttgctttgtatcgtgttatttataatattccggcttatgtaaatcaggtatatgatatttatgccggtgttgctggaaatttaaaagatttagatattacggtagcacagttagctgactttatgaaaacaaaaacttatgtagtaacaaatgcggtaaatgatgctgcgaaaactgctgcaaagacggatattaaatgttatatagatgtcatcggtcagtttaaccaggaggcctgggacaagttaaagaatatggatgtgatacagaatgcgaaaggtgcaaaacaagtattaaaggaaattacaagtacatcaacgcgtgcagcatcaattaattctttttttggaatgaacattgcagatgcacctaaagtcccatttgttggtggaaacgctttgacacttggtttcagcattcctgttttttctgttattacacagattataagtacaaagttaagtatggcaggtacaccacagcagaatatgcaggataatcctactgcaaattctatgaagacaatgaatacggtaatgccatttgtaacaggtgttatgtgttttatgttcccaatcggtgttggtttatactgggtagccggtaatgtatttagaatttttcagcagcttttcattaatctgtattttagtaaagtagatatggaagaaatgttagcaaagaatgccgaaaaagccagagagcgtatgatcaagcgaggtattgatccggataaggttcagaattatgctaagacgaagacaagcacaatcaacaagaatacaggatcacagcctaagaagaatactgcaaatgtaaataaagctgttaataaggcaaagaagagcgattataagcgtcctgaaaattcaaaatacaaagaaggcagtattgcggcatatgcaaatatgttaaaccgcgataaatcgcaagatacaaagaaaaattag

SEQ ID NO: 774 - DNA, 2361 bp, Clostridium sp. CAG:230
atgagagtgaataaaaagaaaatggcagcagccggaatcagtgtattattagcttcaggattgttagtaggcagtgtggaatatgcttctcatacattcgcattgagtaaagcagccgcagcagggaatacaaagacagtaacagaaagtgtcaatacaaaagcagcaaagaaagcagatgcttcaaaggtatcaaaagaagaaacggtatatgttacaatggatgctaatggaaaaaaagatgaagtgatcgtttcagactggttaaagaatgcaggtattaatggaaaaatctctgatgtttctgatctgaaagacattcagaatacaaaaggaaatgaaaagtttacacaggatgacagcactctgacctgggatgctaagaaaaatgatatttattatcagggtacatcagacaaagagcttcctgtcggaatggagatatcatataaattagatggcaaagaagtatctgcaaaagatcttgccggtaagagtggaaagtttgagatgaatatcaaatatactaactcttcgaaaaagaaagtgacggtagacggaaaagagacagagatctacacacctttcttaatggctacgggaatgatcctttctactgataaattccagaatatcaaagttgataatggcgaagttgtttcagaaggagacaatgatatcattatggcatatggcatgccgggattaaaagacagtttagatcttgcaggacttgattttggcgatgatgttaccatagataccgataagatcaatgacaagattacggatacggttaagatcacagcagatgtaaaagattttgaaatgggtgcttcttatactgtagcaacagcaagtctgttcaaagatattgactttggtgatattgacagtctcgatgatctggatgataagatggatgacttaaaggatgcagcaaataagcttgtagatggtgcagatactttaagtgatggattaaagacattaaacagcaatatcaagaaatacaataaagcgatcaagacattgaataagagtgtcggtacattaaataccggtgctacaaagttaaaaaaaggagtcggtacttatacaaagtcagcggataagttattcaagggtgtgatcaaatactctgatggtacaaagacatttgcacagagcactaagaaatatacagccggtgcaaaagcattagtcgatggtgccggtaagatttcttcttctgcagagcagttccctgcttcttataaacagttcaatgacagcttaacctcatatgtcaatggcgtaaacacacttcttgcagaagaaaatatgacaaagctttcaagcggtgttaattccttaaaagcaggtgtagagtcgttagacagcggtctgacatcagcgatcagcggtgttgatacgatcaatgttgttgcaaagcagttagaaggaacagatgcaaagacaaaagcattaagagacagcattaacactacgaaagatgcgatggaaacagctgccaagaatgcagcaacagagcaggagaaagcaacttatcaggcacaggttcagttatatgagtctatgcttacttatatggatagtgttcagaaagccggtgtaggactggatgcggctacaaacggtaaaccggacagcgaagtcgctgatcagaatggcaagacagacttaaaacttggtcttcagacaatggaagctgcaacaagcaagacctctacagagacaaatctttataacggattaagtgcattacagagcagtgcaaagacaatgtctgatagtgcagcaacgatccgtggttataagacaccgatcctagaggcaagtggaaagatcaatgcaagtgtaggtactttaacagaagcggtaaagacattatataagagtggtacaacattaactgctaacaataagaaattaaatgatgctgcaacgacattaacaaagagctctaaaacagtaaaatccggttctaagcagttaaaagctaacagtggtacggttcgcagcggtatgagcacattagcaggtggtactaagaaactttacaaagcaacgaacacattagttactacaacaaataaagtagcaaaaggtgttaacaagttagacaacggtgcttccaaacttgcttccggaacaaaagaattcaaggaagatggtgttgataagcttacagataccatgaacagcattttagatggtgtaagtgatacaaaagacagagcagaagctgtaaacaacgcagcagcaaattataagagcttctcaggaatctctggtgaaatggacggcagtgtgaagttcattatgacaacaaaagaaattaaagcagacgacaaataa

SEQ ID NO: 775 - DNA, 1608 bp, Clostridium sp. CAG:230
atgacaaaaatattgatcaaaaaacaattgatggaagtattctcctggatctatcaggacaaaaagaccggaaagaacagagataaaaaggggctgctattgtatgtttttttctatgtttttctgtttggttttctggcagttattttttataatatggcagcttctttatgtggtccgttggttgaggacggttttggatggctttatattgcattgatgggaattgtcggaatgtcacttggtgtgtttggcagtgtttttaatacatttgcaagtctttatcaggcaaaagataatgatctgctgctttcactgcctcttccgacacgaagtatattgatcgcacgtctttttggagtctatgcaatgggacttatgtatgaacttttggttatggtacctgctatgatcgtttattttatgcatgtgtcacctaatgtttctgtcgttatctgctgcattctgatcatattgctgctttctgttttcattttgacattatcctgtgttttaggatggatcgttgctttcgtcagcagtaaattaaagaaccagaagatcattactgttttgatctcattggctttctttgctgcctactattatgtatgcggtagtgcaggaaacatgatgcagacattacttcttgatccggcagggatggcagataaagtgaaaggaatcgcatatcctttataccagatgggacttgcggcagaagggaaatggaatgcgtttcttttctttgcatttgcagtgcttgtattatttgctgttatttattttatattacaaaaaagctttttggcattatccattgcaaacaaaggaaataaaaaggcagtttatgtggaaaagaaagcacatacagcttctattccacgggcgttgctgcgaaaagaagtttttcgttttacgcaaagtccgatctatatgttgaattgcggattgggaatcgtatttattctttttgcggctgtaatgttgcttgtaaaaaagggaacagtcgattcgcttcttatgatgtttatcggatatgaggaccggatcgctctggtcgcaacagcagcaatctgtatgctcacaacaatgaacgatatggcagctccgtctgtttctctggaaggaaaaaacatctggatcttacaggtgcttccggtatcaggctggcaggtcttaaaggcaaagcttggcttgcaaatcatattcaacctgattccaacgacatttcttattatctgtgtggaatggatcttaaagcctgcagcagtttttgttgttctgctcccattaacagtagttttgtttattattatgatggcagcttttgggttgacttgtaacttaaaagcgccaaatctgaaatggacgaatgagacggtaccggtcaaacagtcaatgagtgttacggcagcattatttggcggatggatcattgttgcagcattttgttttatctattatttactctataaatattttgaagtgaaggcactttcttttttagttggattagatgttgtacttgctgtgctttgcattttgcttttgaaatggctttgtaaaaaaggcagttttattttcgaaacgttgacaaatgcttaa

SEQ ID NO: 776 - DNA, 2352 bp, Clostridium sp. CAG:230
gtgaaagcggaattgaaaaggaacaatgtaaatcagatcattaaggggacaaatatatttgaagccggggacgaagtgacggaaattggtctcgtgatcaagggaagagtgtgcgtgcaggcggatggtgtgaaaacagtgataggttccggcaattttctgggtttatgtgatctgacagaaaaagtacatcgtgtgacatatacagcagatacgaatttagcagtatatgcttttgaggccggtagtctgtcttcgacgatcagaagtttaatcaaggcaaataaggattatgcacctttgatggtatcgacattaagtaaatatataaaagaaatttctaagatttttgatacattggaaaatgcgaccaatgatgtctggcagaatatgaaagattattaccagacatatctttcaataggaaaaaagacaggagctcagatcaatgtgctcagatcaattgaaaatcttccggtatttgaagcggaagaagaattgaatttagataaagttgaatattaccgtgcttgtgcagagcttccgacagaaatccggaaagcttattttggtgcgaatatggttattactatacagcatattacagagcaggttgaagtagtaaacagcctttttgaacagtgtaagaaggatgcagtctatttaaaaggacttgcaggtccattagttcttgatgacagaagcctgtatatgaatgttttgcaacaggcaaccgtgttacagcatctgggcacagatatttccgatgccacttctcttttagacgatgtgatcgatcagatcaattctttggaaaatctgatgttagaatgtgccggagttgatttgcagattgatcatgaatttatggaggaagcttattttgaattgttaaacggttcgaatgcctctttaggtggttctgtttctcagagtgatgcaggtgaatttgcacttgtggaagaccattttgtttcaacagatgaattgatggatgcgatggatcagattctttcttttgcagagattgacagcgaaaaggagcaggaatttcgaagttatatccatgcatttgaagaactgggtgataaattttcgacagaggatacagcacgtactttgcgcagaaatatattaaaagcatactatccgatttataaagccgtttttttgaaagactatcattcttcggaaaaaacgcctttggtgattgatctttttcttcgatttggctttttaagcgaacgtctgataacggaagatatcttagaagaacttgcaactctggatatatctcattcaggaacaggtgcctgtgatgtatatgatatgaaggaatggctcacattgatcttagagggcaaaaaagaaccatctaagagtgaattcgatatggattatgatgagaacctgcgagatatgaaacgtaccggacagattacggcagagcaacagcaggcgttgtcaaagaatctgaatgcaaaattcgaatatgagatccagaatatgtttcgaaccaatcatcgccttttgttttcgcaggttacggcattcgttccgtttttatttacagaaggctgtacgacttcgatttcaaagagctttttggcaaaagatcgtatcaatgcagcaatccagcgtttgctgcagatcgacttttctgtattttacagagaaagtctttatgcaaaagagggaagctcttttgcaaaagaatatattcagcaggaagtatttcctgatgtgatcgttcttccgggatatggaaataaaggcgttatgtggcaggaattaagcggaagacgcaggacttcgaaaggaagatttttactgccgatctttatggaaagtgatcttgaggcagagatggttcgattgttcggacgttttcgttgggagctttgccgaacgatacagggagcggcatggaacaatattcaggttaaatctcttacaagtgagtatgcagattttattcaattttataagaagaacagagatctgtcagaagataagaaagaaaagctaaagatgcagatccagaaatgcagaaacaatacaagagaggtatttgttagcgattatgagaactggatccggcatgaagcacagggcggtatgtgtttaagtaaacctgttcgtgagattatggctacctattgcccatttacaaaagaacttcgtgaaaaagtaagtgatatgccgatctatcgcgacgctatggcaagattccagcgcgaacgcggtaagaagttaaaagaatacgatctgaaattcaaagtatggcagaaagatggaatggatgtgccccaagaggttgtacataccagagatttctatctggaattttaa

SEQ ID NO: 777 - DNA, 1248 bp, Clostridium sp. CAG:230
atgacaaagaatacgattcctgttgttttttcagcagatgcaaattatggatatccgatgatcttttcagtactttcgatgatacgccatgcaaaggaggacacccgttatgagtttatacttctggtgtctcatgattttccgcagaaatataaagatgtgatcgaccgacacgccaaagaagcagatatgcttgtcagatatattgatatgcaggatgctttcgaagatgtaaatatgcatattaaacatattacacaggcgacatattatcgtttgaaactgccgggacttttgccggatatagacaaatgcctgtatctggatgttgatattgtggtacagaacgatctgacagaattatatgaacaggatatggaagagtattacattgccggtgtcaaagcagcagggtattattatccgccggaaaagaaacagcgtaacatggatcgtcttgagatgccggtttttgaccaatatatcaatgccggagtgcttctgatgaatttgaagaaactgcgggaagatcatatggaagagcagtttgaaaagctgatggaacgcgattactccagtcaggatcaggacattttgaatgtggcatgttatggtaagatcaagatacttccattgaaatataatgtgatgaataaatactatgtcagtcatcccgaaaattatgataccgatcagagagtatccgtctgcttttcaagagaagagtttgaagaagccgggaaagatccgtacattatccattttgcggatcgatggaaaccatgggatgacatggttggtgacatggcagaaaagtggtgggaagaagttatggcttccggtgagttcgtacacttttttgaagatttttatttagagatccagaagcaccagcgtcgcatcagtgagacaaagcagaaagaaaatgaagcttttcgcgagaaagtgctgaatgagagaagaaaaattgagaataaatataacaaagtgcgtgatgaaaaagcagcacttcgtattgaaaaaaatgaacgcattaatggtttgaaacagcgtattgcggagaagaacgagcgtattaacggtttgaaagaaaatgtagtcaaaaagagagaaagtattgattcgctcaagaagagaaatcaggcattgacgcaggagatcgcgcagattaaaaattccagatcttataagatcagccgtgcgcttacctggcttccaagaaagctgaaaagtcttttgaaaagataa

SEQ ID NO: 778 - DNA, 1596 bp, Clostridium sp. CAG:230
atggaatatgattttttgcagcaatttgccaaaagaatgaacagcgtcggaatgtatgcgatgcttatgaaaaacagttggcagaaaacaacatggaaaacatttgatattgagtctgtggaagaacagcttaatatcattttttctgtattgctctatatgatggagcagtcgttagaagaagaaatctgtacaatagatgatattgccgcttatctggatgatatatgcaatcattttttcagaaagcggtattcttttgaacaaagcaatgcattggcggattttattgtaaacgttgtcttatcggatgaaggccgggcaatgtattttccgtgttttaattttgagaaaaaagagtatatcgatacgcatatcagttatatcgaaaacagagttgtttatctggaagatcagaccaaaagaacctcatataagctgaccgatcaggggtataacttaattctttctacattagaaatggaaggaaatatgaaacttagtgtgcatgagatgatctttcggatgcatctggaacgttctacttatgaccgggcattagaagagatcaaacatatctttaatctgttacagatccgccttcaaaagaacgaggaagcattaaacaggatacgacgcaacgccttggaatattcggtagcggaatatcagaaattattggaagaaaacttggaaacgatcgaacatacacaggatgaatttgaaggatttgcaaagctggttcgcaagcgcacactggagttagaacaggcaaatatcaatgtaaaagtattaggaaaagaagatgccaaaaagctttccgatctacaaaagatcgaacgatatttgcaagatgcattggcaaaacaccaaaagatcctcggaatgcattttgacttaaaagaattatataccagggaattagaacagttgtcacagatggctatgatcaaacgtttttctctgcgcaaagaactttttgacaaagtggtcgagcatccggggaggcttaccaatctcgaatattttcttcgtccgctttttatacaggatcctaagaagatctataacttaaaccgctgtctcgaaccgcaaaaagtgatccgaaaagaaaaggaagaagagacacaggaattgatcgaattcgatgcaaaagagtttgaagccgagaaagaacgaaaagcaaaaaaacgtctgcaaaagtataaagaaagcctgcaaatgatgctagaacttgcatatataaaaaagacaattaccttaaaagagattgccggtcgggaagctgctattcagaacaagattgtttgtgaggtcggtatttttaaagaaatcatggtagaactgatccgaaacaaagaaatcgaccttgttgcactacagcaggagaaaaaggaaagttttgatgacaattctttgcaatttcatttacaggaaatgatttatgagattataaaagaacagggctggagtgctacagacattatagtcgaaagaatggaaccacaggaaacagttacttttgaaaatgtatcggatcgggagaatgctcttactacgatacgctgctcgaatgtaagtattacgatagcataa

SEQ ID NO: 779 - DNA, 1860 bp, Clostridium sp. CAG:230
atggggatggcattactgtgtacattttcattatttatgggaatgatagccaatgccaaaacaaaaacatcgggggtacaccagaatcagctcgaagagtatattttaaaagaaatgccggaggctcatgttccgggcatgaccatttctattgtaaatgataacagagaattgtattgtgcggcatatggtaccgtgcaaaagacagaggcggattttacaatgggagcattatcccagacgataacagctgctgctatattgcatttgcaggaagaagatgaactaaagcttgatgatacagttggcgattatctgaccgattatcattcggctgaggcggttacgatcgagcaattattaacacatacaagtggtctttctaaagattctgatctgtctgatatcaagctgaatgatgagtggggagattatgcttatgcagatgtcaactatatgttattaggtaagatcattgaatctgtgactaacatgacttatgaagaatatgtttcggataatatttttgatgttttggatatgaattctacattttcactgtcaaacagcaaagaattcagtgaaaatattgtaacagggtatcagacttattttggtttccatgttccaaaagagattgatgcacagaagaataaggaagatgcggcatcaaactctttattatcgaatgtaaaagacatgggacgttatttgcaaatgtttttaaatgatggtggaaaagtcttagataagaaaagtgttaagaaaatactgaaaggtcagggagatgttacggatgcagaggcttcggatatgctttttggtactaaagtgtcatcgggcatgggttggatggagacaaaactagccggtacaagagtgctttatcagttaggaacagcacagaatgcaacaacagtcgcaatgcttttgccggaagaaaatctgggtattacgatgatgtttaatacaatggattatctggtagggcaaaaactgatccagaaaatggaaaaaggcattttaaatattgttcttggtaagacagcagatgaaatcggcagcagtacttacatgacaaaatatgcaattgttgatggtctggtcgtgcttgcacttgttctggcatggcttccgatcatgatgatgggattctggagtcatagaagaaagaatcatatatggagcattggtggaatttgcattgatggattgatccatctggttgtgcctagtgtagtcttaggattgctttatacagtagcacagacagatctgctccgtagttatatgccggatctgttcctggcgatctgggcatttgcaatctcgttgtatatcggagcagtgatcaagctgatcgctatgtttgtctatacaaaaaagaagcatactgcgggagttgagttggaagaacagactgttgaaagtgaagaagcagctaacagtttagtagaaaagaatgaagacaaatccgttgataaagaggatacagaagcttcaaagacagaagaaaagccagccgacagtacaacagataatacaggtaagatggaagaaaagtcttctgaaagcaaaacagaaaagagcgaagaaaaatctgctgacagtaacgcagaaaaagcagaagacaaaccggctgcaaaggaagaggataagccagaacaaaagagcaaagaaaaatccgctgacagtaacgtagaaaaagcagaagacaaaccggctgcaaaggaagaggataagccagaacaaaagagcgaagaaaaatccgctgacagtaacgcagaaaaagcagaatacaaaccggctgcaaaggcagaagaaaagtccgaacaggaagcggcagcaacaaaggaatag

SEQ ID NO: 780 - DNA, 4539 bp, Clostridium sp. CAG:230
atgattatattttatatagataagacagaaagcgagggatcgtttatgaataatttgaatagaaagaagattactgtagcacttagtatactgcttgtattagtagctgtatttggaacttttacatatatgaataaggcaaaggcgtcaggaaatgttgttattgatggaattacttggggatttgatattaacgaaaacaatgaagctgttaatttatatgcaccgtgggacattaccacctccaccatcaccatccccacggaagtaacgtataagaatgttacctatccggtagtgagcgtgggaaaaacaaatgttagtaatgaaagcagtttatttttcggttcactagaaccaaacacaaccgtaagctttgcacaaaaggatggaaagacaagcattacaaagatcaatgcgtatgcgttctgtggctgtaccaatatccagtctgtgaatattcccaatagcgtaacggaaattggggattatgcgttttataattgcaatttgataaaatcagttaatattcctgaaaatgtaacagtaattggagaaaatgctttttataattgtggtaaaatttcaagctttacaattccatatggtcttaaagaattaggcaagaatgcttttggtcaatgcaccggggcaacatttacgattgaaaatcctaattttgcaaaagataatttaacaaataccggaattacatatgttaccggatataacaattcaacagcaagagaatattatgtgaaatccgtcatgccgactttagatgatggaattaaagaatctcgttgggtttcccttgacggaacaacgaaaacagatggcacaacctatccaaaatctttcaaggtcatggtaaaaacagatacagatgttaccgttacttccggcttatttaaggattatttctatggactggcaggcaaagaggtaagtgatctgacaaaatgtgccacaaagccttattatacattagacggttattatcttggaacggatgataacgcagaatgttactatacatatgataaaacaaatgacaagatgatcacaaagaaaagcacattctctgctgattatgcagatgatatcatggagctgacaccgaaatttacaccaaagtcttatgatattgtttatagtctgaatggcggtcagtggaagaaaggtgtttctgctgatcttgaaaatacaaacaaggaacagtatgtttattcagtcggtaaggtattgaacataaacgtagagaagagaggatatctttttacaggatggtatgcagatattaataatccgattgttctgacaacgaaagtaacagataccgagcatggtttgaagtcattccttgcaaagtggtctccgatccactatgatatcaagtttgataagaatacggcagatgcaggaagcatgacaggacagaatatagcatatgatacaacaactgctctgacaaagaatgaatatacgaagaaaggttattcttttaacggatggaatacaaaggcagacggaagcggtacaaagtatgctgatgaagcagatgtaacaaatctttcttacacagacggagataccattacattatatgcacagtggtcagccaatccatacaagctgacatttaatgcaaacaaaggttcttgcagtgaagcatcaagaatggtcaaatatgacagcacatatggagtattaccgactgccacacgtatcggttatacatttgatggatggtacacactggaaaataacggagtaaaggtaacaaaagacacggtaatgcagtccgtatatggtgagacagtctatgctcactggaatgcaaattcttacaatattcgttttgacggtaacaaggcttcaagcggaagcatggatgccgaatatatcctttatgatgaaacaaagccgttaacagcaaacgcctacaagaaaaccggttatacatttaccggatggaatacaaaggcagacggaagcggaaaaacgtatcatgatgaagataacgtattaaatcttgccacaaacggagtgatcactttatacgcccagtggtcagcaaatcattatagtgttgtatttgacaggaatcatgcaaccggtggtgtggtaggagcagtatcaatgatctatgatcagtcacgccagttaccggcaaatggttttacaagaaccggttatcagtttgacggatggaacacaaaagcagacggaagcggtcaatcctataaggataaggcttatgtaaccaatcttgccacaagtggagtaacaaccttatatgcacagtggaaaccgctgacagatacaagatatacggtttattatgcttatgagggaattccgggacagcagaataccggatggtttgagacacaaagacgtggaacgacagatactatggtcaagcccgacctttccatgtttgcaaagaccggctttatcacacccgaaacggaagaattaaagatcaaaccggacggaagcagtgaagcattctatactttcaagagacagcagtatacgatcactgtcaatgataatgataagaagatcaagaagtggaacgcaccaaaaacagcttattatgaagaaaaagtggatgtttcttttgaaacaaatgcaggctatcaggcagccggtattacaacagacagcattgcactggaagatgtcacacagacaacagcacattttacaatgcctgcaagcgatattaccttgaccgcaaaggctgatccgttaaagtataccatttcttatgaaatgaaccacggaacaaattccggaaatgcagttacggaatatacttatggtgatacggttgccctaccggatgcaagcaccatgtctttaccgggatttgtttttgacggatggtacacaaaagagtcattcgatggagaaccggtaacgcatatcctgcctgatatgatcggtaacaagactttttgggcaaaatgggtttccggcaactacaaagtaacattagacgcacaaggcggtacgatcaaggacggtaatgtaacggaatatacttattataccggggcaaaacttccgaccaatgtagtaaaagacggctattcattcctcggatggtgggatggatataagacagctacagagatcggtaacacggaatatggcgataaaacctatgtggcattatgggcagataacagttcaacagcatatacttatgtggatggtgatacggttaatctctatgatgtaagtcaggcagttgctatgacagaaacgattgatacgaaaaataccggttattattatacgcagctttctgctaatgcgaaaaaagcatatgctacattatttgccaattaccgttttgtaccggaagaacgtactatcagaaaaatgaatgctttaatctttacttctgacgtagaattatcaaaaaaagatttattagatgcacagatggcatttgtatatgatcatccggaagtattctgggtaacttatttcgcaaagagcgatgtgaataacgtatcaggagtaaataccggaaagcactattatatgtattctccggtaatggcatatgatgttgctttatgcaaaggagatgcagaagcatattatggatatttaaatatggcactaaatgctatggatctgaaaaagagtgatacgacatatgacaaagttaaaaggatccatgactacattattaaaaactattcttacagcacatatggctataaattaaatggaaaaacagcggatgacacacgctctgttggtagaatgcttactatgaagagaggctgttgtgtgggatattccaaattaatgaaggcgttttgtgattattatgggatttcttgtacattagtttccgggacagatcatatgtggaatgcaatacagataaatggaaaatggtatgctttagatgtgacatgggatgatgcggatggaaagcaaaagaatagcaaagagcaatatcaatatttcttaaaaggagaaaaaacatttttagccgatgtcagtcacagggttgtaaactgtatgtttatacaggataaagttccgatcacagaatatgcctgtctgacagcacctatattagaaaaaggagattatggtacgcagacatctgtaaaaaaatcaacagctaacacaaagattacagtaagatcaggcataaaatataaaatcactcatacgaaaaagaaaacggctgcagtgatcggtgcatcctcaaagagtattaaaaaagctgttattgcaaagacagtaaagatcaataagaaaacgtataaagtaacggcaatcagcaagaatgcgttcaaaaactgtaaaaaactaaaaaaggttattattcagcaaggaaaactcagtattggaaaaaatgcttttaagggaattaacaaaaaggctgcattcaaagtacctaagaaaaatctgaaatcttataaaaagatgctgtctaaggcaaagacaggctgcaagaagacgatgaagattgctggctggaaagtaaaaaaatag

SEQ ID NO: 781 - DNA, 2121 bp, Clostridium sp. CAG:230
atgaattttttagaagaaaaagaacaatatcaggaacgttttcaattagcaacagacaggatcagacagattcgggaagaatgtaacagctcttctaaagagtcttttaacgatccggctataaccgaaaaaacagctccggctattgcaacacgcggagaagcttttatgcaatacagctattgtgtatcttcttttcttttaaagatctgttctttctatcaaaagaaaatgaatggtgagctttccgacctttctttacaggaatggcagagtttaaaccgtgatctttacgaggatgtcctggataccaattacgaaaagagctttgcaaatcctgcctatgcctgtgaaaggttaggacaggattatgggcaggtgcttagtgctgtttatacagaactccgcggtaatattgtatatgcttttgaagaccgtcttttctttctgactacttcctttgaattatttatcgagatctataatctgttagaacaggaagataccggtgcaaaagagatccgttctgcattatactattacttctttgattatgcggatatcaccgttgccgacagcttacatgattcctttgatccgtcaagaaattttgcaaccgatatcatttgtcattgtgatttagaagatttacgatacctatattattttggtgaatatatttctgaaaatgagctggaaacagcaaaatatctgaatacgctgtcagacaaacagatccatgatatggcttttacattcaccgacggctatcgcagaggctttgcattatatgacattgatctttctgtcaaaaagacagtcaatatccgttaccatcttggctttgaacgtctgatacgggaagtcattgcacaatttcagaaattgggcttacagccttgtatttatcgtgccgctgtcagtatcagccgcagaaacctgcgtggcaaagtcggttattatggtgcttctccaaacaaacaatatgaatatgaccatcgtatggatgatgcacttttttatgacaaagcttatgcagaccgcagattacaagagcaggaactcgcattaaaatccatcgaagatctttgtatggactttgccggtcctgccctgatcgagactttcggagagacaccgtttaacccggttgagaaaaaagaagctctccaatatagtgcgaaacagcaaaaacgaaaagtcgaataccaggcagctaatggggcattagtcaaccgttttatccccggagaccagacaagcttttctatcattgcttatcctttaccggagattggaaaacagtatcaggacatttttgctgatacaatttcggtgaatacattggatcaggaaaaatatctcactatccagagtaagatcattgatgctttggatcgtgccgactacgttacggttacaggacgcaaaaagaataagaccgatctgaccattgcactgacaccgcttagcgatcctgcgaaagaaacacgctttgagaattgtcttgcagatgtcaatattccattaggtgaggtctttacttcaccaaaattatccggtacaaacggaacacttcatgttacaaaagtctttttaaatgatctggaatatcatgatctgtcactcgtttttgaagatggtgttgttaaagactacagctgtagtaactttaattccaaagaaaagaataaaaaatatattcatgacaatattctattccaccatgatacgcttcctatgggcgaatttgcgatcgggacaaatacaaccgcttatgcgatgggcaaaaaatataacatttcccatctgcttcctatcctgatcgcagaaaaaacaggtcctcactttgcaatcggagatacctgtttttctcatgaagaagatcttgtcacatacaacccggatggaaaacagatgatcgcaaaagaaaatgattattccgttttgcgtcataccgatgtgacaaaagcttattttaattgtcacacggatatcacgatcccatatgacgaattgggcgatattcgcattcattgtgctgacggagaagtaatctgtctgatacagaatggacgtttcgttcttccgggaaccgaatcactaaatgaaatgctgtaa

SEQ ID NO: 782 - DNA, 2268 bp, Clostridium sp. CAG:230
atgaatcattttaagcagagatctgtacagtcagaagaaagtttttttagtaataacgaaaaagaagttacgcaaatgatctgccgtattatgtcatatgcattttgcatttatccggtcatgcttttactgaacgtgatcaatctttttaaattttccaatcgtgtaatctttttgatctttgtggtgggaattttttgtacgctatcaccacttttactttccaaatttgtgaagaatcagacatttatgaagtattatactttattatgtattattacagttgtaagtgtacttggcacagaatattatgtcgggatttacattacatatattattgctccgattgcgagttgtttgtattttgataaaaaatttacagcgaggattttatctatttcctatgttgcttttctgatctcatattttttcaggtcttttcagatcagagatcatctgtatcctacagaaacgatatggccaacctatattccgctggctgcgggttttacgattgagttctttgtcagtcttttgtttttatatcgtctggctgacagaatccataattatcttgttgatcaaaaccgtctgatcaatgatatggcaagaagtgaaatgaaaacgcaactggcaatagaagcgacaaaagatattctttttgaatatgatgtgaaaaaagatacttatagcagtaatggcacgatttgtgactggacgcgtaaagatgtttatctggaacattttaaggaatatgtccgtgcaaagaattggcggaccgaagactttccggatacattaatggaatttgtgcatatgccggtagaaaatggtgaccgttttcaaaaggaaattgatatcagttttatggaaaatggacgggagtatatttcatgggctttttttgaggttttgatcatccgcgatgagaccggaaaatccgacacgatcgtcggaaagcttcgcgatattacggagcagaagatagaggaattgcaagcagaggaagcaaaaaaatatgatgcattatccggtatgtataattattccagccttcgtaaggttgtgcagggcatggaagtaatgtacaaaaataaaacgcatcagattatgatcgtacatattcgaaattatgataacattgcagaatgttatggagaggtatatcgtgattttgtgttgatcaatgtagctgatgcgatcaaagaaacggctgaaggaaaagaagcatatacctgccggttatcaaaggatgcctttgcaatctatattccggattgtgatctggtggatgcaagatccatgcgtcaggaactcaatgaccgtttgaaagaaatttatgttggcgaaaaagaagaaaaccaattggtctatgattttggatattatcttggcagcgaagaaatggatgaaatgttcaaatatgcagcacagtacgtttcacaggataaagaaacagaaagttcttttttaaatgagttagaggattctttacaatccgaaaatatatttgttgtgcaagatgtaaaatataatgaagtatctgaagcacacaaagcagagacggcggagaattttataaacaatctctctttacagattgcatgtgtaaaagacagaagaagtgcgattcagatgacactggctcatgtaggaaggttttttggtttatccggtgtacgcatttatgaaatggaaaaaagccagaaaccgattcttccggcatttgaatggatgacagataaaaaagtcgagaaagcatataaagaaagtatgttaagttatcaggtgcgttcattttttgctgaaaattttgagaagagccgtattgtggataatacaagtggagcatttcaggatttcttccgtcagtttggaaaaacaccattgttgttagaacaatattcgagtctgatctgtcccgtgttggatgaaggacaatgttgtgcgctcattatttatgatgttgcgaaagatgccggtgaatgggatgatactttcaaagagtatatgatagatgtcagtaaattgatcggtaataatctgcttgtatattggacagaaatggaaaattgctccagggatgctgttttggcggatatttcgcatgagatccgcacatcaatgaatacgatcgttggtatgaccgaaacggcaagagcagaatacgagaataaggatcaatggatgcaatgtttaaaatcaattgataaatccgttgatcatctggtagaagttttaaaaaaattatctgatcagacagaataa

SEQ ID NO: 783 - DNA, 1884 bp, Clostridium sp. CAG:230
gtgacagtaaaagaaagatattttatttctcaaaaagactgtcacaaaagagaggaaataattatgtgtggaattgttggatataatgggaaaaattctgttacggatctgcttttagattcgttggaattattagaatatcgtggatacgacagtgccggacttgctacaatgaatgctaataccggtaaagtaaagctgcgtaaatgcgcaggacgtgtaaaagatctgcgtaagatctgtgcgaaagataagaagatctcaacttgcggaatcggtcatacacgctgggcaacacatggtggagtaagtgatctgaatgcacatccgcatcgcgtcggtgatgtgcttttagtacacaatggtatcgtagagaattatgaagaattaaaagatcatttcatgcttcacaaagatctgaaatcacagacagatacagaagtagttgcggctgtattgaatcgtttctatcagggggatccgcatgaagcgatccgtaagacggtaaaatatttaaaaggaacttttgcacttgtgatcatgtttaccgatcagccggatgtcatctatgcgatccgtaatgtaagcccgatcgtggcagcttacaatgacaatggaacaatgcttgcatcagatgttgttgctttgggtgcgacagcagacaaatatatggttgttcctgaatatgttattatggaacttcacaaagacgaaattaaattatttgacctgaatgataagccggtagaagcagatatgatcgacattgactgggatacaaccagaggtggcaaaggaaaatatccattttatatggaaaaagagatcatggagcagccggatgcattaagggcgacgatgcaaagccgtgtggtaaatggcaagatcgatctgtcagccgatggtgtgccggatgaaatcttaaaagattgtgaaagagtatgtgtagttgcctgcggaactgcaatgcatgcaggtcttgtggcaaaagcattggtacagtcaaagcttggtatgcatatgaatgtagaatatgcatcggaatttatgtactcagatcctgttattgacgaaaagactttagtgcttgcaatatcacagtcaggtgaaacgatcgatacattagaagcattaaaatatgcgagaaagaaaggtgctaagagcgttgcggttatcaatgttaaaggctcttcgatcgcacgcgaaagcgattatgttatgtatacggttgcaggaccggagattgcagtagccagtacaaaagcatatacaacgcagttaatggcattgttccttttagtcggacgtatggcaaaagtacgtggaatctttgatgatgctacagagaaagcatatttagacagcttaacaaaagcaccggataagatgcaggaagttcttgaccagaagcatgacattcataagatcgcaagagaaatgttagacgcgaaagatgcatttatgatcggaagaggcttagactattcgatcttattagagggtgcgttgaagttaaaagaaatttcttatattcataccgaagcgtatgcatcaggagaattaaagcatggaaccattgctctgatcactgagaatacaccggttgttgcaactgtgacacagtcaaagttaaaagaaaaggaactttctaatatccgcgaagtgcagtcaagaggcgcaagcgtggttgtctttgtgaaagaagactttgatctggcagatgcagaatacgcagatgtttttgaacttccggctatggaagatgagtttatggtatttccggcatcagcagccttacagcttttggcatattatgtatctatggataaaggattggatgttgataagccaagaaacttagcgaaagtagtaacagtagaataa

SEQ ID NO: 784 - DNA, 1878 bp, Clostridium sp. CAG:230
atgaatatgtcttatatatatgaaagttatgatgctgttgtgataggagccggtcatgcaggatgtgaagcagcattggctcttgcgcggcttggttttcgtactttggtctttacggtcagcattgacagtgttgcaatgatgccgtgcaatccaaacgttggcggaagctcgaaaggacacctggttcgtgaaatagatgctctgggtggagaaatgggtaagaatattgataaaacatatattcagtctaaaatgttaaatatgtcaaaaggacctgcagttcactctttgcgtgcacaggcagataagaaggattacagccggtcaatgcgtatggttttggaaaatacagataatctgacgatcaagcagggtgaagttgcaaaaatccttgtagaggatggaaaagttacaggtgttgttactgcttccgatgcacaatatccttgcaaagctgttgttatgtgtacgggaacttatctgaatgcccgttgtgtctatggtgatgtcagtaattatacaggaccaaacggattatcggcagccaatcatctgacacagtctttgttagatcttggcgttgatatcagacggtttaaaacaggtacaccggctagagtagataaaagaacgattgattttagtaaaatggaagagcagtttggtgatgaaaaagttgttcctttttcatttacaaatacaccggaagatattgagaaagagcagatttcctgctggcttacttatacaaatgagaagacacataagatcatcatggataatattgaccgttcgcctctttattcaggaaatatcaaaggtacaggtccacgttattgtccatcaattgaagataaagtagtacgttttgctgataagaaccgtcatcaggtttttttggagccggagggtaattatacaaatgaaatgtatgtgggaggtatgtcaagttcattgccggaagatgtgcaatatgaaatgtatcattctgttccgggattggagcatgcgacgattgtgagaaatgcctatgcgattgaatatgattgtatcaacccggtgcaattaaaagcttcattggaatttaaagatatatcaggattttttagtgccggacaggcaaatggaagttcaggatatgaagaagccgcagcacagggtatcattgccggaatcaatgcagcacaaaagcttgccggaaaagaaccattgattttagatcgttcgcaggcttacataggtgtactgatcgatgatctgattacaaagggaacgaatgagccgtatcgaatgatgacatcacgcgcagaatatcgtctgctcttaagacaggataatgcagatatccgtttgaccggtattggtcatgatattggtttgatatccgatgaacgatataataaattatgtaaaaaaatggaactaattaaaaaagaaattcaacgtttggaaaaaactacaatcggtgcaacaaaagaagtacagatatttttggaaaaaaacggaagtacacttttgcaatccggtgcaacattagctgagcttttgaaaagaccggaattgtcatatgatcttcttgcagaaattgatacagacagagaatgccttccggcagatgtctgtgatcaggttaatattaacttaaaatacgatggatatatcaagagacaggaacgacaggttgcccaatataaaaagctggaaaataagaaaataccggaagatattgattatgatgatgtatacagtttgagaaaagaagcaacgcaaaagttaaaggagtttcgtcctgcttctgtcggacaggcatcccgtatttcgggtgtatcaccggctgatatttcggtgctgctcgtttatctcgaaagaaagtaa

SEQ ID NO: 785 - DNA, 1857 bp, Clostridium sp. CAG:230
atgccatcaacatttttcgggttaaatattgcaagatcaggtatgtctacctacaatgccgtattaaatacaacagcacataatatcgcaaatgtaaaaacaacaggatattccagacaggttgtaaaacagcaggcaacagaagcaatctcttttaaaactacatatggtatggtgggaaccggtgtcgatgcgatcagcattgacagccagagagacgtttattacgataataaatatcgcatgagcaatacaagctatagtcgttatgaatcattaaattattatatgaacagtattgagaatgatctgtatgcaaaagacagtacaagtggtggaatgacaaattctctggataatttcttcaaagtagttaccagtctgacaacagatccatccagcacaacgattcgtacacagacagtcggttatgcagatacattagtcaaatcgatcaatgaagtagcgaattcgttacagacattacaaaaagatttgaatgaccagatagcatcaacagtagatcagatcaatgcgtatgcacagcagatcgcatcgctgaacaagcagatcgctacgattgaaatatatggtacaaaggcaaatgatctgcgcgaccagagagcaacgatcatagatgagctttcggcattagtggatgttgatgtggtagaaaaagagccgacaaacggtaacggacttgctcaatacattgtatcgattgcaggttcgcctttagtagataccaatgattataatacgatcaagtatacagcaatgaatacctgttattctatgaatgatatggataaaatgtatgatctgacatggagtaccggtcagagctttgataagcggagcaaagcattaggcggtaaattgcaggcattgtttgaaatgcgtgatggtaataataatgagacatttgaaggaaaagcaaccggaacagcgggttctaagacattaacggtaacagatgtaaacgaccttggaaaatctcttttaaaactggatattccggcttcggatggtgtgatcacactgggaaatgctacatataattataagtcatttacagcaacagtggatgctgatgggaattatacgtatacatttacattggaaaatgcattaggaagagatattcgggacgaggatatgcatatcagcgatgcggtagattacagaggtgttccttattatatgtcgcagctgaatgaatttatcagaactttttcatataacttcaacaaagtacagacaagtggttatgatctgaatgataatgcaggtcagcagatgtttattgcaaaagataaagtaaatggtattgagatgcgcttttcggatacagtaaagacaggatttacgtttgattccttattagccttagatgctaatggaaagatcgcaacggataccgaagggtatgctaatacaagttattatatgatgaccgcgttgaattgcaatattgattcacagattgcaaaagacggttctttgcttgcactttccgataaacagggcggcggtgtatcaaatggtggtaacttagcgaagatgtctgaccttgcaaatgatactacgatgtttcgacagggaaaaccgggatcttttttacaggtgcttacttctgcagccggtgtagacggatccaaggtaaaaacggcgatggagaatgcagaaaatatcaaaaatgcagtagcaaacagaaggttatcaacagcgggtgttgatgaagatgaagaaggccagaacctgatcatctgccagaatctgttgaattatcaatataaagtattatctgttatgaatgaagtgttagataaattgatcaatggaacagcagtctag

SEQ ID NO: 786 - DNA, 1224 bp, Clostridium sp. CAG:230
atgacagtttatgatgagttagtagcacgtggtctgatcgcacaggtgacagatgaagaagagatcaaaaaattgatcaacgaaggaaaggcggttttttatatcggatttgatccgacagcagacagtcttcatgtaggacattttatggcactctgcctgatgaaacgtttacagatggcaggaaataagccaattgctctgatcggaggtggtacagcgatgatcggtgatccttccggcagaaccgatatgcgtcagatgatgacaaaagaaacgattgcacataatgtagaatgctttaaaaagcagatgagccgttttattgattttggtgaagacaaagctcttttggtaaataacgcagactggcttatggatctgaattatgtagaattacttcgtgaagtcggtccgcatttttcaattaaccgtatgttaaatgcagaatgttataagcagcgtatggaaaagggattaagcttcttagagtttaactacatgatcatgcagagttatgatttctatgcattgttccaaaagtatggctgtaatatgcaatttggtggagatgaccagtggagtaatatgcttggcggaacacgtctgatccattacaaactcggcaaagatgcctatgctatgacgatcaatcttttattaaactcagaaggtaagaaaatgggtaagacgcagtccggtgcagtatggcttgatccggaaaagacaagtccgtttgacttctaccagtattggagaaacgtagcggatgatgatgtattaaaatgtctgcgtatgctgacattccttccattagagcagatcgatgagatggatacatgggaaggaagccagttgaatcaggcaaaagagatcttggcttatgaacttaccaaattagttcatggcgaagaagaagccaagaaagcgcaggatagtgcaaaagcattgtttgcaagcggaaatgctgctgatatgccggaagttgtgttgacagacgatgattttgaagaaggaagtatcggtattttaagacttctcgtaaaagcaggattagcaccttcaaacggagaagcacgtcgtaatgtagaacagggcggtgtttccgtggacggtgagaaagtgaccgatccaaaagcacagcttacaaaagatacgtttgcaggtgatggtgttgtcctgaaacgaggcaaaaagaaatttatgaagattgtgttaggataa

SEQ ID NO: 787 - DNA, 1347 bp, Clostridium sp. CAG:230
ggaatcagaacaatgaaacaaaagtcaaatccggttgcattacttccaatcggtgtctttttaatcttatatcttggacttggaattacattagaatatattatgaaagtgccaatgggtttttacaatgtaccgatcatcgtggcatttcttgcagcaatactagtagcctgcttacagaaccgatcggtatcttttgatgaaaagctaggaattatggcgaaaggactggcagataaaaatatcattacaatgctcttgatctttttgactgccggtgtttttgtcggtgttgtcggacgaagcagcgcggaaagtgtggcatattttatgttgcaaatgattccggcaaaatacgcagttatggttctgtttgtggttgcctgttttgtatcggttgcaatgggaacttctgttgggacaattacacttctgacaccgatcgcagcggctgtatcggaagcatcgggatttggtatgcctctttgcgttgctacggttatgggtggcgctatgtttggtgataacctgtcgtttatatctgatacaacgatcgcagcatgcaacggacagggctgcagaatgaaagataaattttacaaaaacttctggattgcattcccggcagctgtggtcactcttgtactggttggtgtcatatctgcaaatacaacggtaacaggcggcatacaaaaagaatatcatttgatccggatgataccgtacattttagtgttgttaggcggaatagcgggctgtaatgtgtttttagtgcttttgtccggaatcttttccggaagtctgatcatgcttctgacaggaaagtctacaggtgtagaactcattggcaatatggggagtggagtcagcggaatgtttgaaacctgcatggtagcaatattggtttctgcaatgtgtgctttgatccgtgaatatggtgggtttgtggcattgcttggctggattcagaggatgtttaaaggaaaaaagggcggtcagatcggtatgggcattctggtagccgcaatggatgtagcaacagcgaacaatacggtagcgatcgttatggcaaatcctattgcccgtgaaatggcaaaaacatatggggtatctgctaaaaagtcggcttctttgctcgatacattttcctgcatcacacagggaatcattccgtatggagcacaaatgcttgtagcggtatcggcagtttccgaattaggaaaaaatatatcggcttttgatatcattccatttttattttatccgtttttccttttgatcagttctctggcatggatcatttttggaaaagaagaagaggttacgacagcgtgcgaacatcggtaa

SEQ ID NO: 788 - DNA, 2016 bp, Clostridium sp. CAG:230
atggaggaaaaaaagatgaagattacgttaaaagatggctcttttaaagagtatgatcaggctatggcagcgattgacatagcaaaagacattagtgaaggacttgcaagagttgcctgtgtggcagaagtagatggcaatgtagttgacttacgaactattattgataaagactgtaccttaaacattttgacatttgattctgaggaaggaaagaaagcatatcgccatacctgtgctcatgtgcttgcccaggcggttaagaatttatatcctgatgcaaagcttacgatcggacccgcgatcgacaatggttactattatgatttcgatatggaaagcttagatcgtgctgctttggatgcgatcgaaaaagagatgaaaaagatcatcaagaaaggcgataaattagagcgtttcgagttatccaaagaagaagcgatcgaattaatgacaaagcgtgatgaaccatataaagtagaaatgatcaaagaacatcctgatactgacacattgacattctaccagcagggcgattttattgagttctgtgcaggaccacatctgatgtcaactaagacgatcaaagcatttaagctgacatcttcttccggtgcatactggagaggcgatgaaaagaacaagatgctgacacgaatctatggtactgcattttataaaaaagcagatctggatgcttacttagaacatttagaagagatcaaaaagagagatcataacaaactcggccgtgagatggagcttttcacaacagtggatgtaattggtcagggacttcctttgatcatgccaaagggtgtgaagatcattcagaaaatgcaacgctggattgaagatttagaggataacgaatggggctatgtccgtaccaaaacacctttgatggcaaaatcagatctgtacaagatctcagatcactggggacattacaaagacggtatgttcattcttggtgaagacgatgaagatgaaaacggaaacagcgtatcgggaaaagatatctttgctcttcgtcctatgacatgtccgttccagtattatgtatacaaagccagccagaaatcgtatcgtgatcttccatatcgtatgggtgagacatctacgctattccgtaatgaagattccggtgaaatgcatggtctgacccgtgttcgtcagtttacgatttcagaaggtcatctgatctgtatgccggaacagattgacgaagaatttaaaaactgtgttaaacttgcaaaatattgcttagagacattaggattagaagaagatgtaacataccgtatgtcaaaatgggatcctgaaagtccggataaatatcttggcggtgccgaggaatgggatcgtgtcgaaggtgcaatgcgtgagattttagatgagatcggtctggaatatacagaagaagccggagaagcagctttctacggtcctaagctcgatattcaggcaaagaacgtatatggtaaagaagatacaatgatcacgatccagcttgatatgttccttgcagagcgttttgatatgtattacattgaccagaatggtgataagaaacgtccttatatcattcatagaacatccatcggctgttatgagcgtacccttgcatggctgatcgaaaaatatgccggaaagttccctacatggttatgtcccgaacaggtacgtgtccttcctatttctgaaaaatatgcagaatatggtcagaaagtattggatgaattaaagaaaaacggtattgatgcaacaatggataaccgttctgaaaagatcggctataagatccgtgaggcacgtctggataaacttccttatatgcttgtagtaggtgcaaaagaggaagaagaaggcaaagtttctgtcagaagccgatttgccggtgacgaaggccagaaagctctttctgtatttatcaacgatatctgtgaagagatccgtacaaagagaatccgtccgatcgaagtaacagaagaagagaacaccaaaaagaaataa

SEQ ID NO: 789 - DNA, 2178 bp, Clostridium sp. CAG:230
atgttgattggagagaatgagatgaactggcttggcagaattttttatactgttttatcaatgagtggcatgatgctttttttggcacctttggttttgctgcttcgttttggtatgagaaatcaggaaaagaaatttatgaaatgggaatggtggcttgtatatctgcggagtctctgcccggttgcattatcaagcccgatctgtttttttgacagttggaacaggcaatatcatctccttttatcaacgcttggactgacaatagaagagcaaagcggtattatgaatagctggagtgccgtttttctgcatccggttcatatgacaaaaacatttactgtctgtgcggtgacatgggcagcaggggtatttttggtgctgtttagtgcattttttgtacaaagaagagtgaagcagactttgatgcagggaaaagagatcggagaagatattttagaatccggtacaacatctgtcccggtccgctttggcttttttcataagatacatgtcgttccggcaggaatgcatgcacgggatatgcgttattatttgcaacatatacaggcacattcttttgaaaatgcaaaaaggatcgtggttgtcggtatcacagcgatccattggtttaatccggtcatgtggctttactatattctttggaatcatgatgaagaatatcttgcggatgaaaaggcagtgcataagaagccgtcagccgaatgccgcgaatatgcacagggacttttgaatattcaaaaagaatcaaagaaattacatttgtcgctttttacgatccgtgagggaaatgtagaaaagcgtgctcagagaatgatgtacctgaagtgggataagaccggagaaaagctgttaaattttctgatatggtctgttacattgatcctgtttttcctgcttgcaccaatgaagatagcatggagtgggggaacctggcaaaatcctgttgattcatcaaaaggatcccttttttcaaatacaaaaggaatcgtgatcgctaagacagatatttcatccccggatgggctggaccggatcttaaagttagaattgcttgaaaaagataagacagacaaggattcttataccggaacatttgctttaagaatgtatgatgattttgacaaccggattgcatctctttcaatgaaggacatttttggcaccggtggcagttatgcattcccgaaagatatgaacctgtttgtcggagattacaatggtgatggcacgcaggaagcagttttaggaaagaagttatcattgtctcaaaaagaatttgacaggatgacagagcagacagacaactcacaaaaagtcaaagattatactgtatattcttacagcgtgatcaatcttgaaaaagaaaatatgcaagtgatcggcagtgacatctgtgcggcagtttcaaaaaatgggaaaaaggaactttcttcttctgtagaacttgatacgatcgaagatattacgactgtattttccgttccgtttgccaaagagacgcaatattatgtctggaatcaggaaaaaggaaaatacgaacaaaaagatctgtcaaagaaagatcttgaacaatataagacagacagcacagcagaagcaaaagaagaaacacaggaacatacgctgaaaaacaatagtggaagtacggcagtgcttgtcacaacgaaaaaagacagcgatggcaatgaagacattcagtcgcttatcctttccccgaaaaaaaatcaaaagaaatgggataatattcatggatattattgcgacttaaagtggatcacacaggaaaatgttttgaacaatcgctatgcaatgctgatctataacggtacaaaagcacagacttttactgtttatgatacaaagacacgaacgcagtattatcagcaggaggatggaacaacgcagcttgcaaaggtctttaagcaatacaaagaagatgatattacatttgaagacggagcagtcgttgtctataatttaaaggaattaaaagacgatatcctgacgatcggctttgcgggacaggcagataacggaattaccgtaaaaggaagctaccaatacgatatcaaaaagaagctgacaacgaactttacttattccagggaagctgacaccgatgcctctgcatcaccgtcaccgaccaccaaataa

SEQ ID NO: 790 - DNA, 1461 bp, Clostridium sp. CAG:230
atgatcatggatataaagcttccaaagtcggtagaatatattattgacactttggaaaaagcgggttatgaaggttttgcagttggtggctgtgtacgggatacacttcttggacgtgatccacaggactgggatattacaacttctgcaaagccggagacagtcaaaaagctttttcgcaagacaatcgatacagggattgagcatggaacggtaaccgtcatgatcgaccatgtcggatatgaagtaacaacctatcgtattgatggagagtatgaagacagtcgtcatcctaagaatgtagaatttacaaccaaattaaatctggatctggagcgaagagattttacgatcaatgccatggcctataatcatagcagagggctggtggatgagtttgaaggaatacaggatttagatcgtaagatcatacgatgtgtcggtgatgcaggggaacgtttcgacgaggatgcactgcgaatgttacgagctgtacgtttctcggggcagcttggctttcagatagaagaagcaaccagacaggcaatatgcgagcgcgcaaagaatttacaaaagatcagtgcggagcggatccgggtagaactgacaaagctgttgatatcaaaagatgcaggacagatccgggaagcatatcataccggtatcctaaaagtgatcctgccggatatcgatcgtatgatgacgatcgatcagaaaaatccacatcatatctatacgatcggagaacattccatacgaagcgtcgaggtgatgaatgcactttggggacgatatgagtctaagaaaaatctgccggatatacccgatcaggtctatgtgtatgcgaaagaactgacaggaatgcttacaccaaagcaacattctattctttgcattaccatgctgtttcatgatataggaaaactggataagatgacgattgatgaaaacgggattggccatttttatggacatcatgaaaatggtgagaaaatgtcaggcaccatattaaagaagttgacctttgataacgaaaccgtaagtgccgtcagacatctgatccgctggcatgattatcaatacggcacaacagaaaagtcaatccgcaaagcagttgccaaaataggaagagactatatgccgatgctttttttggtgcaatttagtgatattttatctcaaaatccgtctacttttgagggaaaactgaatacaatttatcaggcgatcgaatattggaaaaagataatccaatcaaaagcagcgcttgaattaaaagatttagagatcagcggcaaagatctgatcaggcttggagtcagacccggaccggcaatcggagcgttattaaagcagcttttaggggaagtgcttgatgagccggcatataatcggaaagaccggcttttagaaagagcacagacacttatgcattctttcaatggaaatgaaaaagaataa

SEQ ID NO: 791 - DNA, 2703 bp, Clostridium sp. CAG:230
atgccactcacaccaatgatgcaaaaatatgtagaaacaaaggaggaatacaaagattgtattcttttttatcgtttaggggacttttatgagatgttttttgaggacgccaagatctgttctcaggaattagaattgacattaaccggaaaaagctgtggattagaagaacgtgcaccgatgtgcggtgttccgtttcatgcagttgatggttatttaaataaattagtatccaaaggatataaagttgcgatctgcgagcaggtagaagatcctaagcttgcaaaagggcttgtcaaaagagcggtgacaagagtggtaacaccgggtactaatcttgataccaaggcattagatgaaagccgtaacaactatctgatgtgtgtggtctatacaacgaatgcgtatggtgtatcttatgtcgatgttacaaccggagattattatcttgcagaatttgaatcagagaaccaattgctagatgagattggaaaagttgtaccgtcagagatcatctgtaatgatccttttttagtgtccgggattgattttgccgatctacaggcaagactcggaatggttgtttcggcaattgatgcatggtattttgatgaagacaaatgttatgatacattaaaacatcattttaaagtcggttctttaaacggactgggattagatggttacagtatcggtattattgctgcaggagcagcactcgaatatctcgaagagacacaaaaaatttcgttggatcatattaccaagatcacaccatatgtctcagatcgttatatgcttttggatcgtgcaaccagaagaaacttggaattatgtgaaaccatgcgtgaaaaagcaaaaagaggatcacttttctgggtgcttgataagacaaaaacagctatgggagcaagaatgttacgcaatgcgatcgaacagccacttcttagcaaagaagagatcgatcaaagactggatacgatcgaagcattgaatcagaatgcaatcaatcgtgaagagatcagggaatatctcggaccgatctatgatctggaacgtctgatcagtaagatcagttaccgtagtgccaatccaagagatctgatcgcttttcgccaatcattatcgatgctgccaccgatcaagcaggtcttgaattcatttgaagaaggaacacttttaaagcaatacggtcaggagatggatgcactggaagatctgtttgcattgatcgatgcttcgatcatggaagagccgcctcttaccgtgcgtgaaggtggtatgatcaaagatggttataacgaagaagtcgatcacctgcgtcgtgcaaagaccgatggcaaacaatggcttgccgatctgctagagaaagaaaaagagcgtaccgatattaagaatttaaagatcaaatacaataaagtctttggatattatcttgaagtaaccaattcatataaagatctggtaccggatgactggacgagaaagcagactttagcaaatgcagaacgttatacgacaccacggttaaaagagctcgaagacagcattatgggtgcagaagaccgcctttgcaatctggaatattcaattttttgtgatgtgcgtgaaaagatctatgcacagatcggaaaagttcagacaacggcgaagatcattgcggcagtagatatgtttgcatctttggcattggttgcggaacaaaataattatgtacgtccgcagatcacaacagatggaaagatcgatatccgtgaagggcggcatccggttgtagaaaaaatgatacgaaatgatatgtttgtgtcaaatgacacgtatctggatgataaaaaacataagattgcaatcattacaggacccaatatggcaggaaagtcaacgtatatgcggcagacagcgcttttggttctgatggcacagatcggatcctttgttccggcacaaagtgcgcagatcggaattgtcgacaggatctttacaagagtcggtgcatccgatgatcttgcaagcggccagagtacgtttatgattgaaatgacagaggtagcaaacatcttacgaaatgcgaccaaaaacagcctgatcattttagatgagatcggacgtggtaccagtacatttgacggattaagtattgcatgggctgtcgtggaatatattgcgaatacgaagcttttgggtgccaaaacgttatttgccacacattatcatgaattgacagaactcgaaggtaaattagaaagtgtggataattattgtattgccgtcaaagaacagggcgaggatattgtctttttgcgtaagatcatcaaaggcggtgccgataaaagctatggtattcaagtcgcaaaacttgccggagtacccgaaaacgtcttgaaaagagccagagagatcgtacagcagttaagcgatcatgatattgcttcaaaagcaaaagatatcgaagtcgaatatgagatcccggattatgattatggcattgagcagcaaagtaagagaagagtccgtaaaaagacagcttccgagattgaatcggaaaagttaggacagctttctttgttcgatacatccaataccaatatcaaaatggatgatatcattctggaattacatgatatcaatctttcggatactacaccgatcgaagcgttaaatattttatacaagatgcaggaaaaactcaaagaaagaatgtaa

SEQ ID NO: 792 - DNA, 1452 bp, Clostridium sp. CAG:230
atggagagtattatgttagaagagttagaaaagtatgatttttttcattattttgaggagataagtgctgtaccgagaggatcagaacataatgaagcaatcagtgattatctggtggcttttgcaaaagagcatcaattgtttgtatatcaggatgcatcttataatgtagtgatccgcaaggaagcagcaaaaggatatgagaatctgccgggaatcattttacagggacatatggatatggtctgtgaaaaggaaagcggcgtagaacatgattttacaaatgaaggtcttgatctggctgttgatggagattatctctatgcaaagggcacgacacttggtggtgacgatggtatcgcacttgcatatggtctggcaattcttgccgatgatacgaaggaatatccgatgatcgaattggtagctacaaccgatgaggagatcggaatgtttggtgcaaaagcattagatacaggcgttttgaaaggaaaatatctgatcaatctggatacagaagaggaaggttctttattagtcggctgtgcaggtggtcttcgtggtaatatcacattaaaactggatcgtgatgagaaagacggtatttgttatgaatgtcatgtgaatggacttttaggcggtcattccggttgtgagattgacaagaacagggtcaatgcagcgttgctgctcggaagacttctttttgaaatggagacaccatttgcacttgtcagcatgaaaggcggcaccaaagacaatgcgattccaagagaagccaaagcagtgcttgtagtcgatgaaaaggatgcatcggcatttgaagaggaatttcagaaaagaacggctatgtatcaggatgaatatacaagttttgagccggacatgaagatctgtctcagaaaagaagcacaggcaggtgcttcggtaattgcaaaagagcagacagataagatcctgtttttattaaatacagcaccaaacggcgtacaggcaatgagtggtgatatgaaaggcttagtagaaagttctttgaatatgggcatttttgaagcagaagaagaaatgaaagcatcgtattcggttcgaagctcggcagcaggttataaagaatatctctccaagaaactggcatgtcttgcaaagagcatcggagcttcttatcaggaggaaggaaactatccggcatggctctaccgtaaagagtctgttctacgtgaaaaaatggtcgaagtattccgacgtttttatcagaaagaacctgttgtagaagtgatccatgcaggactggagtgcggtctgttatcagaaaaaatgccggagttagatatggttgcgatcggaccggacattttagatattcatacaccaaaggagaagctttccattccgtcggcaatccgtgtctatgactatctgttagaagttttacaggaattatgtaaagcataa

SEQ ID NO: 793 - DNA, 1227 bp, Clostridium sp. CAG:230
atgaggaagaaaacatggaaaaaagcgatgatctgttctttggcggcattgatgatcgtatcggttagtggctgttcttcaaagtcaggatcaaaaaatacaaaagagacaaaaaaagaagagcaggcaaaagaaacaaagaaaaaagtaccggatacggaagcacagacaagtgctgtattatctttaagtgaagtacagactttgaatgcaaatgataaagataaaaagtttaaggagtatgtaagcagtgatacgaatattgtaaccgtaacggaagatggtattgttcatgctataaaagcaggaacagcagccgttacgtatacagatggttctaatcaatatacttgtaatatcaaagtaaagaaacgtggaatggtttatccggtctttacgatgatgaaaggtgagcatttagatatccaatttagtaataaagatagcggtctgtcatggacatccaccgattcatctattgcttcggtgaatgcgaaggggaaagtaacagcaaagaaagtcggaacggctgtgattaccggaacgaatagagaaaatgttgtctatcaatgtaatctgacagttaataagaaaataaaaaatatcatatatctgacctttgatgatggtcccaaccgttatacaacaccaaaggtattaaaaattttaaaacagaataatgtcaaagcaactttctttgaactgaaaccggcaaagaaagattttgatctgacaaagcgtgtgctggatgaaggacatacgcttgcaatgcatggataccagcataaatatgatattatttaccgttcagaaaagacatatcatcagaatttagataagcttcgtaatctcttctttaagaagtttggtgtttggtgtacattaacacgttttccgggcggaagctctaatacatgcagcagttataatccgggaatcatgacacgcttgacaaagaaactggatggatggggatatcattattttgactggaatgtaagttcaggcgatgcaagcagaggtacaactccggcacaggagatgcataatctgaaaaaagagacaacaaagggacatgacagcgttgtgctgatgcatgatttctataataaccagcctacattaaaatcactggataaatatattaagtatgcaaagaaaaaaggttatacgtttatgccattaacagcaagtacggcagaggtacaccatagagtgaataattaa

SEQ ID NO: 794 - DNA, 1668 bp, Clostridium sp. CAG:230
ttgcgaggaggagcagaagtgagtattaataaaattgatgcagggatggttcaaaaaatgtttctggcaggtgcaaaagccctcgaagcgaagaaagaatacatcaatgaattaaatgtgtttcctgtaccggatggagatacgggaacaaatatgacaatgacgatcatgtcagcagcaaaagaagtcagtatgttgaaaaatccgacgatggatgaacttggaaaagcaatctctagcggttctttacgtggcgcaagaggaaactccggtgttatcctttctcagatctttcgaggttttgtcaaatcgatcaaaggcaatgatgaattagacattaccattatgggaaatgcagtaaatcatgcggctgagacagcttacaaagcggttatgaaaccaaaagaaggaacaatcttaaccgttgcaagtgccggtgctgcgaaagcacaggagattcttgtggatggtgagatgacggatcttctgacattttgcgatgaagtatcacagagtatggaagaagctcttttgaatacaccggagttattgccggtattaaagcaggcaggtgttgttgattccggcggagagggattgatgactttcttacgtggtgcgatcgatgcattgaatggtcggactgctgattttacgatcaaagtcggaaacaattccacggttgtaaaagcaagtacagcaggcgaagctgatatcaaattcggatattgcacagaatttatcattatgttagagcgtaatgaaaatgttgtagaagcacaattaaaagaatatttacaaaagatcggtgactgtgtcgtcgtcgttgcagatgatgatattgtcaaagtacatgtgcatacaaacgatcccggtttagctattcagaaggctttgacatatggttctcttaccagcatgaagattgacaacatgcgtgaagaacatcaggaaaaagtgatccgtgatgccgagaagcaggcaaagcaggaagaagaaatgcctcataaagaagttggttttattgctgtttcagccggagaaggtttaagtgagatctttaaggatcttggtgtagatcatatcattgaaggtggacagacgatgaatccaagtaccgaagatatgcttgatgcgattgcaaaagtcaatgcagatacggtctttattcttccgaacaatgggaatatcattcttgctgctaatcaggcacgtgatctgacagaagacaaagagatcattgtaattgagtctaagaatatcccgcagggaattgcagctatgatcaattatatgggtggtcagtctaatgaagagaacaaagccaacatggaatcagaaatgttacagatccgttccggtcaggtgacttatgcagtccgtgataccgttatggatggtaaagagatcaagcagggcaacttcatgggacttaccgataagacgatcgtgtcagtcagtgagactgtagaaggtgctgcaagagaattgatcgaatcgatgatggatgaagattccgagttgatcagcctatactttggtgctgatacgacacaggaagatgcagacaaattagcagatgagatcattgcagcacatgaagatgtggaagtagaagtacaatatggcggacagccaatctattcgtatttcatttctgtagaatag

SEQ ID NO: 795 - DNA, 1773 bp, Clostridium sp. CAG:230
atggttttgctgcctgaaaaagaaaaacgaaaaaaagagggaaagaaagtgcatatattaaagaagtttataccgtattattcaccatataaagtcgtattttttctggatctgatctgtgcggcagtgatcagtctgatcgatcttgcctatccgcagatcctacgtattatgacaaaaacaatatttgccggaagttcttctgtcatattgaaggcgttgcttccgatcggtcttgccatgcttgcgatgtacatcattcaggggctttgcaaatattatgtcagctatcagggacatatgatgggtgctaatatggaacgcgatatgaggcagcagctttttgatcattacgaaaagttatctttttcttactacgatcagaacaattccggtcagatgatgagtaagctggtgtccgatctttttgatatttccgaaatggcacatcatggcccggaaaatcttttcatttctctgatcaaaattatcggatcgtttgtgttcctgtttatgatcaaccggaaactggctgtcccgcttttggtgctcgtattttttatgatccttttttcttacggacagaatcgtaaaatgcaagcgacctttttggacaaccgccaaaagattggggacattaactcaagtttacaggatacattagccggaattcgtgtggtacagtcttttgcaaatgaagagatcgaacgcaaaaaatttaagcacagcaaccataacttcttagtttctaaagatgctaactatcattgtatgggtacttttatgagtggaaatttgttctttcagggattaatgtatcttgtcacattggtttttggtggctttttgatcgcaaaagggcagatggaagtagcggatcttgcaatgtatgcactttatatcggtatctttatcagtccgatccagatactggtggaattaacggaaatgatgcaaaaagggctgtcgggatttcgtcgtttcctggcagttgttgagacagagccggacattgtggaccaaaaagatgcaaagccattagagcaggtgcagggaacggtagattacgaaaatgtatcttttcattacagtgatgacgatacactggtattatcggatgtatcttttcgcatcgaagccggtaagtcagttgctttggtaggaccttccggcagtggtaagacaacgatctgttctttgcttccgcgtttttatgatgtcacaggcggaaggatcctgatcgatggaaaagatatccgcagtctgacattggaaagtctgcgtaaccggattggtctggtgcagcaggatgtttatcttttttgcggttctatcaaggaaaatatagcatatggaaagccggatgcttcaatggaagaaatcgtggatgcggcgaagaaagcaaatattcatgattttattttgtcgctgccggatggttatgacagctatgtaggagagaggggaacacgcctgtcaggaggacagaaacagcgaatctctattgcccgtgtctttttgaaaaatccgcctatcctgatcttagatgaagcaaccagtgcattggataatgagagtgaacgctggatccagcacagcttagaagagttagcaaagaacagaacaacgatcacaattgcccatcgtttatcaacgatccgtaatgcagatgagattctggtcgttgcagataccggaattgcggaacggggaacacatgaagaattgatggcacgcaatggcatctatgcacattataatgagatgggataa

SEQ ID NO: 796 - DNA, 1224 bp, Clostridium sp. CAG:230
atgattaatacaattaagcagtatgattggaaaaaatacaattactccctgttagtcgccgtattatttttatgtgcattaagtgcattcgctgtaaaaatggcaggtggtgaagaacatggaatgtcatatatgaaaagccagttagtaggtacttttttgggactggttattgtagcagctttatctgtgatcgattatcattttatttgtaaatttgctgcaatttattatgtatttggtgttttgctgacagcagcgacacattcgccgatcggtacaaataacgatacggatgccagacgctggatcaaggttggcagtattacttttcagcctacggaattgatgaagatcattttaattctttccctggcggctctttttgcaaagctgcggcacaggatggagaaagtcagtactcttgtgatcgtggttgccgtaaccggaattccggctttggttatcatgtcgcagcccgatctttcatccagtttggttaccgtttttatcatgctggttttgatctttgtatcgggacttagttataagatactggctccggtcattgtaatgggcatcccgcttggtgttgttctgttctggtatattcagcagccatataatgtgttattaaagcattatcaatataagcgaattatggcatggcttcatcccgaaacggatgtcaaaggaactatcaattaccagcaaaaccgttcaatccgggctatcgcatccggtggattgtatggaaagtttttacaggacggaggaacaaaaggagcatcaagagcatatcattccgttggtgtcaatgaaagtgattttatctggtcggttattggagaagagtttggttttttaggttgctgcctgattttattagtctttgcatttattattttcaaatgttttttagtggccaaaaactcacaggattatttaggaaaactgattgctgccggagttgctgcaatgttcatgttccaggtgtttacgaatatttccgtagttacattgatgtttccaaacaccggactcccgcttccgtttatcagtaacggactaagttcaatgctctcttcgatgattgcgataggtctgattatgaatgtcagcatacaaccgggcaagaccagcaagggcggattttcgatgcgaaatatttacggaaatgatccggtttcatccattgatctggatatggatctggaattataa

SEQ ID NO: 797 - DNA, 2544 bp, Clostridium sp. CAG:230
atgggtgtgatagctcacgtggattcaggtaaaacaacgctttcagaaagcattttatatcattgtggaaagatcaggaagatggggcgtgtcgataatggagatgcgtatctcgataccgatcagatggagaaggatcgcggtattacgattttttctaagcaggctgaatttttgttgggtgaccgggatgtgacattgcttgatacaccgggacatgtagacttttctgctgaaatggagcgtacgttgcaagtgcttgactatgcgatccttgtgatcaacggatctgatggggtgcagggacacacgctgacattatggcggcttttaaaaagatatcatattccaacatttctttttatcaataagatggatcaggcacgaagaacaccggaaagtctgatggaagaaatacagacaagactggatcgccattgtgtctcttttacaaaaaaagatgagctgttctttgaagaagtggccgtttgtgatgatggattattagaaaaatatttagaaagcaatacaattgaaaaggaagagattaaggaactgatcgcaagtgagaagttgtatccctgcttttttggctctgcattaaaaggagatggagtcgattcttttttaaagggattagaagaatatacaaaggatgtaacgtatggagatctttttggagcaagagtgtttaagattgcaagagatgaacaaaataaccgtctgacctatatgaagatcacaggaggaagcttaaaagtacgtcagaagctgacgaataagggagaacaggaatgggaagaaaaagtcaaccagatccgtgtgtattccggcgagcaatatgaagccgtgcctgaagtacaggcaggcatgatctgtgctgtgacaggacttagccatacgtatgcaggagaaggcctcggaatagagaaagaagcaaatcttccgttgttagaaccggtgctgacatatgccatgatcctgccggatgatatcagtgtcaatcagtttttaccacagcttcgccaattagaggaagaggaacccgaactaaagatcgtttggaatgagaaagtcggtgaaattcaggcacagatcatgggagaagtacaaatagaaattctgcgttgcatgatcagggatcgttttaaagcagatgtacattttggggaaggaaagattgtttataaagaaaccatacttgatacggtggagggagtcggacattttgaaccgcttcgtcattatgcagaagtacacctgaaaattgaacccggagagcatggaagtggcgtacaggtacttgccgactgcagtgaagatcttttggcaaagaactggcaacgcctgatcctgacacatttgacggaaagagagtttatcggcgtgcttgcaggcaaagtacttacggatgtcaaaattacattagtttcaggaaaggcgcatatcaaacatacagaaggtggagactttagacaggcgacatatcgtgcagtcagacaaggacttatgaaagcacaaagttgtctgttggaaccttattatgcgtttcgtttagagataccggcagctaatttaggccgtgcgatgatggatcttgagaagaagtgtgcaagttttaagacggaaacacaggatgataagcaggcagtattggttggtatcgcaccggtagcgacaatgcgtaactaccagcaggaagtacattcttatacaaaaggaaccggccggatcatatgtagtctgaaaggatattatccatgtcataatgaagaagaagttctggaaaattcatggtatgatcccgatgcggacattgccaatccatcagcttctgtattttgcagccatggaagcggtattgttgtgccatggtatgaagtagaacaaaagatgcatctgccgttacagaccgggtctgtgcaggaagaagcagaagaaccggaatggcagacgagggttccgaagccacaggaagaatatttcatgggagaagaagaaattaaccggatctttgagcagacttatggggcgaataaaagaaagggttctaagaaaacgaaaaaacgtattgaaaaaagggtgatctcgcatggcagtgcaatgcgtcctaaaaaatccgatgaacaatatttgttagtagatggttataatattgtctttgcatggcaagaattaagcgaacttgcaaaagacaatattgatgcggcacggggcagactaatggatattatgtgtaattaccagggatataaaaaatgtacattgatccttgtgtttgatgcatatcgtgtaaaaggaaatgttggacagatgattccttatcataatattcatgttgtatatacaaaagaagcagaaacggctgatcagtatattgaaaagctcgcacataaaatgggacgcgattaccatgtgacggtagcaacctcagatggattagagcagcttatcatcagaggacaagggtgtcgcctgatatctgcaagagaattttatgaggaagtaaaacaggtagaagaagagatccgaaaactgatatag

SEQ ID NO: 798 - DNA, 2787 bp, Clostridium sp. CAG:230
atgttacacaaatattttaaatttacaaaaaaaaggattacagcatttgctgtcttatctgttttaatattaggactgcaaattgtctttaccggttccctgttagcccgtcagaaagttacaacagaagccggtaacgcagagagtgcggttatcggtattctcgataagactgagatcgtgcgtcagaagttcgcattttcaaggaaagtagtgttaaaagaattctcattaagctttgggtcttttgagcgaaacgaagtcggagattcgctagacattcagatgaccgatggagataataatattgtttacgaaacaaagattccggttgatgacattacgccaaatgcagcctatcgtgtttcgatggatcatacggtaacgataccaaaaggagttacctgctgtatcaagatcagctgcagttcttcaacgcagcaatataataccgtaccaacgttaaacactacaaaccgtaccgatccgaatacttacctgtctaccatgaatatgcagacgcataaaaaagctttgaatatctcgtatacatattactatcgccagatagcacctatgattacgattattattgaatttgtgcttctttttgtactttgctttgagcgtctgacagagtatgctgttattctgcttcgtaaaaagaaaaaggaagaacgcagaagagaaaaagaaaaatccttagaactcgcagcaatggataaaagaagccatagcaacagtaaggatgcgaaagtacgttattcccgcttaaatatgcaggataaagcaaagcaaaagaaaagaaagaaatatcagaaaaagcataacaaaaaacaatgggataaaaagaaaaaatcatattcattgaaaacatttgtaaaatggtgtctgactgaaccaaaagttttaaaaagagtccgtcaggcagttgtaatcttaaatccggtgttcattatcttctttattgaattgatgaatgatgctttattaaaaatgaatccgtttgtctggctttttgcaaccatattgatgcttgcattagaaatgcttttctatgcaatattcggaaacatgagtattgccattttggtattggattgtattttatatccggcaggtcttgcaaacctgatccttatgaatgtacgtggaacaccatttttaccgggagatcttcttgcacttggtacagcaacagaagtagcaaatacgtataagatctctctgacaccatcccagttcgttatgattccggcgtttgtattgtggtgtttctttatctataggatcaaagcaaagaaaaagaatacagcgatccgcaaaaaactggtacgtcgtctgacaccggctgcagcatcttttgttttgatcggagtgttatataatacaccggtattggaaaattgcggaattgttgataatgtatggaataaagtagcttctagccgttcgaatggattttacttaaacttctttattaatctgcactatctgagtgtttcaaagccatccggctattcacaggataaagtcgcttcgatcttaaaagatttcgcaaaagaatcgaaaaaggagagtgttgcaaaaactagcgatccgacacaggaatcatcaaagaaagtaacaccatcaaagacaaaattcctgacaaacagtgattttaagaagaatacgggattgaatggtcaaaaaccaaatattatcctgatcatgaatgaaagtttggcggattatgagcaagtaggaaagacgaattttaataaagatccgttatcgttcttacatagtcttcgtaataatacgatctatggtaaagattatgtatctgtttatggtgcgggaacaagtaactcagagtttgaagctatgacgggtaataccatgtcattcttccctagcggaagtaatgtatatcagcagtttatgcatgattcaacattttctatggcatattatctaaaatcactcggttatcagacggatgctgttcatccaagcagcggtgcaaactggaaccgtatcaacacatataacagtatgcgttttgaccgttttgtaacgatcgatgattttaaaaatccggaatatgtccgttatatcagcgataaggaaagttataagaaagtcattgaactgtatgagaacaagaaaaaaggaacgccgatgtttacgtttgatatgacgatccagaatcatggtggctatctgaccaatacagcatgggatgatcctgtttatgtcaaaggttcttattatcaggaagcaaaagagtatctttctgcaacaaaagtttcggatgatgctttcaaatatctgactgactatttcaagaaagcggatgaaccaacgatcatttgcatgtttggtgatcaccagccatcaattgaaacagagttctatgaagagatcatgaagaaaaaacagagtgactgggaattaaatgatattcagaagcggtatgtgactccgtttgttatatgggcgaactatgatatcgaggaagggcaggatgttgtattaagtaacaactatcttgaaaatctggtattaaaacaagccggtattgatcttcctctatataatcaatacatcgaaaaggtttcagatacaattccggcaatgaatgtcaatgggtatatggatcaatcaggaacctggcataaatatgatgatgaaaaaggaaacattaataagttgttagaaaattatgaatatttgcaatatgggtattatagtgattccgataaggacaccatgagaaaattgtttcatatggcaaaataa

SEQ ID NO: 799 - DNA, 2385 bp, Clostridium sp. CAG:230
atgaatgatgtgttatgcagtaatacaataggagataaaatcaagatgacattaaaagatttggagataggagaaagtgcacggattaaaacggttggtggaaacggtgcattacgacagcattttttggatatgggagtgatcccgggagcagagacgacagttgtaaagtttgctccgatgggagatccgatggaattgcaaatccatggatatgagttgacactccgtttggcagatgccagacagattgaagtggagccgattcaaaagcgtgcaagaagccatgagggtcccggcaagatcagcagggaagcacatccggggctaggagaagaaggaaaatatcatgttaaagcagatgaaaatcctttgccggaagatgaaaagctgacatatgctttggtcggtaatcagaattgtggtaagacaactttgtttaatcagttgacaggatctaatcagcatgttggtaattttccgggagtaacggtagaccgaaaagacggttcgatcagaaatcatccggaaacattgatcacagatcttcccggtatttattcaatgtcaccttacagcagtgaagagattgtttcgagaaattttgttcttgataatcatcctaaagcaatcattaatattattgatgcgacgaatatcgaacgcaatctatatctcacaatgcagctgttagaaatggatattccgatggtcattgcattaaatatgatggacgaagtgacgggcaatgcaggttcgattgatatcaataaaatggaaaacctgatcggtgtaccggttgtgccgatatctgcagcaaaaaatcagggcgttgatgaattggtacgtcatgctttacatattgcaaaatatcaggaaagacccggaaggcaggacttttgcggagaaaatgaatttgggggagctgttcaccgctgtattcatgcagtctgtcatattattgaagatcatgcacaaaatgcgggaattccgatccgctttgcagctacaaaactgatcgaaggcgatgaattgatcttagaaaagatgcaattagatgaaaatgaaaaagaaacattggagcatctgatcttacaaatggaaaaagaaagaggtcttgacagaagtgcagcaattgcagatatgcgttttaattttatagagcgaatttgtgaaagtactgtagtgaaaccaaaagagagcagagaacgtatccgcagtcagaaaattgaccgtattctgacaggaaaatatacggctattccatgttttgtaatgatcatgctggctgttttttatctgacctttaatgtgataggtgctttcttacaggatattttacagcttggcattgaccggctgactgcgatgacagaccaggcattaagtgcagcaaaagtaaatgaagttctgcatggccttgtgatagatggtatttttgccggcgtgggaagtgtattgagttttctgccgatcattgtgacactgttcttctttttatcgattatggaagatagcggatacattgccagagttgcattttttatggataagttgcttcgaaaaattggcttatctggacgaagtatcgtgcctttgctgatcggttttggatgtacggttcctgctgtgatggcaacaagaacgttgccaagtgaaagagaccgtaaaatgacaattcttttgacgccgtttatgagttgctcggcaaagcttccgatttattccttctttgtcagtgcatttttcccgaagaagggcggacttatcatggccggattgtattttctgggaattctgatcggaatatgtgttgcattgatctatcgtaaaacattgtttcatggagatgccgttccgtttgttatggaactgccgaactatcgaatgccgggaatgcgcaatgtagtgcagttactatgggaaaaagcaaaagattttatacagagagcatttactgttattttgatcgcaacgatctgtatatggtgtttgcaaagttttgatattcactttaatttggtaaaagactcaaaagatagtatattggccgcaatttccggcatactggtacctttgtttcagccacttggactcggggactggaggatatgcacatctttgatcagtggatttatggcaaaagagagtgttgtatcatctttacagatcttatttggaaattccgtgacaacagcgatttcttcccttggagctgcttctttacttgtatttagtctgttatatacaccatgtgtggcggcaattgcatcgatccgtagagaaatgggcagaaaatgggctgttggtgttgtgttctttcaatgtgcagttgcatgggcagcagcctggatcgtttctttgattggcacaatgatgatatga

SEQ ID NO: 800 - DNA, 1563 bp, Clostridium sp. CAG:230
atggcaaagaagtcctttctatttatggaaaagataagctttggtgtacttagtgataagagaggagaaagatacatgagagatgatattacacttttagacgaaaatgatacaatagacgatattaaaaacgaagtactgtatcatgtagctaaagctgcgtttgaagataacttagatggtattttagcaagacttccttatgaaatccttcccggaagcaagccaagtttccgttgttgtgtatacaaggaaagagaaatcattcgtgaaagaatcatgttagcacagaatattaatcctgcaacgggagaaccatgtcataacacagttcagatcattcctgctgcttgtgagaactgtcctatcgcacgtttctctgtaacagataactgtcagaaatgtatgggcaagaaatgtatgcaggcatgtaagtttggtgctatttcgatgacaagagataaagcttatatcgatcctgaaaaatgtaaagaatgtggtcagtgttataatgcctgtccgtacaatgcaatcgtagatactatgcgtccatgtcgtcgtgcctgtcctgttgatgcgattcaggcaggtgaagatggaagagttacgattgatgatgaaaagtgtatccgttgtggtgcatgtatcaattcctgtccgtttggcgctgtatcagacagctcacgtatgttagaagttattgacagtatcaagggtgataaaccggtatatgctttagtagctccggcagcagaaggtcagtttggtattgatattacaatggaatccatccgaaacggagcaaaaaagatcggatttaaagatatggtagatgttgcaatcggtgcagactttgtatcagattccgaatcaaaggaatgggcagaagcttacaatgaaggaaagaagatgacaacatcatgctgtcctgcatttgtacatatgatccgtcgtcatttcccggaacttgcagatcatgtatctacaaccgtttctccgatggctgctacagcaagacttgtcaaggcaatgcataaggatgcgatctgtgtctttgtcggaccgtgtattgccaagaagagtgaagccggtcaggatcaggatattccgggtgagaatgcagattttgttcttacattcgaagaatttaaggcaatgcttcgtgcgaagaatataaaactggaatcttgtgtaatggaagaacagcgcggaagtgtctatgcgaagagatatgcgaatgccggtggtgttacaaatgctgtaaaacaggcactcaaagagcagggtgtagagacaaacgtcaatgtacgccagtgcaacggtggggaagaatgtagaaaagcactcttcttaatgaaagccggaaaattaccggaagacttcatcgaaggtatgatctgcgaaggcggatgtgtcggtggtcccggaaatatccagcctgaaaagatgtttaagagagaacgtgataagcagttgaagaatgcagatgaacgtaccattcaggaaacattggacctgtatagtgattatgaattctcaatgcatcgttctgcaaagaaataa

SEQ ID NO: 801 - DNA, 1215 bp, unclassified Ruminococcaceae
atgaaacgcaggcgttttttggcggcgctgctggccgcagcggtcctttgtccgcttgccgccctggcagcgggagaaaagaatgtggacaatctgcccaccggcaacctggaagggtttgaaagcagcatcacctggttcggggaggatttcgcctacgacatcaccgacgaggaggcctgctgggagctgttgcagcggcccattacggttttggatgtaagcgagaaggaggtcgtctatccccgcgtatcgcccaatggcgaaaaggtggtcaacgagtggatgggaggcagcatcaacggatcgcttgccgccgtccacgtgctgggtgaggacgaggacggatggaccctcatcgagggcatggactactacgaccgcatcatccgcggatatgtcaagaccagcctgctcaaaacggtcacgcccaacaacaagtacggcatcatcatcgacaagctgacccagcggctgtacatgttcatcgacggaaagctctggtccagctgcgcggtgtccacaggcctgcccaacaaggaccagccctacaatgagaccgccgccggcgaatacctgattggaagctgggtgggcggctttgacagcgagggcatgtactgcgaaatgggcatccgcttcaacggcggcgaccttctgcatcaggtgccctatgtggaatttgccgacggcaccaaggatttcggcaagtatggatcgcagctgggccgcaaggccagtcacggctgcgtgcgcgtgacacgcaccgccaacgacgagggcctgtgcatcagctggctgtgggaaaacctgaaaaagaataccaaggtggttgtctgggatgacgacggacgcactctgccctatcccgacgatgatctggaagtgtactacaaccccgacggcggcaccagctaccatgctacggccacgtgccgctccgtgcgcgacaagtatctgccgctgaccgcttttacctatggcgagttggatagcggcaaatacgccagcctgaccggctgcaccaactgcattccggtcaagcgccgtgcggagatcgacgagatcaaccaggagcgcatcgacctgggcgagctgcttaagaatccggtctataccggcggcgccacgaccggcggcggtgcgcaggcggacggcagcgccgcgtcagacagcccggaggcatccaacggggtgaccatcaccatacggtaa

SEQ ID NO: 802 - DNA, 2517 bp, unclassified Ruminococcaceae
atgaacatcaggaaatggacgggcatcgtgcttgcggtcatgctgctgagcacggcgttcactgctggcgctgcaacgtttactcctggcgactacgaggcctccgcgcagggcttcggcggcactgtaagcgttaagctgaccgtggacgaagaagcgatcaccgcgattggaatcaccggcgagggtgaaaccccggcgctgggcggcgcggccatcgagcagatgagcgcggcgtatgtgggacaggccgacgccgagggcgtggacggcatgaccggtgcgaccatcaccagcgacgccgtcaaggccgctgtaagcagtgcccttgctcaggccaggggtgaggcgcaggaggcggcgcagatcgccttcacgccgggcacctatgagggcactgccgccggttacaacggcgacgtggtgctgagcgtcaccttcacggaggacgccatcgagtcgatcgaggtcgtctcctctgcggagacagagcatgtgggcgatgttgcctacgagattctgttcccccagatcatcgaatacacctccaccggtgtggacagcgtctccggcgcaacgtttaccagccgtgcggtctttaatgccgtcaacgcggcagcggagcaggccggctgcgatgtggcggcgctgcaggcgggagccaagcccttctcctatgaagcgcaggaccccatcgagggaacctatgatgtggttgtcgtgggcgctggcggcgccggcatcgccgcggccgctcaggctgcgcagaacggcgacaccgtgctggtcattgaaaccaatgccgaggtcggcggcaacacgctggtctccggcggccagtatcagagcgtgatgccctacctggtatgggaccccgaagatcccgacgcgaccaccggcgtgggctttgacggcaacacctacaacaaggtcaagtccgtccagggctgcatcgacgagctgaaggtcattctggactggaacgaagaagaattcgatgcggattactacaaggatcatgagtatgtggccggcgacatgaaggagctttccaagcatggcgttcatgccgattacctgcccgtcctcaaggagctgaaaagcgagattcaggcctatctggactgggcgcagccgcagctggacgcgggcgttccggaaaaccagctcacgctcttctccacgctgaacctgcatatcttccagacctattacggcggcctgcgccagagcgcggacggcagcgaatggatctatggcgatatcgacctggtcacccagttcatccaggacggtcaggagctcaagccctggctggaggaaatgggctccaccttcgtggaggatacccagcccaccctgatcggtgcgctttggtatcgtgaaaacgagttcatcggcgctgacgtcgataccgacggcgacggcgagaccgaaaattacgccgggcgctggggcacctatttcgtggctcccatgaacgagttcctctccgcgaacgaagccaatgaaatcatgctgcgcaccacggccgaaagcctcattaccgacgacaccggccgcgtgatcggcgtgaaggcaacccgctatgacggcacgcctgtcaccgcctatgccaacaaaggcgtgattcttgcgaccggcggctatgctgccaacatcgacatggtgctcgacaccaacgtctactggtccagcgaatacctgaccgaggccaccaagaccaccaaccgctcctccctcaccggcagcggcattgatatggctgtcgaagtgggcgcggctaccacgggcatgggcttcacccagctgatgccgatttcctgggtggataacggaaacctggctttcggcggcggtaactatgccgtgtatatcaatcccaccacgggcaagcgctttgtggatgagggctctgaacgcgacgtgctgtccctggccgagttcaaaaacggcatggaagtcaacggcaccaagggcgtgttcattgaaatctacaatgccgccgagctgatccccggtcccatccagcttgcggaaggcgactatgagggccgctattatacccgcaaggcgaccgagctgggcgatctgttcgctcagatcggcgtgtccgctgatcccgacgttgtgctggagaccatccgcaactacgacatggctgtgatgggccagggcgagtttgaggatgtgggcaagtcgatcgcttcccgcaccatcggcgatgtggaaaagaacgaagacggcagctacaacgtggatacctacgatctggaaaacaccacgctgcgcatccgtctgatggccccctccacgcatcataccatgggcggcgttgaggtggataccgagcgccacgtgctggataccgaaggaaacatcatccccggcctgtacgctgcgggcgaggtgaccggcggcatccatggcggcaaccgtctgggcggcaacgcgattgttgaaatcttcgtttccggcaggacggcggccaatgccgttgcggctgatgccgaataa

SEQ ID NO: 803 - DNA, 1173 bp, unclassified Ruminococcaceae
atggccgcctccatcctcacaggggaagagacgcgtctggaggaatgcccggaactggtggacgtggcctatatggccgatattctgcgcaccctgggctgccggatacatagcggggacggggcgctgaccattgacccgcagagcctgaaccggcatgagatgcccgatgcgctggccaagaagattcgctcctccatctttttgctggggtccattctggcgcggttccgaaaggcaaccgtcacctttcccggcggatgcgagatcggtctgcggcctatcgacctgcatctgagcgggctgaggcagctgggggtcgatgtgcgggaggagggcggcctgattcgctgcgacggccggcacatgcgcgccggtacggtgcattttgactatcccagcgttggcgccaccgagaacgtgatgatggccgcggcgctgctcaagggccgcacggtgctcagcaacgtggccagggaaccggaaattaccgatttgcagaacttcctcaatgccatgggagcgcgcatcagcggcgcgggcacgcataccgtgaccgtcgaaggcgtggaccggcttcggggcgtaagctactgccccatgccggaccgcatcgtggccggtaccttgctggctgcggcggcggccacgggtggtgacatccggctgacgaacgtgccctgccgcgacctgtacgccgtctttaccaagatgcgggagatgggctgcgagatcgatgaggaggaaagcgcggtgcggcttcgcgcgccgcagcgactcacggctttccagcagctgcagacgcagccgcatccgggttttcccacggatatgcaggcccagatgctggccctggccgcgatggcgaagggaacctcggtggtggtggagaacgtatttgagaaccgctttgcgcacgcgggcgatctcaaccgcatgggtgccaatgtgctggtaaatggccgcacggctgtggtacagggcgtggatatgctctacggcacgcatgtgaccgcccgagacctgcgcggaggggcggcgctggtgatcgcagggcttgcggcgcgcggagaaacgctggtggagcgcgccgaactgatcgaccgcggatacgaacgcctggaagagatgctgggtgcgctgggggcggagatccgccgcgacagcgtataa

SEQ ID NO: 804 - DNA, 1368 bp, unclassified Ruminococcaceae
atggagaaactgaaagtagcggctccgctggacccggcgtttgcgcccatctaccgggagatgcaggcctttgccgcgcgtgcggcaaagggacccgagatccgcattgccgtggagcgaaacgacggcctggtagccacgcatgacatgcgcatcctcccggagggagaggacgatgcgctgaacctgcgcatggcggagcggatggtcaagagcatgctgtgggtatacggcggtttccgcgtgaccatcgcgggaagcaaggccgtgtatgagggagtgaaggagcagtaccgcgaaggcggcgagcgcgcctttgacgcgaatttcatggcgcacgtctatgagcatgccttcgaggtgtgctatgccgccacgcctgccgaagctccgcagcgcaaggatgcctccgcgcccatcggccgccatctggacggctgccggatcggttttgacgccggcggaagcgaccgcaaggtatccgccgttatcaacggtgaaagcgtctatagcgaggaggtcgtctggttccccaaaacccagtcggacccctcgtaccatttcgacgggatcgtcagcgccatgaagaccgccgcctccaaaatgccgcgtgtggacgccatcggcgtgagcagcgcgggcgtatacatcaacaaccataccatgagcgcctcgctgttcctcaaggtcagccctgaggattatgaaaagtacgtcaaggacatctatattcgcgccgcgaaggaaatcggggacgtgcccctgaccgtgtgcaatgacggcgatgtgaccgcgctggccggggccatgagcctgggcgaggacggcattctgggcatcgccatgggcaccagcgaggccggcggctatgtggacatgaagggcaacatcaccggctggctcaatgagctggcgtttgttccctgtgatctggcgccggaggccatggtggacgagtggagcggcgacatcggctgcggcgtgaagtatttctcccaggacgcggtgatcaagctcgcgcccgccgcgggcatcgagctggaccccgccctcagccccgccgagaagctcaaggtggtgcagggcaagatggagcagggcgacgccggcgcgcgtgccatctatgagaccatcggcgtgtatctgggctatacgctggcgttctacgccctgttttatgagatcaaccatgtgctgctcatgggccgcgtgaccagcggcgagggcggagatctggtgctggccaaagcgcaggaggtgctgcgcaccgaatacccgcagctgaagatgcaggtgaacctgccagacgaaaagagccggcgcgtgggtcaaagcgtggcggccgccagcctgccccagatcggttaa

SEQ ID NO: 805 - DNA, 1752 bp, unclassified Ruminococcaceae
atgcgcaccatccaatttgggtccatctatcacatgccctggctggagtatcgtcatgcgctgcccgacgggcgcgtgtgcctgcgcctcaagaccggcaggggagagttttcgcgcgtggccgtgcgggttaccagcaattacgccatgcccgattattttaaaggcgcggacgagtatgaaatggcggtggcctatcgcgatgagtggcatgatttttatgaggtgatcttttccccccgggacctgcggatcaagtatctgttcgtgcttcaaagcgatgagctgacgttcaagcttgacgccacgggcctgaaggcgggggcggatgcggaggaggacgtgagccaggcgttcgcctttgcctatgtgtatccggcggctcccatgcccgaatgggcgcgggggtgcgttgggtatcagatctttccggatcgcttccgccgcgaacccgtggaaaccgatacggagcctgtagagccctggaccagcacccgcgtgcaaaaccagtaccgcttcggcggcaatctgcgcggcattctcaaggcggtcccgtatctcaaggacctgggtgtaaagatgatctataccacgcccctgttcctcagcgacagctcgcaccgttacaataccttcgactacttcaagatcgatccgctgctgggcacggaggatgacctgcgcgcgctgtgcgacgagctgcataaaaacgacatgcgcatcgtgctggatggggtgttcaaccattcggggctcaagttcgcgccctttgtggacgcgatggaaaagggcgaggcctccccttatcgcggctggttctgctttgacgacaaaatgccctatggataccacaccttcggcgactggcgctacatgcccaagctgaacctgcaaaacgaggactgcgcgcagtatttcctgtccgtgggacgctactggctcgaaaaatgccatgtggacggctggcggctggatgtgagcccggaggtgtggccggatttctggcggcagttcaaaaccatgatgcgcaaggtcaaccccgacagcctgatggtggcggaatgctgggatgacagccgcgagtggctcaccgtgggcgacatgttcgattcgaccatgcactatgtgctcagccgcaacatctggagccgcttttgccgtcatgaaatcagcacggcccagtttgactgcgccctcaatcgcgccgccatgctctatccccagcgcacgcaggaggtgctgtggacgtttctgggcagccacgacacgcagcgcatccgtacgcgtgcgggcggcgacctgcgcatggtgcacgcggcaagcttcttccagttcacctacctgggatcgcccatcatctactatggcgacgagctgggcatggagggcggcgaggacccggactgccgacgccccatgcgctgggatgatgtggaggacaaccccacccgggcgcattaccagaagctggcgcgcctgcgcgcacagctgcccgcgctgcgcacaggccggttccgcagccacgtggctctggaaaacggcctgtacgccttccggcgcgaaaccgatacacagcagctgctctgcgtcgtcaacacgggactgcaaccggtcagcgtgcggctggaactgcccgggggcatggcgggaatggcggccgtgcatgaccactacagcggccgaagcctggctgttgcggatggtggggtgcatatttcactcaaggtgggcgaaggcttgattttggagtga

SEQ ID NO: 806 - DNA, 1323 bp, unclassified Ruminococcaceae
atgtcaaccgtgcctttcgcgccgccgggccctctggcgcccgttctccgcgttttgcagggatcgcctttttatccttcatctttattgatgcatgaatgccgcaacagggaggaaaccgccatgccgcttggactgtccaaaaaatgcagcgccatcgccccctccgccaccctggccatggatgccagggccaaggagctgcgcagccagggtgtcaacgtgatcggctttgccgcaggagagccggattttgaaacccccgaccccatccgcgaagccatgaaggaagccatggacctggggatgacccgctacacgcccgcggcgggcacgctggaactgcgccgcgccattgccgcgcgcctgcttgaggaccacggcctggtctacggcatggatgagatcatcgtctccaacggcgccaagcactcgctttataacacctttcaggccatcctggaccccggcgacgaagtgatcgtcgataagccctgctgggtcagctacccggagatggtgcgcatggccgggggcgtccccgtatttctggactgtccggaaagtcagggattcttgccctcgatggcggatcttgaaaagctcatcaccccgcgcaccaaggctttcatcctcaacacgccctccaatcccaacggctgcatgtggtcgcgcgagcagcttcagcagctggcggatctggccgtgaagtacgatttctacatcgtggccgacgaaatctatgaaaagctggtctacagcggcgagaagcactattccatcgccaccttcggcccggagatcaaggcccgcaccattttgatcaacggtgtgagcaagtcctatgccatgaccggtttccgcatcggctacgcctgcggaccccgtgacgtcatcaagggcatggtcaactaccagagccaggccacttccgcccccaacaccgccgcgcagcatgccgccgccgtggccctcaccatgccgcaggactgcgtggaggaaatgcgcaaggcttttgagcagcggcgcgaccggctggtggagctgatcaacgccattcccggcctgagctgccgcaagccccacggcgcgttctacgtgatgatgaacattcgcggcatcaccggcaagcgctaccacggcaaggtgctgagcggaagcaccgccatagcggaagcgcttctggaacatgcacatgttgcgctggtgccgggagcggccttcctggacgagggcttctgccgtatcagctatgccacttccatggaaaacatcgaggagggacttcggcgcattgccgcctttgtaaaggagctggagtaa

SEQ ID NO: 807 - DNA, 2013 bp, unclassified Ruminococcaceae
atgaaccgctttgtgctcaaagccccctatccgcccagcggcgaccagcccgcggccattgaatcgctggccagaggcgttctggagggaaaacgcgaccaggtgctgctgggtgtcaccggcagcggaaagacctttaccatggcgtccgtcattgaaaaggtgcagaagcccactttggtcctggcgcataacaagacgctggcggcccagctgtgcagcgagctgcgcgccttttttccggacagcgcagtggagtatttcgtcagctattacgattactaccagcccgaagcctacatcgcctccaccgatacctacatcgaaaaggatgcctccatcaacgaggagatcgaccggctgcgccactctgccaccgccgccgtgcgtgagcgcagcgatgtgatcatcgttgccagcgtgtcgtgcatctattccatgggcgatcccagcgagtatgagggcatgatggtcagtatgcgccccggcatgcaaatcagccggaacaagctgatcgagcgcctggtggaaattcagtatacgcgcaatgactatgaatttacccgcggcagcttccgtgtgcatggcgacgtgctggagatcatccccgccaatgagcgcgagcacgccctgcgtattgaatttttcggcgacgagattgaccgcatccgcgagatcgaggtggtcagcggcaacgtgctgagcacgctggagcacgcggtggtctttcccgcaacacattatgccatggaccgcgaaaagatgaacgaaaacatcgaccagatcgagcgggatctggaggtgcgggccaaggagctggaggacgagggccagccgctctatgctatgcggcttcgccagcgcacgcgctatgatatcgaaatgatgcgccagatcggcttttgcacgggcatcgaaaactacagccgctactttgacggccgcaagcccggcgacgcgccgtattcccttctggactactttcccaaggattttctgatgttcatcgacgaaagccatgtcaccgtgccgcagatccgcgccatgtacaacggcgaccgcgcgcgcaaaaaaagcctggtcgattatggcttccgcctgcccagcgcctatgacaaccgccctctgctgtttgaggagttccgcgccaggcagaaccagaccatctatgtcagcgccacccctgccgcctatgagctggggctgagcgaaaatacggtggagcagatcatccgtcccacggggctgattgacccgctgatcgtgcttcggcccgcgacgggtcaggtggacgatctggtgggggagatccaccgtaccacggaaaaaggcggccgcgtgctggtgaccacgctgaccaagcgcatggccgaaagcctgacggattacctgaaaaacctgggcatccgcgtgcgttacctgcattccgacattcaaaccatggagcgcacccagctcattcgcgatctgcggctgggtgagttcgacgtgctggtgggcatcaacctgctgcgcgagggactggacatgccggaggtcagccttgtggcgattttggacgcggacaaggagggttttctgcgcagcgaaacctcgctcatccagaccatcggccgcgcggcgcgcaatgtggacggccgcgtcatcctctacggcgacgtgctcaccgagagcatggagcgcgccatgaacgaaaccaaccgccgccgcgccctgcaggaggcgtacaacaagctccacggcatcacgccgcagagcgtcaagagcaccgtgcaggccctcatccgcatcaccgacagcatgaaggaccacaagcccgacgacatgagcgacgaggagcttcaggaactgatgaagagcgtggaggaccagatgctctccgccgccaaggacctcgatttcgagcgcgccgccaagctgcgcgacgagctgttccgcctcaagggggaaaagcacgacgacattcaaaagccgcaggtgcgtaggcaccggcggcccaggcgcacgcgttaa

SEQ ID NO: 808 - DNA, 1674 bp, unclassified Ruminococcaceae
atgaaaccgctttgctatgactacctcaactgccccacgaccttctccacctatgatgatttcaacaagaaattccgcattacccgcccggagagcttcaactttgcctatgacgtggccgaccggatcgctcaggaggaacccgaccggctggccgtgctttggacggacgaaaccggtgcctgcatccgttatacctttggacagctgaaggaagaaagcgaccgcgcagccaacctgttcaagtccctgggcatccgcaagggcgacaaggtgatgctgattctccgccggcatctggaattctggcctattctcatggctctgcacaagctgggcgccgtgggcgtgcccgccacccatcttctgaccgaaaaggatgtgctctaccgcgtggacgcggcgcgcatccagatgatggtcatctcccacaaggacgaaggcgtgctcagaagcgcggaagtcgccatgcaaaagtgcgaaagcctcaagcacgtgatgattctgcgcggccagcgcgagggcttccacagctatgagcaggaaatgcccctgcaaagccccgtgtgggacaagcccacgggggatgcctatccgcacaaccatgacctcttgctgctctacttcaccagcggcaccaccggcatgcccaagatggttacgcatgaccattattatccgctgggacatatcgtgaccagcctgtactggcagcagtgcgaggacggcgggcttcacttcaccatttcggaaaccggctgggccaagagcgtgtggggcaagctctatggccagtggctgaccgggagtgcggtctttgtctacgactttgagcgcttcatcgcccgcgacatcctcaagcagatgagtacctatggcgtgaccaccttctgtgccccgcccaccatgtaccgctacatgctgcaggagaacttcgcaggctatgacctgagccacctgcatcactgtgccgtggcgggcgagccgctcaaccccgacatggctgccgagtggctcaagcgcacgggcattccgcttctggaggcctttggacagacggaactggtggtcacgctggctaccttccccttcatgaaggtatgccccggcagcatgggcaaacccagccccatctttgacgtggacctggtggacgatcaggggaactcctgcccgccgggcgtgacgggcgagatcgtcatccataccgatgacgacgcactgcccatcggcatgttctccggctactatgaggacccggagctgaccaagaccgtctgggacaacggcctctactacaccggcgacgtggcctggcgcgatgaatggggctactactggtatgtgggccgcgccgacgacgtgatcaagtccagcggctaccgcatcgggcccttcgaggtggaaagcgcgctgctggagcacccggccgtgctggaaaccgccatcaccgccgcgccggacgagcttcgcggccaggtggtcaaggccaccatcgtgctcaagcccggctgggaggcgggcgacgcgctcaggaaggaactgcaggagcatgtcaagcgcaccactgccccctacaagtatccccgtatcatcgaatttgtcagcgagctgcccaagaccatttccggcaagatccgccgtgtggagctgcggcagaaggaccagcgctaa

SEQ ID NO: 809 - DNA, 1137 bp, unclassified Ruminococcaceae
atgcgttttttgcatctgtccgatttgcatatcgggcgcaggctcaatggtttcagtctgctggaggaccaacggaccgtgctgggtcaggcggtgaaactggctgaagaatgcgacgcagtgctgcttgcgggcgatctctacgacaagccccagcccccggcggaggccatccgtgtcgtgagcgatttcctggtggcgctccgtggcctgggaaagcccgtctttgccgtcagtgggaatcacgacgcgcccgaacaggtggcttattgccatgagctgctgggccggtgcggagtgtttctctctccggcctttgacggggcgctgcatggccataccctgcgcgacgcgcacggggaggtgcgcgtgtggctgatgccgtttttgcgtccctccgccgtacggccatatttcgagaacgtgcgcacctttgaggacgcggtacgggcggcgctgtccaccgtggcgcgggaaccggacatgaggcatgtgctggttgcgcatcagtatgtcaccggcgccgcgacctgcgattcggaaatcctctcgctgggcgggacggatcaggtgggcgcatcgctctttgacggatttgactatgtggcgctgggccatttgcattccccgcaaaagctgtgcggcgggcgggtgcgttactgcgggtcgccgctgaagtactcactgtcggaggagcggcagcgtaaggccgcgctggtggtggacctggggccggagggactgcgcggcgtggaggagcacccctttgcccccctgcgagatctgcgcacggttcggggtgcgctcaaggaattgactgagccggaatgcttcagcgaggactacgtctatgccgagctgaccgacgaggaggcgctggcggacccggtgggggcgctgcgcatcacctatcccaacctgattggcatgcgggtgcgcaacagccgcacaaacgacggcctcgcgcaggcggaagcagaggtggaagcggcggagagacgcacgccgctggagcatttcacggccttctaccagatgcagaataacggcacgccgcccgatgagcggcggctccgcgtgatgcggcaagtgattgaggaagcggaggcgaaacggcatgaggccggtcaggcttga

SEQ ID NO: 810 - DNA, 1302 bp, unclassified Ruminococcaceae
tttattccatacatatttacaaagtatgaaaaaagcgttacaatacaaaatgaatctttttatcaatacggaccggaggtgccgcaagtgcccacgttgacccagctctcgtccaatctgacggaaattgtgatttatgcagccatcgcgctggttaccctgacgggtctgtgcaagtgcatttatccccttttacgaaatgccacacttctcaaccgcgcggtcatcaagctggaaaagagcactgcggcgggggagcgtcccatctggcgcgaggcacgctttttgggtcgatcgctgcgcaacgagtggcagcagtttttgcttaacgccggacagctggacatgcgtggcattccctgcgatacgcgcgaatatatcaacgaggatactgtggtggacaagccgggtcacgcccagctggcggagctcattccgggcctgctgacctctctgggtattctgggcacgttcgtcggcctgatgcagggcctcaccagcgtggatttcagcaacgcggagggaaccatccagagcattccccagttgctcagcggcatgcgtttcgcctttgccacctcggtggcgggcatctcctgctcgcttctgttcaatatgtttaaccgcatggccgcaggccgggcggtgcgggcgctggacaatttcgaggatgctttctacgagctggccatgccacgtccgctccagccggatgtgcagatgatgtgccagaagcaggacgaggaagtccgcatggcacgactggccgaaaacgtgggcaatcacgtggcggcctcgctggaaatggccattggacgcgccatggcgccgcttacgcagtcgctggatacgtttatcaagtgtgcgacgcgtgagcaggtggacggcgtgcggcgcatcgtgggccagttcgtgcagcagatgaacacatcgctcagcagccagatgacagcgctgggcgacacgatgaacgcggttaaccagggtcagctgcaaacccagaagaatctgcagaccacgctggacgccgcgcgcgccatggcgggcgacgcgcaggcgatccgggaagcgagcgcggaaatcgcccggcaaatgcaggcgttcgctcaggagatgcaaaaagaacgcgacagccgcgccgaagcgctgggcacagcggaaagcgcaggacagtcccttgccgaccagctcgatgcgctgtcggaatccttccgtcgcatgcaggtagccgcggacttgctgacggatgaaatgaacacgcttccctccgacgacgcgcaggccccggcggcggagctgtaa

SEQ ID NO: 811 - DNA, 2487 bp, unclassified Ruminococcaceae
atggcaattttcggacactttacccagcgggctcagcgtgccgtggcggccgcccagcaggcggcggtgctgctgcaccagccctatgtggggacggagcatattcttttgggcctgctgaaggagcccggtcccgtggtagccgatgtgctgcccgcggatgtcaactatgatacggttcttgagcgcgtgcgcacgctcctgggcgagggcaacatgcagtccggcggcatgctggagctgaccccgcgcagcaaaaagattctggaaagcagcattctggaaagccgcaagctgcaccacagctttgtgggcacggagcatttctggctggctttgctcaaggagggcgaaggcgtggccgtgagcctgctgcgcagcatgggcgtggatacgcaggcgatgcagcagaagattctggaggcgctggtcaaatcccagcccgacggcggcgaggatgtttccgcgcccgacggcgaggaaggaaaggccgaaggcagcgtgctggaaaaatacagccgcgacctgaccaaggctgcgcaggacggcgagctggacccggtgattggccgcagcacggaaattgaacgcatcatgcagatcatgagccgccgcaccaaaaacaaccccgtgctcatcggtgagccgggcgtgggcaaaagcgccgtggtggagggcctggcccagatgatcgtggccggcaaggttcccgaaacccttaccggcaagcgcatcctgtccctggacctgggcagcatgatcgccggaagcaagtaccggggcgagtttgaggagcggctcaaggataccatcaaggatgtgaagaaacaggggaacgtgattctctttatcgacgagttccacacgctggtgggcgccggcaaggccgaaggcagcatggacgccgccaacatcctcaagcccgctctcgcccgcggcgagctgcagtgcatcggcgcgaccaccttggacgaataccgcaagaacattgaaaaggacgccgcgctggagcgccgcttccagcctgtcaaggtaggcgagcccacgcccgaagaggcgctggctattctcaaaggcctgcgcgaccgctacgaggcgcatcacaaggtaaaaatcaccgacgaggcgcttcaggccgccgtcagcctgtccgaccgctatatcagcgaccgtttcctgcccgacaaggccatcgacctgatggacgaggccgcctcgcgcgtgcggctgcacagcttcaccgccccgcccgacgtcaaggagcaggaggaccgcctcaaggccctgcaaaatgaaaagaaggaagccatcgctcatcaggactttgaaaaggccgccagcctgcgggacgaggagcgaaagctccgtcaggacatcgcccagaagcgcgcggcctgggaggagcgcaaaaacaacagccacgacgtggtcaccgaggaggatatcgctcagatcgtggccagctggacgggcgtgccggtcaagaagatgacggaggacgaaagccagcgcctgctccatatggaggagctgttgcacaagcgcgtcgtgggccaggatgaggccatcagcgcagtcagccgggcccttcgccgtgcccgcgcgggcctgcaggaccccaagcggcccattggctcgttcatcttccttgggcctaccggcgtgggcaagaccgagctgtgccgcgcccttggcgaagtgatgttcgacgacgaaaacgccctgatccgcatcgacatgagcgaatacatggagaagcacagcgtcagccgcctcgtgggcagccctccgggctacgtgggctacgaggagggcggccagctcacccagaaggtgcgcaacaagccctacagcgtggtgctctttgacgaggtggagaaggcgcacccggatgtattcaacatccttctgcaaatccttgacgacggccgcctcaccgacagcaacggacgcgtggtcaacttcaaaaacaccatcatcgtcatgacctccaacgccggtgccagcaccatcacctccaagcgctcgctgggctttggcggcagcgtggaaaccacccgcgactacgaggccatgaaagagcgcgtgatggctgaggtgaaggataccttccgtccggaatttatcaaccgcatcgacgacctgatcgtgttccacgcgctggagccggacgacatccgccgcatcgcgggcctcatgctgggcagcgtatccaagaggcttgcccagcgcggcatgaagctcagctacggagacgacgtaatcgccctgctggcggaggagggctatgaccccaactatggcgcccgcccgctgcgccgcaccattcagagaagcgtggaagatgcgctgagcgaggaaatcatcgccggtaaaattgccctgggcgaccaggtgcagctgtacgtggatgataacaagcacatcgccttccgaaagctcctgcctcaaacgcctgctcagcctgcgcctacgctggaagcgtaa

SEQ ID NO: 812 - DNA, 1014 bp, unclassified Ruminococcaceae
ccgtccgcgcgatccgcgctgggacgcctgacggggcccgtgcatgcccatcgcctcgccgccatatccttgggcggaggtgatggaatgaactgcattgacaaagcttttttcagcctggcggacgaaatccgatcgctggatgaaaaagagctgtactatcgcatgcgcaaaagctttgacgctgtgccggagccggccaagcgggggctgatgaccttcttttcccagtacccctattggggaaagctggatatcgaccggggcgactatgaagaaatcgcgctcaagcagcaggcgctttcccggcacatggaggattttgcatggctctaccgccggttggccgattaccgttccagaaaaaccctgtacgccatcttgagcaactggtaccgctacgattttgtcaccacgtcccaggccaaggaatatctcttcagcagctatttcgacctggatctgctttcgtgtgatgaaaacgaagtgatcgttgatttgggcgcctatatcggcgatacggtgcttacctatctggagcagtacggcgaggactgctataaaaaaatatactgctatgagatcacgcccggcacctttgaacagcttcagaaaaacctggccggctaccgggatatcgacctgcgccaaaagggcataagcgacgtggaggggtttatgtcccttgcggtcaacgcggccagcacctcggccaacaccctgagcgacgagacgggcggtgaaattcccgtaaccacattggacgccgatattcaggagccggtcactttgatcaaggccgatattgaaggtcatgagcagcgggcgctgctgggagccaaaggccatatcctaaaggaccatcccaagctgctgatctcggtctaccacaacaacgaggatctgtggaagattccccgcatgatccatgactggtgcagcgattaccggttctatctccggttccagagctccgttctctatcccacggagattacgctgttcgcgctctag

SEQ ID NO: 813 - DNA, 2289 bp, unclassified Ruminococcaceae
atgcaaagggtctattcggtgtgttcccccaaacccacgaacgatcagcttgccctgcaggaaacggtgttccataacgccaacggctatctgggcgtgcgcggcacgctggaggaaggggcgccgcagggcatggacaccatgcgcggcgcctatgtgaacggcttctatgaaatcgtccccatgaagcaggcggaaaagctgacccatgtccgcgaggacaaggaaagcatgatcaacgtggcggatgtgcagggaatccgcttccgcctggcgggggagtggttttcacaatggacgggcacgctcgtagaatccgagcgcaggctggacatggatcgcggaatcaccgaacgccgcgtcaggtggcgctcgccggagggacgcgaaacagccctttgctttcgccgcatggcgagttttgcagagccgtcgctgttcctgattgactgtgaggttacccctctcaactatgagggcgaggtggaggtggaaagcacccacctggcactggtgaaaaactatgccaatcccaacgatccacgtctggcaggagagagcgaatgtcatcttgttcctgccgggagcctgatagaggagggagccagctatctgagcacgcgcacccgggtgagcgggctgtcgctgaccaccggcgtgaagcacgcgctggagccggccgcgcagaatgcgcagacggtctacgaccccgcggcacacgcggcggcgttccatgccagcgtgacggtcggacagggacaaacgctgcggctgcaaaaatactgcgtcttttcagatgaacggcggcatggcgatacacttgccgccgcaaggcgggccatgaccggagcttttggccgggcggacgcactctaccgcgcccagcaggaaacgctcaccgccttctgggaaagtgcggacaccaccatcctgggcgacgacgatgccaatctgtccatgcagttcaacctttaccagctgtttcagtctgccgggcgcgacgggctgtgcagcattgcggccaagggtctgtcgggcgaagggtatgaagggcactacttctgggatacggaaatgtacatgatgccgttctttaccctcaccatgccacagctcgcgcgcaagcttctggggtaccgctaccgcacgttggacgcggcacgcgaaaacgcccgcctgctgggccatcggaagggcgcgctgtacccctggcgcacgatcgccggacgggagtgcagcgggtactttctggcaggtacggcgcaataccacattgtaggggacatcgcctatgcggtgggcatgtactacaatgcgaccggcgaccgcgaatacctgatcagcgagggcgcggagttgctgctggaaacggcgcgcctgtggatggatgttgggcatgtggcggagggcaccttccgcatcaactgcgtgacaggtcctgatgaatacacctgtctggtcaacaacaactactacaccaacgcatgcgccaaaaacaacctggagctggcggtgcgcgcggcgcatctgctggaagagtggggcgcatatggcgagtgggcagcccgcctgggcgttacccatgaggagttggatgcgtttgcccatgccgcgaaaatcatgtatctgccttatgacgaaacgctgggcatcaatccgcaggatgacagctttctgcaaaagccgatatgggacctggctgcgacgccgcgggaaaatttcccactgctgctccattatcatcccctgcagctgtatcggtatcaggtatgcaaacaggcggataccgtgctggcacatgtgctttttgaaagcctggccgatgcgggggtacgggaacggtccttccggtactatgagaagattaccacgcacgactcttctctgtccaactgcatcttttgcatcgatgcctgccgcttgggtctgcgccgggaggcacgcgcctattttggcgacagcgtgaagaccgacctgctcaatacgcatggcaacagcaaggacggcatccataccgccaacatgggcggttgctacatggccgtggtcaacggctttgcgggcctgcagctgtgcgcggatggcgtgagggtcgctccgtttctgccagaagggtggacggggctcaagttttccttccagttccggggaagcagactgcgtttcgagatggagggcggagaataccgcgtgcggctgatatccgggggaccggtttcggtctttacgcaagaggatgccttttgtcttaaccatccgggcgacgaggcgaggggcaagacgcgctaa

SEQ ID NO: 814 - DNA, 1338 bp, unclassified Ruminococcaceae
atgcggctgaagcatcacattcttttgtatacctttttgggtgtggcggtgctcatatccatttttctcacgctggattacggcaaccgggcccagcgaagcgcccaggccctggaggacgcctatgcgcagcgcgtgctggaaacgcaggagcacttgcaggccatcgggctcaaactgggcaaagcgccggtagcgacggacgcgcgaacccaggtggagctgctcgcgggcatcagccggcaggcggacaatgtggtgagcggcctgtcggccctaccgctgagtcatatcgccatgagcgacacgctgaagttttgcaatcagctgtcggaatatgccatggtgctggcgctggcggtatccgcaggccagccgctgaccgagcagcaaaccacggagctgagcgccctggaaagccagtgcgcgctgctgctggggcagtttgctaccgcgcgggagaccatggtggccgaaagcctgcgtctgacagcccagccgggggtgttctatgccgaggcgcaggcgggtcagcgcccgctggagcaggtggccgatcccgacaacggcatggactatcccagcatgatctatgacggcgccttttctgatgcgcggcattacggcacgcccaaggccctgggcgaggaactgatcgaccagatccgggccctggaaatcgccagagccttcgtgggggaggagagggtcgaacgtgtggaggcggccccggacagcggcggtaccctggccagctacggtgtgaccctgaccctgaacgacggtgtggtgctcaatgccgaagtgacccgtcaggggggaaagatgctgtggatggtgccggagcatgctgcctttgcccccgcgctgacgctggaggaatgtgcggaagcggcgcagggctttctgctggaccgcggctatggcgagatggaggccaaccactatcaggtgtacgacggcctggcagtaatcaattttgtggccgtgcaggacggggtgctgctgtatcccgatctggtcaaggtacagatacgcatggacaccggagaagtggtaggtctggaggcaaacaactatctgatgaaccacacccggcgcacggggcttgcgcctgcgctttccgcgcaggaggcgctggagaaggtgagttcccggctggaggccggtcaggcgcggctgtgcgtgattccctaccgcgagggggagcgcctgtgctacgaggtgccgggccgctacgaggagcgcgagtaccgtgtatacatcgatgcgctgacgggcgaagaaacagaggtgctgatgatggtggacagcgttgggggacgtatggcggcctga

SEQ ID NO: 815 - DNA, 1206 bp, unclassified Ruminococcaceae
gtgagccagtacatcgagccggtcaaatcggcgctggtgctgtttccctttgtggcgctggtgctcacgctgccctatatgctgtttcaataccgcaggtacggggcggtgctgcttctgcgcacggcgatcgtgtattcgtttgtgctgtacctgatgtgcgcctattttctggtgatcctgcctctgccggatgtggaaacggtcagcgggctgacctccgcgcgcgtgcagctgattcccttccgggaggtggcggacctgctgcgcaacgccggcgtggacccgagtcggcctgccacgtggtaccgcctggtgtggaaccgggatttcttccagatcgtggccaatgtggccatgtttacgccgctgggaatctacctgcggtattatttcggatgcagcctgaaaaagacgctgctgttttcccttttgctcagcctgttttttgagctgacgcagcttacgggcctttacgggtattatccgaggccctatcgtctggcggatgtggacgacctgatcaccaatacgtgtggcgggctgctgggatacgcgctggccccactggcgatgcggctgctgccctcgcgtgagcagatggacgcgcgggcctaccgcaagggcgaacaggtgagcgtgacccgccgctgctttgcggcgctggtggactttgcggtgatgctggtggctctcgcggcgctgatgtggcggctgccctcggtgatgccgtccggagaagatcccgtggcgatggcggcgtggctgtttggctgctatgccgttggaattgtggggtactttgtgcttggcacatggctgggtggaggacgcacggtgggcaaggtgcttttgcacctgcgcctgacggacctgcgaagcggcgaccgtcccagactgtggcagtgcgcggtacgctatggggttttgtacctggtggtgatgcccactcccgcgtttttgctgctggccatcaccctgggaacagaggatggggagatcggcgtgtggctggtgctggcctgcatagggcttctgatgatatatatcctgttctggctgctgctggccgtgcatgtggtcacacacgacaaccagctgctgcatggcaagctgagcatgacgcacaacgtcagcacccttcgccaccggtattttgcccggtggcatggcgcccggcatgcgcatgatacccctatccagtaa

SEQ ID NO: 816 - DNA, 1551 bp, unclassified Ruminococcaceae
atgaccaacatcaggaaaaccattgccctgcttctgtgcctgtgcatgctgtggggaactgccgccctggccgaggatgccgctgcagcgaccgacactgccaccacggccgtcaccgagcttaacgacaccgacgtgctggccaccgtcaatggtgaggaagtgagctgggacgaggtcaaaagcctgtactccagtctggtctcccagtacggcagcgcctacgacctgacccagcaggccaatgtggacctgttccgcgccgtggcgctggaaaaccggcttacagaggtgctgatggagcagaaggccaaggaatttggcgtcgatcagctgacggatgaggaaattgccgatcttgaatcccaggccgacaccaactgggaagacgctattgcgaattatgaggcctatttctatcctgacctgaccgaggaaagcagcgaggaagaaaaggccgccgcgcgcgaagaggccatcaactattacaaggatcagggctacactcttgaaagcctgcgtgaggaatataagcgctacggcgtgctcaacaagatcgccgacgtcatggtgcaggacgccacggtgaccgatcaggaagtggaggatctgtaccagtcgctggtcgcggctgacaaggagctctacgaaaacgacatcgccgcctatgaagcctacaacagctatgtggatcagatggcgatgtatgccgccctctacggcaccagcagcaatctggaccatgcctggtacaaacccgacggcttccgcgcggtcaagcacattctcctgcccgtggactccgagctgatgaccacctataccgatctccaggcgcgttgggaagagcagcaggaggccgctcaggccgctgaggagagcgccggtgaagcggctgaaaccaccaccgacaccgctgccaccgaagcgaccgccgagcccaccgccacgcccgaacccgtgaccgaggagcaggtgaacgaagccaaggccgccatcttcaattccctggcggacaccatcgacgaaatcaaccagaagatcgccgacggcgccgactttgacgagctgatcgccacctatggcgtcaacgaggacggtaccgcctccgaccccggcatgaccaccgagccctacatgaccagcggctatgaggtgtgcagtgcctcgaccgcctatgtgcctgaatttgttgaggcagccatgagcattgacaacgtgggcggcgtctccgctccctacctgagcagctatggcgtccatatcgtcaagtatatcggcgatgtggaaggcggccccatccccatgaccgacgagcagcgcgaagccaagcggcagagcctgctgaccagcaagcaaaacgagctgtataccgctacgctggaaaactggatggcggaagccgatatcacctacaccggcttgacccccagcattgcggagcttgaggtcacgcagacccaggataccgccaccgcctctacggaggcggaagcccagacggcagaggaaaccgccgctcccgaagccacggaagcgccggccgcctga

SEQ ID NO: 817 - DNA, 1146 bp, unclassified Ruminococcaceae
atgaacgaatcaatggcacagacctgcgcagggcgcacggccgtggtcatccccgcctacaagccggatgaccgcctgcccccctatgtacaagcgctgaaggacgctggcatcggcagaatcgtcgtcgtggacgatggcagcggtcaggactaccaacggttctttgatcaaattccccgggacggggtgagccatgtcatcagctaccagcccaactgtggcaaaggagtggcgctcaagcgcggtatggcctggcttatggacaacagccccgatcaggacatcatcgtgacggccgacagcgatggacagcacaccgtggaggatgtgctgcgcatggcccaggacctggcgcgcgacccctccgggctgctcctgggcagccgggacttttcccaggagcatgtgcctcccaagagccggatgggcaaccgcatcacctcggtggtgttcaagctgctctacggatgctgggtgggcgatacgcagacgggcttgcgcggcttccaccgcgacctgctgcccgccatgatcgccgtgcccggtgatcgctacgagtatgaaatgaacgtgctcatcgagtgcgcagccatgaaggtgcccatgcgccccctgcccatcgaaaccgtgtatgaaaacaacaatgagggaagccatttccgcgccttccgtgacagcgcgcgcatctatcgcgtgatcttcagcggcttctttcgctttgtgggcacgtcgatggtcagctttttggtcgactatggcctctatctgttgtttaacaacctgctcaaatacttcggcacctccctggaccaggaagtcggcgtgctgttcattcgggtggtgccccatatcctgatcgccaccgtggccgcgcgcctgttgtcgggggttaccaatttctttttgaaccgcagcttcgtttttaccgataagggcaaggtgagccaggcgttcctgcgctatctgggcgtgtttttcctggtgatgctgctctccgctttgctgaccagcagcctgcatctgtggctgggctggagcgataacaccgccaagattccggtggacatcgtgctgttttttgtcagctaccacctgcaacgccgctgggtatttcaaaaaaagcccgcgaaggcgggctcaggc

SEQ ID NO: 818 - DNA, 1023 bp, unclassified Ruminococcaceae
atgatccgacgtaccgcctgcctgatcgcccttggaggcgaaccctatcgcaacctggccattgagaagcacctgatggacacgcttccggaggatacggccatcctctatctgtggcagaacgaccgctgcatttccatcggccggtgtcagaacccgctgtatgagtgccgggtcgacccctttttaagcgcaggcgggcatattgcccggcggctgagtggcggcggagcggtctatcaggaccggggcgccctcaatttcagctttatccttcccaaaacggcgtttgacatccaccatcagctcagcattctggggatggcggccggtgcgttcgggattcagtcgcgggccatgggccggggcgacctgtttgcagcgggccgccgcttcagcgtcaacgcatatttcaaggctggttcggcggcgctgcatcacggcacgctgtatgtggataccgctctggaccaaatggcacagtttctgtcagcaggaggcggagatcttgccgcccccaatcctccggacacggcggcacatacgatcaacctgcgcacgctgaaccccgccatcaccgtcgaagagctggagcaggctctctactgggcctttgcccgtgcctatggcgcgcaacccgcctggctggacgaacggattctggacggccgttccatcgccgcgctcacccttcggttctccgatccaaaatggatttatcccgaggcaatggcctccaccttcagcgtgtcggagcgctttccctgggggcaggtcacggtcaagctcaaggtggacggcggagtcatccgcgctgcccgtgtgtttacggatgccatggaggccccgctcttcggtctgatcgagcagtccctgaccggttcgccctatttgatcagcgccatttccggcagaatggaccagcgtctggaaatgctgagcgatccgcgtctgatccagctcgccggcgatgtcaccaatctcatctgcgggcgtattcgctcgttggaccggcagggctga

SEQ ID NO: 819 - DNA, 1638 bp, unclassified Ruminococcaceae
atggaagtgacgacggttttttcattgctgggcggcctggggttgtttctgtttggcatcaagacgatgggcgatggtctggaacaggcggccggcagcaagatgaagcgcctgctggaggcgctgacccgcaacaagctgacggccgtgctggtgggcctgctggtcacggcggtgattcagtcctccagcgccaccacggtgatggtggtgggttttgtcaacgcggggctgctgtccctgagcaaggccatcggggtcatcatgggcgccaatatcggcaccaccgtgacctccctgatgctgtcggtcaaactgaattttggcgtcctgtttaccgccgtaggcgcgatttgccagctggcgggcaaccggtccagcttcaagctgtttggacagatcatgatggggctgggcattttgtttgtgggcatggacgccatgaccgcggccatggaacccctgcaggagtggcagggcttccgcgacatgatggaatgggccaggaacccatttgtgggcgtgctggtgggcgcgggcgtaacggcgcttctgcagagcagctcggccagcgtgggcatcttgcaggcactggcggccacgggggcgatcagcctgcaggcgtcgctgtttatcctcttcggccagaacatcggaacctgcgtgaccgcgctgatggccagcgtgggcgccaaccgcacggccaagcgcgccgcggtggtgcatctgctctttaacatcattggcgcggccctgttcatcatcatcgcgctggcgctacccctggcttcgtggatcgagatgctggcgggggccaacctgcggttgcagatcgcctttgcgcacatcatcttcaacgtggtgaccacgctgctcttgctgccgctcagcggccttttggaaaaactggcgtacctggtggtacgcggagaggacaagcaggaggagcccatgcggctggaatacttcgacacgcgcctgttttccacgccgccggtggccgtgcagcagctgtttcgcgaggtgcagcgcatggcggatatcgtcaccgccaactaccgctttgccatgcagtattactttgcgcccaaggatctgtccgtggacgagtttgacaacaacgagcaggtgatcgactacctcaacgccgaaatcacccagaacctgattgagctcaagggcctgaacctgcgcagcgaagatatccggctggtaggttcgctgtttcatgtggtcaacgatctggagcgcatcggcgaccacagcatgaacatcgtggaaatcggttcggcgcgcaaaaaggagaagctgcgcttttccggcaaggcggagcgcgagatcgaggagctcagcggcatcgtgaccagcatgctggacaagagcatccacatcgtcaggcagcagatcaccgatgtggagatcatcggcgaggtgatcgagctggaaagccaggtggacaagctgtgcgaaacgctggcggatcaccatgtcgagcgcgtcaaaaataaaaagtgcacgccgagaaacggcatgctttatctggatatgctcaacaacctggaacgcatcgcggaccatgcggacaatctggcctcgtcggtggaaccggaccaccacgacaatcgccttctttggtag

SEQ ID NO: 820 - DNA, 1731 bp, unclassified Ruminococcaceae
atgctgatgaccccctggggagaacacctggacgaaaactgcatcctcaccgaatatccccgcccgcagatgcggcgggacagctacctcaacctcaacggccgctgggaatacgccatcaccgacagtgatgaatcaccccggcactgggatgggaccattctggtgcccttttcgcccgaaagcgccctgagcggcgtgggccgttcgctccagccggggcagacgctatggtaccgccgcgaggtgatcttgccgcagggcttcatcccggcggatgggcggctgctgctacatttcggcgcggtcgatcaggaggccgccgtgtattggaacggcaggctgctgggccggcacatggggggctacaacgcgtttacgctcgacgcgacggatgcgctcggcccgcgcaacagcctcgtggtgcgcgtacatgatgatacggacgcgagcttccacagccggggaaagcagaaaacccggcgcggcgggatctggtacacgccgcagagcggcatctggcagacggtgtggatggaggccgtgccccggcactatatcgagagcctgcgcatcgtgccgctgtttgaccagtcggcggtggaggtgatggttcgctgttcgcagcccctgcaatgcgaagcgaccgtggatggccgtaccgtgcccttcaccagcggcgagccggcgcgcatccccatgccggattttcgtgcctggagtccggaggacccctatctctacgatctgtccgtcactttgggcgaggaccgggtggagagctacttcggcatgcgcaagatggaggtgcgcgcggaccggggcggcgtgaagcgcctgttcctcaacggcgaaccgtattttcagagcggcctgctggatcagggatactggcccgacggcctgtataccgcccccagcgacgaagcgctcatctacgatatccagactgccaaggccatgggctttaacctgctgcgaaaacacatcaaggtcgaacccatgcgctggtactaccattgcgaccgcctgggcatgctggtatggcaggacatgccctccggtggaggaaaataccgcttctcaaccatcaccctgccgctggtgaccggcattcatcggcgtgacaatcattaccgggcgtttgcgcgcgcctcttcccagggacgcggcgagtacattgatgagctggaagagatggtcggccagctcttcaatgcgcccagcgtggtgctgtgggtgccgttcaacgaaggatggggtcagtttgacagcacgcttgtgatggagcgcctgcgcgctctggaccctacccgccccgtggaccccgccagcggctggcacgatcagggcgcgggagaactgcgcagcctgcatgtgtatttcaagcccttccgcttccggcgcgaccggcgcggccgcgcgctggcgctgagcgaatttgggggctataacctgcgtgtggatggtcattgcttcaaccagaaggactacgggtatcgccgtctgcccgatgccgccgcgctatggcgggacttttcccgcctctatgaacgcgaggtgccccccgccgtgccgaaggggctgtgcgcatcggtctatacgcagctcagcgatgtggaggatgagctcaacggcctgatgacctacgaccggcgcgtggtcaagctggatgcggacgaggtgcgggaactcaatgagcggctgaaggaagcgtcgcccagaacgtga

SEQ ID NO: 821 - DNA, 2175 bp, unclassified Ruminococcaceae
atgcacatgcgctttacccctgcgcaggaagccgccatccaggccggcaaccgcgaactgctggtatcggctgcggcgggcagtggaaaaacggccgtgctggtggagcgcatcgtgcgcctgattgtggagtgtggcgccagcatcgaccggatgctgatcgtcacctttacgcgcgccgccgcgggtgagatgcgcgaacgcctggaagcacgcctcaatgaggccgccgcgggcgattcgcgcctggtccgccaggctgacctggtcagcaccgcgcaaatctccacaattcatagttattgccagcaggtggtgcggcagaacttccagcgctgcggcgtagacccgcaattcatgctggcggatgagcgtacccgcgccggttactggcatgatgcaatggaagaaacgctggagtggctgtacgaggcagcccatgaggacgaagagctcgcagcgctgacgcacaaattcagcgagcgcgagatcacgctcatgatggagacactttaccggtttctgatgtcacgccccgacccgatgacctggctggaggagagcgcagccaaggagtggaatgccgattccatggacagtgagccgctggcccaggcgttctgccgggaagctgcgctgattctggaaggaatggacgccctctggcggcaggcggacgcgatgcgtgcaaatccggcgtttcccccgccctatgtgcggaccctgcaaagcgacaggggaagcctcgatgggctgcgaacggcctgtgataaagggatgagcgccctgtgcggggcgctgggaaccctgaagtttgccaccctggggcgcttcaagcccgcgaccggagacgaggaacgcctggcgggggactttaaggatctgcgtaaccggatcaaggacctggcggatgacctgaaaaagctgctgcccgcggattttgaacagggcgtggcggatatgcaggccatggggccggccacgcgtgggctggccaaagcggtgcgccgctttcacgaccgctttcaggcgcgaaagctcagcgaggcatgcatcgatttcggcgatcttgaacatatgacgttggccgtgctgcgcgatccggacctgcgcggccagcaggcacagcggttcgatgcggtgttcgtggacgagtatcaggacgtgagcgccctgcaggaggccatcctcaacgcccttaagcgcggcgagggccagacctatttttatgtgggcgatgtaaagcagagcatttaccggttccgcctggcagagccgggcctgttcctgggcaagctgcaacgcttttcgccacgggaggacgcaccatgccgccgggtggtgctgaacctgaatttccgcagccggaccggggtgctggatgcggtgaaccgcgtgttctcgcacgtgatggaccgccgtgtcacggaaattgactatgatgccgacgcaaggctgtatcccggcgtaccctccgagggagacccggcaaccgaactgcacgtgctcaacgcccaggggcggaggccgcaggatatggtcctggccgaggcggaactcatcgcgcgcgacatcctcgcaacggtgggcgagccggtccccgacgctcagggacgccccggcgcgcctctccactatcgtgacatcgccattctcctgcccgtgggcaagaacgtggccgacaaggtggagctggtgctcggccgtatgggcattcccgtgtactgcgaaggcggcggcgaccccatgacgtccgacgaggtggatcaggtgcttcagcacctgacactgctggataatctggccaatgacgtggcgctgctcagcgagctgcgcagcccgctctttgagctttcggagcgagagctggcagccatccggctgctgcgtcctcagcgggaggccagcttcctcagcgcgctgcaggcggcggcccacgaggccggcgcgcctcttgacgcgcgttgccgcgccgtgctggacgcgctggaggccgaacggttttatgcgcgcagcatgccgctggccgaatacctgtggagttttctcaagcgcagcggactttatgcacattacggcgcacagcctggcggaaagctgcggcaggcaaatctgcgcatgctctgtcaccgggccgatgcctatgagcagagccacacggacggcctgcatgga

SEQ ID NO: 822 - DNA, 1971 bp, unclassified Ruminococcaceae
atgcgtaaaggattcttcccacggctggccctcagcggcatccgtaaaaaccgcagcatttactatccctatattctcaccgctgtgctcaccacggccatgatgtacatcatcggctccctgcagcagatcagcaccgactattcgggcaccctggccttttccctgcagctgggtattgtggtgacctccgttttcagcgttgtgtttctgttctacaccaacagctttcttatgcgccggcgcaaaaaggagttcggcctgtataacattctgggcatggaaaagcggcacctgggccgcctcattttctgggaaacggcgatgatgctggcggtcagcctcacgattggactggccgcgggcgtgcttctggacaagctgatgcacctggtgctctcgcgcctggtaggacaggccgtctcgctcacatttgccgtatcgcccggttccatgcgctacaccgccgcgttgatcagcatcacgttcgccctgattctgctcaactccgtgcgtcaggtctacgtcgcccgtcccgtagagctcttgcgcagcgctgaggtgggcgagcgcgagcccaaggcccgctggctgctgggcctgctggggctgatttcgctgggcacgggctactggctcagtgcaaccgtcaaggacgcgggcatgatgattctgttctttttcgtggcggtgctgctggtgatcgcgggcacctacctgctgttcacctccggcagcatcacgctgctcaaggctctgcgcaaaaaccggcgttactattacaagccggaccacttcatcagcgtatccggcatgatttaccgcatgaagcaaaacgccgtaggccttgccaacgtgtgcatcctgtccaccatggtgctggtgatggtgttttcgacgctttccctgtggctgggcatggaggacaccctcaacagccgcctgcgttcggacatcgatgtgcggtccgcctccacggatgtgtccgcactggaggccgccgtggatgagacgctccggcaggcgggcgcctcacgagaggacacctggacctaccgctacctctccttctcggccctgcccacccccgagggctttgtcagcagcgtttccttcaccgaaagcgacgccctcattgccagccccgccaccttccaggtgatggtcgtggaggactataaccgcatgctgggccgaagcgagacccttgcgcccggcgaggcgctgctggaatgtacccgcggaaactatgagggcgataccctgcgcctgctggacgaaacctttgccatcaaagcgcgcatttccgacggtctgggtgcggggcaggcgctggccagcatttacgattactactgcctggtggtggacagcatggacaccctgcgccgtctggacagtgaacaacaggcggcctatggggatcgcgcctccgccatccgcacttccatgagctttgcgctccttcctgcctcaccgcagctatcggagcaggtggccgcgcttctgcgcagccaggcggatgcggacggcttcacaagcgtggccgagcgcacggagcttcgtgaaaacctcatgacgctgtatggcggcctgctgtttgtggggctgttcctgggactcctgttcaccatggccatgatcctcatcatctactacaaacagatcaccgaaggctatgaggaccgggagcgctaccgcatcatgcgcaaggtgggcctgagccgccgggagatccgccgctccatctcctcgcagattctgatcgtctttttcctgcccctggcggcggcagggctgcacgtagccttcgcctttcccggcatcgtcaccatgtttcgcgcactcagcatgaccaacgtcacgctgatcgccggctgtgcactgggcagctttgcgggcttcgcagcgctctatggcgctgtgtacctgctaacggcccgcgtgtactaccgcatcgtcagcgaatga

SEQ ID NO: 823 - DNA, 1380 bp, unclassified Ruminococcaceae
atgaagcattggaacatcagtttgcctcggacccccgcgctggcgctggcccggcagatgctggaaggctgtctgaggacctatgacgtgcccatggagggcgcggaggacgcctgccgcatcaccggcgctgtggtgccggacgcggccctgccgccggagggctaccgcatgcgcatctgcatggagggatcgttgcagtctgttgaaatcacgggggcaacggacgtatccgtgctctatggcgtatcggatttcgtcaatctcgtagtgccaaaggcagagcaggcccatacgtggatgaagccctattacttccgcaatccctttgaagaggggtttgagaacatggactgcgtgcacgcgcctcaggtgcgccgacgcggcctgtggacatggggttatgtcatttacgattaccggcgctacctggccaacatggcccgcctgaagctgaacgaaatcgtcatctggaacgattacgcaccccttaacgccgctgaggtggtggcctgcgcgcacgacttgggcatccgggtcatctggggatatgcctggggatgggacaccaaaattgatgttcgcctttccgacgaaaccctcctcgcccgcctggcagacgaggccgtcgagcgctttgaacgtgaatatgcggcccttccgggggatggcatctacttccagagctttaccgaaaccgccgagcaggagctggacggccgctccatcgccgatgtggtggtcccgtgggtcaatggcatttgtgcccgcatccttgaaaagaggccaaacctggaattgcagttcggcctgcatgccacctcggtggcgcaaaagctggaccgaattgctcaaattgacccgcgggtacggattgtgtgggaggattgcggcgcgtttccctacgcctatctggccgagaacgtggcccatgcccgggagaccgaggattttacccgcaagttttcgcacctgcgcgagcatggcgctacaggcgtggtgaccaagggcatgatttgcctggactggaccgacttcgtacaccgggcggggcccgaacgcatcggcgaatgcagcgccggggaaatcgccgcacgcctccccatcgcgcgcagggtcatgcgccttacgcagagctactggatgcaaaacggggctcacctgcaaagcattgtaaacctgcttttgcagggggacccggaatgccagatcctcgcgctgatggaggatggtctgtttgaaacgtcgatctggcttccgacggcactgtttgccgccaccctctgggatagccggactccctttcctcaactgctcacggaaaccgcgcagcggcccgatgtggtctttgccaacgcaccacaggctgatacggtatga

SEQ ID NO: 824 - DNA, 2124 bp, unclassified Ruminococcaceae
atggcgacgactgcacaaaaactggtgatcgtggaatcgcccgcgaaggccaagacgattgaaaaatttttgggcaagggttatcacgtggaggcctcgcagggccatgtgcgcgatctgcccaaatctcagctgggtgtggacgcggatcatgattttgaaatgaaatacatcaccatccggggccggggcaacatcctggcgcggatcaaaaaggaagccaaaaacgcgtcccgcgtctatctggcaaccgaccctgaccgcgagggagaagccatctcctggcacctggcgcacaccctgaatctggaccccaccaagccctgccgcatcgagtttcacgaaatcaccaagaaggcggtcaaggatgcgctggagcacccgcggcccatcgacatggcgcgcgtggacgcgcagcaggcgcgccgcgccctggaccggctggtgggctacaagatcagcccgcttctgtgggcgaaggtgaaaaagggcctgtctgccggccgcgtgcagagcgtcgctacgcggttggtggtggagcgtgagcaggaaatcgaagcgtttattcccgaggagttctgggatgtgaacgcgcgctttgaagcccagaacgccaaggggaaaaagatgacctgcgaggcccgtctggtctcccttgacggggaaaaggctcagatcggaaacgaaaaggacgcgctcgcggccaaggagcgcattctcaaaaccgctttcaaggtccagtccgtcaaaatgggcgaaaagctcaaaagggcgcagccgcccttcaccacctccagtctgcagcaggaggccagccgcaagctcaatttctcgaccgccaaaaccatgcaggtggtgcagcagctctatgagggcatcgatctgggcaaggcaggcacggtgggtctggtcacctacatccgcaccgacagcgtgcgcgtgtcggccgaggccgtggaggctgcgcgcggatttatctgcgcccagtatggtgaggagtactgccctgagacgcccaaccagtacaagggacgcaaaaacgcgcaggacgcccacgaggccatccgtcccacctacatggagcatacgcccgacagcgtcaagccctttttgagccgggaacagcacaacctctaccgcctcatctatgcccgcttcctggccagccagatgaagcccgctgtattccagaccatgacggcggatatcgtgggcgatggggtggacatgcgctactacggcgagcatatgattttcagcggctaccgtgctgtctatgtcgagggcacggatgatgagcaggagacccctgaaagcatcctgccggtgctcaaagaaggcagcgatatggcctttgtcgaggtggacgcggtgcagcatttcacccagccgcccgcccgttataccgaggccagcctggtgaaaaccctggaggaaaagggcattggccgccccagcacctatgcgcccaccatcaccaccatcatttcgcgcggctatgtcacccgggagaaaaagcgcctgtatcctaccgaactgggacgcatggtcaccagcatgatgacggaatacttcggcccgatcgtggatacgcagtttaccgcctcgctggaggataagctggatgccgtggaagagggcaaaaccgagtggcggcagatcctgcgcgatttttatccgccctttgaaaagatgcttggcgtggctgaggaacagattgagaaggttgaggtcaaggatgaggtcagcaacgtgccctgcgaaaaatgtggcgcgatgatggtctataaaatggggcgcttcggaaaattcctggcctgtcccaattttccggcctgccgcaacgccaagcccatcgtccattacattgacgcgccctgccccaagtgcggcgcgcggctgatggaaaagaccagcaagaagaaccgcaggttctacggctgcgaaaactatccggattgtgattttgtcagctgggaaaagcccatcgtggaccgctgtcccaaatgcggcagctatatggtggaaaagcccggcaagcggggtgaggtggtgcacctgtgcgccaacgaaacctgccgctacaaaacatccgtccccaagcccgaggaggatgaggactga

SEQ ID NO: 825 - DNA, 1620 bp, unclassified Ruminococcaceae
atgaatctggcaacgccgctccttcgctggctcacgctgctttctccggtgtgctgctgcctgtttgccgcacgcggaatcctgcatttttttcagctggaaagctatcagtttccgggatattttcgttcgctcaagcgcaaccgggttcacagcctgctgccgggtctgtgtgtaacggtgaccgtgctggtcctgctgtacgggtttgatgtgctggcgctgcgcggagaagcccggtggaccgggattcttgcggcagtgctgcttctgcccctgtcggcaggtgctggcctggtgattggcagagcgttttcgccgcgccgcgccaaaaagaaatttgtgattaccggccgggtcaaacggctgtatgtggtcttttttttggtgatgacgggcatcagcgcgctgtgtgccgctacgccctgggcggttctgcctgcgctgtggccgctggcgctgccgctggtggtggccctgagcggccttttggcctggccgattgaaaaggcgatcagcgaatgctatttccgcgacgcgcgccggaagctgctttccaatcccagactggtgcgcatcggcattacgggcagctatggcaaaacgtcggtcaaacacattctgggcgccatcctgagcgaaaaatatcccacacttattacgcctgccagcttcaatacgcccatgggcgtgacccgtgccatccgggagaagctcacgccctcccatcaggtgtttgtgggggaaatgggcgcgcggcatgtgggggacatcaaggagatgtgccggctggtacatcccaccatcggcatcattacctcggtgggaccgcagcacctggaaaccttcaaaaccattgaacgcgttgcatccaccaagtacgagctgatcgaggccctgccagcggaggggtcccacgcctatttctatgacgacggcgcctatgtacggaagatgtacgaccgtacgcagaagcccaagacgctttgcggccgggaccccgccacctgtgattgctggtgtgacgaggtgagcgtatccgcggagggcagccgattcatgctgcatatccgcggagcaggcagcgtagagtgtcatacccggctgctgggcgagcataacatccagaatattcttctggccgcggctgtcgcctccgatctggggctcacgctgcgccagatcgcccatggcgtggagaaactggctcccatcaaacaccgtctggagctgctcagccatcccggcaacttcaccatcatcaacgacgccttcaattccaatcccgtgggcgcaaaggccgcgctggaggtgctcagggcctttcctgcgcgccgcatcatcatcacccccggcatggtggagctgggcgagcgcgaagcggaatacaaccgcgaatttggccgggagatggcggcctgtgtggatatcgccatcatcgtgggcaaaaaccgcgccctgcccatcattgaggggctgaaggaggccgggttcccggaagggaatattcatcgcgtggacagcctggatgattccacccgcctgcttcacagcctggtccgtcccacggatacggttctgtatgaaaacgaccttcccgatcactatcaggaagcctga

SEQ ID NO: 826 - DNA, 1548 bp, unclassified Ruminococcaceae
atgcaaaaaaccatgacggcccttatcatcatggacggtttcggcatcaaccccgctcatgagggcaatgcgatctatcagcagggcacgcccaggctggacgcgctcatggcccgctatccgcacaccaaactgggtgcaagcggtatggacgtgggcctgcctgatggccagatgggcaacagcgaggttggccacctcaacatcggtgcgggccgtatcgtctatcaggagctgacccgtatcaccaaggacattcaggacgggacgttctttgaaaaggcgccgctgattcatgccatggacacggccaaggaaaccggaaagagcgttcatctgatgggcctggtcagcgatggcggcgtgcatagccacattacgcatctgtatgccctcttggagatgtgcaagcgccgcggcgtggagaaggtctatgtgcattgcttcctggatgggcgcgatgtgccgcccaccagcggcatcgactatgtgcgcgagcttcaggccaagatggacgagatcggcgtgggcaagatcgccacggtgatgggccgttactgggcgatggaccgcgacaacctgtgggatcgcgtgcagaaggcctatgatgccatggtgctgggccagggccaggcgacggcggaaactgccgtgcaggccgtggagcagagctatgccaaggaggagacggacgagttcgtcaagccgaccgttgtgctggaaaacggtcagcccgtggccacgatcggcgagggggacagcgtgatcttctttaacttccgccccgaccgtgcccgccagctcacccgcaccttcattcagcctgacttcaacggcttcccgcgcggaaagggctatttccatgtcaactttgtcagcatgacgcagtatgacgagacctttaccggtctggaggtagtcaatccgcccgaaacgctgaagaacaccctgggcgagtacctctccaagctgggcaagacgcagctgcgcattgcggaaacccagaagtacgcccatgttaccttcttctttaacggcggcgtggaaaagcccaacgagggcgaggaccgcgtgctgattccctcctccaaggtggctacctttgacatgaagcccgagatgtccgcctacgagatcacggacaaggcgattgagctcatcaatgaaaagaagtacgacgtgatgattctcaacttcgccaactgcgacatggtgggccataccggcgtgatggaggcggccatgaaggctgtcgccgccgtggacgagtgcgtggaccgcgtggtcaaggccgttctggacaacggcgggcgtgctttcgtcacggccgatcacggcaacgcggaccagatggtcgaccccgaaacgggagagcccttcaccgctcacaccaccaaccccgtgcccttcattgcgatcggaccggaaatggtgggcaagaagctgcgcgaaggcggtcgcctggccgatatcgcgcccacgatgctggacagcatggggattcccgtacctgccgagatgacgggtaaatcgctcatcgtgaaatga

SEQ ID NO: 827 - DNA, 2622 bp, unclassified Ruminococcaceae
atgaccaatcaacagtttacggagaaaagccgcgaggcgctggccgccgcgcagcagttaaccattgaataccagaatcaggaggttacccaggagcatctggcttacgcgcttctttcggacgcgcaggggctgatcccgcagcttttgaccaagatgggcaagcggccgcaggagatcgcttcccgcctggagacgatgattgctcgcctgcccaaggtgacgggcggcggacgggaacccgacaaaatctatatttccaatgatgtggaaaaggcattggtcgcggcgcgtgacctcgcgcagcgaatgaaggatgaatatctgagcgttgagcaccttttcctgggtctgttggagaagcctacgcgcgccatggctgacctgtggcgtgggtatgcgatcgacgaaaagagctttttgcccgccttgcagagcgtgcgcggcaatgcgcgcgtcagcagtgagaacccggaggaaacctatgacgcgctggccaagtatggccaggatctgactgcggaggcccgcaatcagaagctggaccccgtaattggccgtgacaacgaaattcgcagcgttatccgcattcttacccgtaagaccaagaataaccctgtgctgatcggtgagcccggcgtgggcaaaacggccattgccgagggactggcccagcgcattgtgcgcggcgacgtgcctgattccctgaaagaccgcacggtattctgcctggatatgggcagcctgatcgctggcgcgaagtaccgtggcgaatttgaagagcgtctcaaggcggtgctggccgagatcaaaaagagcgaaggtaagattctgctcttcatcgacgagcttcataccattgtgggcgctggcaagaccgaaggctccatggacgcgggcaacctgctcaagcccatgctggcccgcggtgagcttcacctcatcggtgcgaccacactggacgaataccgcaaatacatcgaaaaggatgccgctttggagcgtcgtttccagcccgtgctggtgaccgaacccaccgtggccgataccatctccatcctgcgtggtcttaaggagcgttatgaagtgttccacggcgtaaaaatcaccgacggtgcgctgatcgccgcggctacgctgtccaaccgttacattaccgaccgtttcctgcccgataaggccatcgacctggtggatgaggcctgcgccatgatccgcacggagattgactcgatgcctgccgagctggacgaggtcaggcgccggatcatgcagctggaaattgagcaggccgcactcaaaaaggaagaggacgaggccagccaccgccgtctgggaatcctggagaaagaacttgctcagcagcgtgaaactttcaatgccatgaaggcccgttgggagaacgaaaagaccgctattcagaaggtgcagaagctgcgcgagcagatcgagcaggtgaacgccgacatccagaaggccgagcacgcctatgatctgggcaaagcggccgagctgaaatatggcaagctgcccagcctcaagagcgagctggccaaggaggaggagatcgccgagcatgagcgtggagacgaaagcctgctgcgcgacaaagtgaccgaggacgagatcgcccgtattgtcagccgctggaccggcattcccgtgaccaagctcaaggaaggcgaacgcgagaagctgcttcagctccctcaggagctgcaccgccgcgtgatcggacaggacgaggccgtacagaaggtttctgaagccatcctgcgcagccgtgccggtatatcggatgaaacccgccccattggctccttcctgttcctgggcccgacaggcgtaggcaagacggagctggccaaggcgctggcccaaagcctgttcgacgatgagaagaacatggtgcgtatcgatatgagcgagtacatggagaaattctccgtcagccgtctggtcggcgcacctccgggatacgtgggttatgaggaaggcggccagctcactgaggccgtgcggcgcaaaccctattgcgtcgtgcttctggacgaggtggaaaaggcgcatcccgatgtgttcaatattctgcttcaggtgctggatgacggccgcatcaccgacagccagggccgcacggtggatttcaagaacaccatcatcatcatgacctccaacctcggcagccagtatctgctggatggtatcgaaaacgggcagattacccagagcgcgcgcgacagcgtgatgcagctgcttcgtacccagttccgtccggagttcctcaaccgtatcgacgacatcgtgttctataagcccctggaaaaggacgagatcgctcagatcgttcgtctgctggcgggtcatctggccagccgtctgcatgagaagaacatcgatctggtgctttccgacgcggcggtgaacgccatcgcggaggcggggttcgatccggtctatggtgcgcgtccgctcaagcgctatatgcagagccatctggaaaccatgctggcccgtaagatcgtcgccggcgacgtgctgcccgggcagaccgtccgggtggacgtggacgcaaacggcgagcttacagtctcggcggaaaacatggccatgcagccgtaa

SEQ ID NO: 828 - DNA, 1194 bp, unclassified Ruminococcaceae
atgaaggacagaagcattcgcacattcacccgtctggccgccctgacggtggccctgttgctgttggtatcctgcgccgcggcagaagcggtcgataccaaaaccgcggacccctacatcgagctgagcacgcagtatcccgccatgaccgtaaaggcgggcgacagcctgacctttgccctgagcctggacaactacagcggcgcttcgcaggaccttaccctatcggtggaggaaatcccggagggctgggagggctccttcagtgcgagcagcaaccaggtgagcgtggtccatgtgaaaaatgagcagaccgatgactccgtgaccttcgcggtggatgtgccgctggatgccgccgacggggattacaccatccggctgaaggcgcagggccagaacatcgcggacacgatggaccttgccctgaccgtgagcgccgaagaaatcggcgagagcagcttcacggcggaatatccttctcaggagggcgacgcggacacggccttcaccttcagcgccactttgatcaacaacacgctttccagccagacctactcctttacggccaacgcccccacgggctggcaggtgagcttcctgccgtcgggcgagaccaccaaggtagccgcactggacgttgaggcgcgcaccacgcaggcggtggacatctccgtgacgccgcccgaaaacatcgaggcgggcacctatgagattccctgcaccgccacctcggtcaatgaaaccatgaccatcgacctgtcggtcaccatcaccggttcttatgcgatgtccctttcgactcccagcggacggctgagtctggacgcctacgccaatcaggaaagcgccgtgcagctgagcctgaccaacaccggcaacagcgacctgaccaacgtcaacctcacctccagcgcgcccagcggctggaatgtgcgcttctccacggaaaccatcgacgtgatcgagccgggcgccacggtggaaaccaccgcttacatcacccccggcgaagaggccatgtccggcgattacgtgaccaccctcaccgccagcagcagcgatgccagcgacagcgccgagttccgcatcaccgtcaagaccgaaaccaagtggggtctgacgggcatcggcatcatcgtggtgctggcagtggtgattatcctggtcatgcggaaatacgggaggcgctga

SEQ ID NO: 829 - DNA, 921 bp, unclassified Ruminococcaceae
atggcgcagagccacgtatccatcgccgcggcagggaagcggcgcaggcgaagcgcgcgcaggctgatgcggcgcgtgcgtagggccaggcccgtaagctgcctgattttgacgctgatcgcggtcatcatgctcattcccatcgtattcacgtttttatactcctttttccccaagagtgagatatcgtcctatctggcccagcgcggcagctatgaccagagccggtggatggacatcctcttttcgcccgcgcaggtcagcctgaggcagtactacaccattttgattgaagagccgcagtatctgcaattgttctgcaacagcgtgctgtatgccggagccattctggtggggcaggcgttggtgattccacttacggcctatgccctcagccgcttccagttccgcgggcgcgacgcgctgttctttctggtgctggtgctgatggtgctgcccttccaggtaaccatggcgcccagcgtgatgacccttcgggccctggggctgctggatacgatttgggcggtgattttgcccatgatcttttcgcccttttatctgtttttggtgcgccagttcatgatcggcatccccggcgaaatcatcgaggccggccagatggacggcgcgggcacgctgcgctgctttgtgcatgtgatgctgccggtgtgccgccccatcctgtgtgcggcggcggcgctgagctttgccgacagctggaacatggttgagcagccgctcatttacctgaccaatcagagcatgcagccgctgtcggtcatgttcaaccagatcaacaccgattctaccggcgtagcgtttgcgggcgcggcgctgtaccttctgcccatgctgctgatctacatctacttccaggacgatatcctcctgggcgtgcagctaagcgagctgaaataa

SEQ ID NO: 830 - DNA, 2844 bp, unclassified Ruminococcaceae
atggcaaagagcaaaaaagccgtcgcacaatatgaatcgggtacgctggcggcgttcgcggtggcgggcatcctgctcatcgcgctgggcgtggtatcgctcctggcggtggtgggcgggctgaagggcacgcttttctccatggtgaagcgcgtcatgcagggcctgggcggcggactttgcctgggcgtgagcgtgatgctgatctgggcgggggtgctggtggcattttcctccggccgcagtatgcccaagcggggatttttgctctttacgctgctgtttttttctgttctgggcatcatcgatctggtcagccgcgtaggacaggacacgcttcccgcctacctggtcaagtataacaatcaggccgctctccccacaacggaagcgtcgggatactggaacatgatttgtgctgccttcaacgtgtgcggctccagcggagcatttggcggcgcgctgggcatggtgctgggctggccggcctggacctttctgggcacggtgctcggcacggtggcgctgggcgcggtctgtgcggcctgtgtgctgctggtttcccgttttgacatgatacagatggtggaaagcgtgcgcgacggctggcaggcacgaaggcagaatattcagcagcagcgcgcccagcgcgaataccaggagcagctggaggaccagcgccttaaggagcaggaggacgatcgccgcatgctttcgcccgctttccgccgccggggggagacgggagcccctgcacaggaagcgccggtctatccgccctatggcagcatgcttatgcagccgccgcccatgccccagggagggatgccggtctatccctatggcatgccgccggtatatcctcagccgcccgcgcagccggaaatttatgatgaattgatcattccggagggacggcagcttccctggcgcaaggccgagggaaagggcaaaaaagagaagaaagaaaagcagtatcagacccgcatgacctttactcccagtgaaatgggagcagataccacggaaaccccactgcctgatacgctgattatgtccgcgtccaagcgcaaggccatggaccgcatcgaggaaatccgccgccgcaaggcggagatcgccggcagcgtgggggaggacgggaatacggcgccgtatgccgaagtgccgccgcagatggcgcccacccctatcgtaccggtcgcgcctgcgcaggcccagcccaatccgcccgctgcgcaggagcctgcggcagctccgcaggcgtcacaaaccgtgccgcagccatcccaggcagagcccacagaggaccgcaatgcggcctataagcgccctgccggccagcccaggcctgagccgcctgccaatgagccccgtcctgtgcagcatacgccctatgcctatccgtccatcgacctgctgaacgcgcagcagcggcacgccactacggatacccgtgcccaggacacggcagatgccacccggctggaaaagacgctggagagcttcggcattccagcgcgcgtgcagcgcgtgacccatggtcccgccgtcacccgcttcgagctggggctggtatcaagcggcgtcaacgtcaagcgtatcatgagcattgccgacaatatcgctctggacatggcggccaacggcggggtgcgcatcgagattcccattcccggcaccaacctctttggcgtggaaattcccaacaaggaaattcagagcgtgtcgctggctgaggtgctcttaagccccgaaatgcaatccgccaagtcacccctggccgtggcgctgggccgcgacatcgcgggacgcgccgtcatctgcgatctggccaagatgccgcatctgctcatcgccggtcaaacgggcagcggcaaatccgtctgcatcaatgccatcatcaattccatcctgttccgctcctcgccggaagaggtgcgcatgatcatgatcgaccccaaggtggtcgagctgcaatgctacaatgtcgtgccacacctgcttatccccgtggtgagcgacccgcacaaggccgccggcgcgctgcaatgggcggtggccgaaatgctggaccgctatcacaagatgcagtccaagaacgtgcgcgagctctccgcctataacgccaagctcggccccggcgaggaaaagcttccccgcatcgtcatcattattgacgagctggccgacctcatgctcgcctgcaagaaagaagtggaagagagcatcatccgcattgcgcagctcgcgcgcgcggcaggcatccacatggttgtggccacgcagcgtcccaccgtggacgtcatcaccggcctcatcaaggccaacgtgccctcgcgcatcgcctttgcggtatcctccagcatcgacagccgtaccatcctggaccagaacggcgcggaaaagctgctgggccggggcgacatgttctacttccccacgggggccagcgcgcccatccgcgtgcagggctgcttcctgagcgacgcggagacggagcgcgtggtgggttatatcgcccagcattcgcatgtggactttgaccccaatgtaattgaggccatggagagcgacgacggcgcgggcggccccctgacggacaatgacgaagaaagcggcgcggatgaccgcctgctggaagccatcgacatggtgattaatgatggacaggccagcatcagcatgctccagcgccgcatgaagatcggctacgcccgtgcgggccgtctgatcgacgacatggctgcgcgcggcatcgtgagcaagtccgtaggcagcaagccccgcgaggtgctcatcagccgcgaggaattcgagaagatcaaggatacgctggtgtag

SEQ ID NO: 831 - DNA, 1062 bp, unclassified Ruminococcaceae
ttgatcgcattgtatattttgctagctatcgtgctgctgggcgtgctgattacggtccatgagtttggccatttcgcggctgcccgcctgtgcgggattcccgtaaaggagtattccatcggctttggtcccaagctcgttcagtggaaaagcaaaaagcacgaaaccgtgttttccatccggcctatccccctgggcggctactgcatgttctatggcgataccgacgacgaccccaacggcgaaaagaaagacgatccccgcaactataacaatgcccccgtatggaagcgcatgatctccgtggcggcgggcccgctgatgaacttcgtgctggcctttgtggtggctgtcggcctaatggcggcttacggcgtgacgattgccacgccattcgtatccagcgtgaccgaaggttcacctgctgccgaaagcggcctgatggcaggcgatgtatttgtcagcgtgggcgggcaggatatgaccggacgcaccgtgaccgatgtgagcgacgccatcggcagcctgggcgcagggtcggccatcgacatcaccgttttgcgggatggtgagcaaaagaccctcaccatcactccgcgttatgacgaaaccgaggaacgctggctgatcggcatcatgattcagcagggatatgaaccccttcccgcagggcaggtgattcccgccgcatgggacacctgcgtggacgcctccaccgccatggcctcggcgctgggcaagctcttcaccaccggcgaggggctcaatgaaaccagcggtccggtgggcgtggtgcagctggtagccgagcagacccggcagggcggcatggaaatcttcctgtacctgacgctgatgatctccatcaacgtggggctggtgaacctgattcccattccgggactggacggatcgcgcctggtgttcatgctgattgaggctgtgcgccgcaagcccgttgaccagaagatcgaggcgatgattcatctgggcggctatgtgttcttgctcgggtttatggcgtttttcacctttaaggacgtggtgcgcatcttccagtga

SEQ ID NO: 832 - DNA, 1455 bp, unclassified Ruminococcaceae
atgagcaaggcatatgaaatggtcatcggcctggaaacgcatgtggagctgcgcacgaggagcaaggtattctgcgcctgcccgaacgtattcggcacggagcccaacacgcatgtatgccccgtgtgcatgggcctgccgggggcgctgccggtgttcaacgcgcaggtgctgcgctatgcggccatggccggcatggcgctgggctgccatgtgcaccaccgcagccgcttcgaccgcaagaattacttctatcctgacctgcccaaggcgtatcagatcagccagttttaccgcccgctgtgcgaggggggagcgctgaccatccagaccagccagggagaaaaacgcgtgggcatcacccgcatccatatcgaggaggacgcaggcaagcttctgcatgacgaggcaaacggcacggcgctggacatgaaccgctgcggcgtcccgctgatcgagatcgtatccgagccggatatccgctccgctgaggaagcggtggcctacctgcgcaagctgcgggccattctcacctatacgggcgtaagcgactgccgcatgaatgagggcagcatgcgctgcgatgtgaacctgagcgtgcgcaggcccggcgaacccttcggcgtgcgcaccgagatgaagaacctcaactccttccagagcgtggagcgtgccattgaagccgagtaccggcggcaggtggaggcgctggaaacgggggagggcgtggtgcaggaaacccgccgctacgatcagaagaccggcaagaccacctccatgcgccgcaaggaaaacagcgctgattaccgctattttcccgaccccgacctgccggaaatctacctcagcgatgctgaaatggccgaaattcgcgcagccatccccgcgctgccggatgagcgccgcatgcgctatatgcagcagtacggcctgaccgcctatgcggccgagcagctgaccgccgagcgctggctggccgagtacttcgagcgggccgccggcctggcggaaagccccgtggcactgtgcaacctcattctgggcgaggtctttgcgcagatcacgctgcgggataccgcgcataccggggagcgcggcccggaggcgctgcccatcgccccggagcacctggcggcgctcagcgacatgatcggcacgggcaaggtcaacagctccaccggcaaaaaaatcctggctgcgcttttcgaccgcgatcaggaccccgtcgcctatgcgcaggcccacgacctgttcaccctgaccgatcccgcggtgctggaagcagccgcgcgggagacgctggagaagaacccggacatggtgaaaacctatctgtccggcaaaaccaccgtggaaaaggccctcatgggcaaggccatggccctcacgcgcggcaaggccgacccggaggccttgcgccgaaagctgctggaactgctgggaaagcagggataa

SEQ ID NO: 833 - DNA, 1347 bp, unclassified Ruminococcaceae
atgagcaccgtacacaattttcccggcggaatccatccgcacgagggaagaggcggaaaggcggctaccgccgggctgtccatcgtggaagcgccgcagccgtcgcgcgtggccatccccttgcagcagcatatcggagcaccctgcaagccgttggtaaccaaaggggatgccgtcaaaaccggccagatgatcggcgagccggtaggcgcgatgagcgcagcagtacatgcctccatctcgggtcatgtcgtcgattgccagccctgtattctggcaaacggcacccagcagatgtgcgtcatcatcgataatgattttaaggacgagtgggtgccgctgactcccgtggccaaccctgaatccatgaccgtacaggagctttccgatctggcgcggcgcatgggtatcgttggtctgggcggcgctacgttccccacggcggtgaagctcaatatacccgctggcaaaaaggtggataccctggtgctcaacggcgcggagtgcgagccgtatctgtcggccgatcaccggctgatgctggagcatgcggatcagatcatctccggcgcgcgcatcatccagaaggtgctgggcattgaacgggtgatgatcggcatcgaggacaataagcccgacgccgtggaagccatgcgcaaggcctgcgaaaaatatgccgagttcagcgttacggcgttgaaaaccaagtacccccagggcggtgaaaagcagctcgtatatgcgctgacgggccgtacggtcaaaatgggcggcctgccgctggatgtcggcgctgtggtgtgcaatgtaggcacctgtcacgcgctgtgccgcgccgcttacgagggccggccgatcgtggaccgggtggttacggtgggaggctgcgtacaaaatcccgccaactatctggtgcgcatcggcacgccggtggaatggctgctggatacctccaagggcctgttgccggaaaccaagatgctgatctacggcggccccatgatgggcatggccatcagccgtgaggatatccctgttacgaagggctgcagcggtattgtggcgctggacaagctgggcgcgctggctgacgagagtccctgcattcgctgcgcgcgctgcatgaacgcctgcccgatgcatctggctccggcggctatcgaccgcgctgtgcgcaaggacctgtttgaagccgcagaaaaactcaatgccctcaactgcatcgagtgcggcgcctgcaccttctcctgcccggccaagcgcaacctgacccagagttgtcgcgtggcaaagcgcgtcatcacacaacggcgtaaggaagccgctgcgaagaaaggagcccattga

SEQ ID NO: 834 - DNA, 1137 bp, unclassified Ruminococcaceae
atgcaaagagtcaaacccaaaatgagccggcggaaggcgtttctggtcctgtttctgatcctggcaggggtgggcctgctggtgtggggcggcatttcgctgttttccgtgcgggtggtcaccaatgtgacggcctcgctgctgccctgcccctacagcgataccatcatgcctttcggacagaacgtgctgtattacgacggcgtgagcattcactgcatgagcgatacggggtcggtccgctggtcgttccagatcggcgcggacgcgggatatgactgcaacgattccgtcgtggtggcctgggcgggcagcacgatctatatcctggaccagaacggcaactcgtcctacaatgacaacctgggcgaggaaatccagttcgcacgggtgggcacgcagtacgtggcggctgtgatcggcgaaaccaccagcccccgcctggtggtcaaggaccataccggcgcgcacatggacgaggaggccgacgccttcgacacgctgattcttttggacgtgggcttctacggcaagaacggcgaatacatgtggacgctggcgctggacgtgttcggcacggcggccaatacgattctcaacacctttgaggtgggcaagatgaacacgggcgaggtgtctttgggagagcctatcgcctatgccgtggtgtatgaaaacagcctgctgcgcgtgatcaacacccgcaagatgctcaccttcaacgaccgcggcacggaggatacctcggccagcgtgctggtgtacggctggcggcttctggacgcagaggtgcccgagcgcggcaacgcgctgatgctctttgcacccacctcccagacggacagcattttcgacatccgcgagctgcgcctgatctccggcagcacggacaagcgctacagcctgcccgatacctgtatcggcgcggcggtgtggaacagaacggtctatgccctcagcgccaccacgctctaccgcgccggtatcaacgacagccgctttaccacctatgaactgcccatggaaagccaggctacgcgcctggtgggcacgctcaccaacggccgcgccatcgtggcctgcggggacgaggtctacgtcatcacgcttccccaggcggtgaacacattcagatga

SEQ ID NO: 835 - DNA, 2265 bp, unclassified Ruminococcaceae
cagtcggccgtggggctgatgaacggcgggcaattcgacgaggcgcgggcggctttcagcgcgatgggcgattacggtgacgcgaaggagcagctggccgcgtgcgattatcaggaggccctttccctgctggagacgggcggtgtggatgcgcttgtgcaggcggaggcggactttgccgccctgggcgattatcaggacagcgcggaaaggctcaagcaggccacctatgcgctgggacaggcctatctggaagagggcagctatgaactggccgccgaccgtttcctctccctgggcgattatcaggacagcgcggagaaggtcaagcaggccacttaccagcaggcacaggcgctttacgacagcggcaactatgccgtagcacgcgtgctgttccagggcctggcggactacagcgatgccgccgaccgcgcccaggcctgcacgtatcaggagggcaaagccctctacgatgcgggcgactatgcgggggccgcagcggcgcttgctccgctgggtgaatacgaggacgcggtgcagctggtgaatcagtccaactacgccctggcggaggagaagctggcccagggactgggcgaggaagcgggccgcctgtttctggcggccggggattattccgacgcagccgcccgcggaaacgactgcatctatcaggcggcgctggccgccaaggaagccggcgactacgacaaggccaccgagctgtttaccctgattatcggttatctggacagcgaagggcagattcaggactgcctctatcagcaggcggcggcgctgagggacggcggagactacgccggcgccatcgccctgttggagatgggcggcacgccccgcagcgaggacgcgcagcagctctattacgaatgcaactatgagctggccatggacgccatcgaggcggaggatctggagcgcgctcagaccctgctggaaaacgtggacaactacaaggacagcgaaaaacagctcaacgccgttcgctacgaactggccgaagccgccctcgcggcggaaaactatgcggacgcgcgcatcctttataacgcgctgggctcctataaggacagcgaaaccaagcttaagcagtgcagctacgccattgccagcgcggcgctcgcggcgggggactatgccacggcaatctccggcttcgaggccctgggaaattaccaggacagcccagccatgtttgaggaggcggcctatcagcaggcccttgcgttaaaggcggcgggagatacccagggcgcggcggaggtgctggcagaactgcccgacagcgaccgcgccaaggccgagctgatctccatccagctggatcatggcgccgaactggaggcggcgggtgattacgcggcggcggcagaggtgtacgcggccattgaggacagcgaggaggcacaggagcgctacaacgcctgcctgtacacccaggccgagcagctgcgcgacgcgggcgatctgaccgccgcgggtgcggccttcgaggccctgggcgattaccgcgacgccgctgaacagagcgagtcctgctacgaaacctactttggcaacgttgcgcagaccgctcgtgatgccatggagcagcaggactatcccgcggtgatcgccgccctggaggggttctccatggatgacctcacaggcagttacgccgatctgccggaaatctacaatgaggcctgctatcagtacgcggagcagctgtaccgtgagggcaagccctatgaagccctgccctattaccagcgcgtgggcgactaccgcgatacggctgaaagcaagctggaacggcgagcctatctgattctgggcgaatggacctccaccaccggcaagaccgccaccttccgtacggatggcacctgcgacctgatgggtgagacgctccatttctatgtgagcaacttcagcctctacaccggcgagaccgaggacgatatgacgatcacgcacaagctcagcagcattgacaaaacctccatgagcctgcgcgacatccgcgatggacaggatgtggtgtataaattctcccgcgtgggggaatggactttgccagaggaaaccgctgcgcctgaaacgacgcctgccccgcctgcagaggcgggcgcggaggttacgcccgcgccggaagatgaggacggctcggaaaccgcttccgtcccggaaggggaatcaggcgaggaggtaacgactccgcccgctacggaggccgtgaatgacgcggacgaataa

SEQ ID NO: 836 - DNA, 1083 bp, unclassified Ruminococcaceae
atggccgagatcagcctgtgtatgattgtccgggacgaacgcgaaacgcttgcccgctgcttggacagcgtaaaggaggcggtggatgaaatcatcattgtggataccggctcaaaggatgagacgcgggagattgcccggcgctatacgccgcatgtgtacgacttttcctggaaggatgatttttccgccgcacgtaacgaatcgtttgcgcatgcaacccgtgattttctcatgtggctggatgctgacgacgtggtggagaacgcggaggctctggtgcgtttcaagcgggacgtgctggatggccttgacgtggcgatggctccctatcatgtggcctttgacgcgcaggggaatcctacctttacttattatcgggagcgaattttgcgcgcgggaatgggctttcgctgggagggagccgtgcatgaggccattgctccgcgggggcgaatcggctatgcggattttgtggtgcggcacaaaaagctgcgcccgggcaagccggggcgcaacctgcgcatctatgaaaagctgcggaaggagggacacccgttcaatccgcgtgagcgcttttattatggccgtgagctggcgtcggccggccgcatggaggaggcggcgcgccagctggacagcgtgattgaggacgaagcggcctggattgaaaaccgaattgaggcctgcgcaggactggcggactgcctggatcgtctgggggacacatcgggcgcgatgcgcgcattatgccgtagcctggccctggaccggccccgcgccatgattgcctgcgcaatggggagaaggtttcttgaagccggcaacctgcatgccgcccggttctggtatgaggcggcgctgtcggcgaaggagaacgaaaagtcgggtgcgtttatccagcgggaccacagcggacggattccgttgctgcagctatgcgtgattcatgaccggctgggggaacgggaggtggcatgcgcctacaacgagcaggccgcgctgctgtgtccggacgacgaagcggtgcgacagaaccggcgttattttgagcgcctgggcattcgcaaaaaaggagagtag

SEQ ID NO: 837 - DNA, 1119 bp, unclassified Ruminococcaceae
atggaaaaatccaaggtttattttaccaattttcgcgccaaacccgaccggaacgttcttcagaagctgcaccatctcatcgaggcggccggtatgaccagcatgccgctggacggcaagttcaccgccatcaaaatgcactttggcgagccgggcaacctggctttcctgcgtcccaactatgccaaggttgtggtggatacgctcaaggatatgggcgctcgccccttcctgacggactgcaacactctgtacaccggcatgcgccgcaatgcgctggatcatttgaccgccgcctttgaaaacggctttggccctcttcaaaccggctgccatgtcatcatcgccgatggccttctgggcaatgaccatgtttccgtacccatcgacggggaatactgcaaggaggcgctcattggccgcgcggccatggacgcggatgccatcatcagcctgacccacttcaaatgtcacgaaggcacgggcataggcggcgcactgaagaatttgggcatgggccttggctccacggcaggcaagcgcgccatgcactgtgacggcaagcccgtggtggaccacgacaaatgcatcggatgcggcatgtgcgcccgtcaatgtgctcatggagccatcagtttcagcggagaaaaaggccaccggcgtgccaccatcgaccacgacaagtgcgtgggctgcggccgctgcgtaggcgcatgccgcgaccggggcgccatccaggggccggacagctccaacgacgtgctcaactgcaagattgccgaatatgcctgggccgtcatcaaagaccgccccaatttccacatctcgctggtaatggacgtatcgccctattgcgactgccacccggaaaacgatacgcccatcattgcagacgtggggatgtttgccagcttcgaccccgtggcgctggacgtggcctgcgcggatgcttgcaaccgcatggagccgctgcccggcaccttcctgaccgaccgtaagaaccgcaccggcgacatcttcaacgatacgcacccctataccaactggcgttccggcgtggaacatgccgccaagctaggcgtaggctcgctggagtacgagctgatcgaggtgcgttga

SEQ ID NO: 838 - DNA, 1338 bp, unclassified Ruminococcaceae
ccttccctgtcaacaccttttttcgaattttttgacttcttttttagaatcttgtatttcccgaaccttttgatttataatcatttccacgtccaggtattaccccggatgttctcccctccgaaaatgccgaacgttcgtggtcgtctattgccgaagcgttttgcatcaaaaccaaattgcttttttgcccaaatcaggctatactacctgttgaaaaacgcatatactgaggaagtggacgagatgaagctgggcattgtgggactcccaaacgtaggcaagagcacgctgttcaacgccattacacgcgcgggtgcgcaggcggccaactatcctttctgcaccatcgagcccaacaccggcgtggtacccgtgccggacaagcggcttgacgagctggcgaggatgtatcagcccaagaaggtcacgccggcgacggtggaatttgtggacattgcaggcctggtgaagggtgccagccgcggcgaggggctgggcaacaaattcctttctcatattcgcgaagtggatgccatcgttcacgtggtgcgctgctttgaggacgaaaacatcatccacgtcgatggcagcattgatcccaggcgcgatattgaggtcatcgatctggagctgattctggcggacctggagaccgtggaacggcgcacggagaaggcgcgccatctgctgaagaacggggacaagctgagggcattggaagcagatgtaggcgagcggctgaaggctcatctggaagccggcaagcccgcgcgcacctttgccatgaccgatgaggagcgcgagatcgtatccggctggttcctgctcaccgacaaaccggtcatctacgccgccaacatcgcggacagcgaaatcggtcagccagattcggcccacgtcaaggctgttcgggagattgcacaggctgagggatcgcaggtctttaccatcagcgcgcaaatagaggaagaaatcgctcagatggagccggaggaaaaagacgccttcctgaccgagctgggcctggggcagagcggtttggaccgactcattgccgcgtgctacacgcttttgggcctgatctccttcctcacggccggtgcggacgagtgccgggcatggaccatcaagcggggtaccaaggcgccacaggctgcgggcaagattcacacggactttgaacgcggcttcatccgggccgaggtggtggccttcgatgatctgaaggcccagggcggcatggccgcctgccgtgagaagggtctggtgcgcagtgaaggcaaggactacgtcatgcgcgacggcgacgtggtgctgttccgcttcaacgtataa

SEQ ID NO: 839 - DNA, 1179 bp, unclassified Ruminococcaceae
ttgaaaggatttttgccgatgagcctgtatcgacgcgtgatcgctctttgcacatgcctgctcctgctggcagcagctttttccgcgctggcggaggaaacggaccccgtcatgactgctgaggaggccgaagccgccggtatcgaggtggagggtattgcgacggaggatgaggatgaaacggccgttgccgacgcggaggatcagccggcgagcatcgagggtctgacgccgctgtacaccaccaagatcaagccctttgtagcctcgggcaaggccattcgcatgcgcgccctgcaggacggcgaaagcgacgtggtctgcgtgattgacgcaggcgaaacgatcacggtctatgcggtgtatccctcctacgtgctggcggagtataacggctatgtaggctatatcattcgcacctgggtggatgagaatatgacgacgctggacccggagaatacccctccgtacggcgtggtgacgtccaaatatgtggctacgctcaccgaaacggccaacatctacgccgaaccgtcgctcagcgctgagatcaacgatatccatcccggcgcaggcagcaaaatcgccattctggacttcgtggacggttttgccaaggtgctggtgtggcgcagctatgggtacatcgacgcgcgcgtgctgaccgacctggtgatggtggcccagggcgacgagcccatgagcgatgagacccccatcgcggcgttttgcagcttctttgagtacaatacgggcgctgaggggaacgatggccgctgcaaaaacatcgtgcgcagctgcgaatccatgacccgcctgatgcagcccggcgaaagcctggattttaacgcgcaggtcggcccctataaaaagaacaatgggtacttcccggcccccgtgctcatcgacggcggaacccagatcggctacggcggcggtacctgccagagcagcagcacgctgtacaatgccattcggcaggtgccgggcatcacggtgctgatgcgccggccgcatggaccgggctgtgcgaggtatctgcccatgcatcaggatgcggcggtgggaaatgactcgctgaatctggtgttccgaaacgattgcgaatatcccatctacgtgctggcggaaagtaccggtgagggtaccctgtgcatccagatcttccgggcggactga

SEQ ID NO: 840 - DNA, 1611 bp, unclassified Ruminococcaceae
ttgagcgccgagtatgtattggaaatgaaaaacatcaccaagcgctatggcgagaacactgtcctgagcgacgtttcgctgtctgtgcgtccgggcgaaatccatgcgctgctgggcgaaaacggcgcgggaaagagcacgctgatgaacgtgctgtttggcatgcccgtgattcataccacgggcggcttcgagggccaggtgcttttggagggcgagccggcgaacgtgacctcgccgcatgacgccatggtgaagggcatcggcatggtacaccaggaattcatgcttttgccgggctttaccgtcacggagaatatcaagctcaaccgtgaaatcacgcatcccaatcttattagccgcatctttggaaaaaatctggaaaccttggacatgaaggccatggctgccgacgcccgcaaggcgctggacagcgtgggaatgagcatcgacgagtacacgctggtcgagggcatgcctgtgggctatatgcagtttgttgaaattgcccgcgaaattgataagaccggcgtaaagctgcttgtgtttgacgagcccacggcggtgctgaccgagagcgaggccacgcagctggtctccgtgatgaaaaagattgctgcgaacggcatcgccatcatctttatcacccaccgtctggacgaggtgatggccgccgctgattcgatcacgatactgcgcgatggcaagctggccgccacgcgcgaaaaagagcagaccagcgttgtggaacttgcggagctgatgatcggccgcaagggagagagcatggtgcaggccgcgccccgcacgcccccgcaggacagggtggccatgagcatccgcgacctgcatgtggatatgccgggcgaggaggtgcgcggcgtatctctggaggtgtatgagggcgagatcctgggaatcggcggactggccggccagggcaagctgggcattcccaacggcgtgatgagcctgtacgacacgcggggcagcgtgaccctgtttggggaagaactcaagctgggcaacgccggagacgccctgcgcgccggcatcgccatggtgtccgaggaccgcaagggcgtgggcctgcttctggaccagtccattgaggacaacatcgtctttaacgccatgcagatcaagggtgagtatctgcacaggctgggcctgttcaccctcaagaacagcagcgccgtgcgcaaaaccgccgagcgcatgattcacgacctggatatccgctgcttcgggcccatgcagcacacgggcacgctgtccggcggcaaccagcagaaggtgtgcatcgcacgcgcgctggtgatgggtccccggttcctgttcgtcagcgaaccgacccgcggcatcgacatcggcgccaagaagctggtgctggagacgctcgtgcgcctcaaccgggagcagggcatgaccatcgtgatcgtctccagcgagcttcaggagctcaagagcatctcagaccgcatcgccattatcagcgagggcaggctggtggacattctttctcccgacgccagcgatgcggacttcggcctggccatgtccggcatcaagcccgacgaccaacttgagaaaggagatggcgcgcaatga

SEQ ID NO: 841 - DNA, 1470 bp, unclassified Ruminococcaceae
atgggtgcgcttatatgcctgctgctttcgatgctgattgcgctgtgccctgcggcgctcccgctccatgctgtcgccgaagaggaaaacgtcatctactatatcgaaccggagctccccagcgatgtggagccctacgatccggagcatccggaggacctttacgaggaccagctctacgccaagtcggccatcctcatcgaagcatcctccggcgaggtgatttttgaaaagaatgcggatgccaccatgtatcccgcttctaccaccaagatcatgaccgtgcttttgggcatcatgatgggcgatatgaaccagaccgtctacctgtcgcagaccgctgccgacatcggcgacgacagctcggacatgggcctggacgtgggggagagcatcaatttcaaggacctgctctacggcaccatggtgcgctccgccaacgagggcgccaacctcatcgccgaaacgctctacggcagcgtgccggcctttgccgaagtcatgaacgaggccgccgccatgtacggctgcaccggcacgcattttgccaacgccaatggcctgcacgaccccaaccactataccaccgcgcgcgatatggccaagatcgcccaggccgccatgcagaacgagaccttccgcgacatcgccaaaacctatacctatcacctgccggccagcaatctgcacagcgcgcgcgtgctcacctccagttcccgtgcatttttcaaccccagcctggaggaaaacgacgcctactacccctatgccatcggcatcaagaccggctttaccaacgcggcaggccactgctttgtaggcgcggccgagcgggacggggtggagctgatctccgtggtgttctacaccacggcggacggccgctggaccgatacggtcaagctgatggaatacggcttttcccagttcgtgagcatgacgcccgcggaactgtatgccgaaaaccccatcatggtggaaacctccggcttctccctggacgatgagggctatggccggctggagctcaatgtgcaggcccgcagcgggtcgcgcgaggtgagcatcgtggccaccaaagccgagatggaaagcatggccagaaacctccggcagaccgtgctgatcgagtacacgcgcgattttgccgcccccattcaggcgggtgaagtcatgggcaccatgacctattaccccaccgacggcggcagccccgtcacctatgacctggtggcctcgcgtaccatcgcgcgccgtgaaaacgcgcctctttcgctggaggagatcgtggagcaggtctacgccgatcccaaccccttcccgccgttgtcggcggagctggtggtcatgatctttttgccggtaggcggcgtgtttgtggccattcggattttgatgcgcgtgttccgccgcacgggccggcaccgcaaggggcgcgtgcccaggccgcgcaaccgcttctatcgctga

SEQ ID NO: 842 - DNA, 1116 bp, unclassified Ruminococcaceae
ttgtatcgcgccgcccaggcggcgttttggagaggagcagcggacgtgtacatcgagaagcgttatatcaagaaaattgcgagggtttttgaggcattatccatctccctgcggctggtggatgcctccggcgcctgcctggtgccagaagacggggagtccgccgcccttcccgcgggcgtgctcgcgcaggggttgaatcatcacgccggccggttcttttaccgtgttctggatgtgcatccgcccctgtacctggtggctcccgagggtgcgcccggcgtggaagatgtgctctgcgtagccgacgccatgatcatgagtctcctcaaaagcagtctttccatcgccagccataccgacgtgtaccgccgcgcactcaaacaggagctttccggggccgacctgatttcccgtgcgagcgagcaccagattcccctggagatggatcgctgcgtggtgctgttccagattgagcagacggagcgctccagcgccttctctctgctgggtgagctggtgccgctgagcgataccgacgtgctggtggagatgaaccgccacctggtggcgctcatcaaggacatgaacggcatcgacgggatggacgatctgtaccagtttgctcaggccgtgcaggaaaccctgatggaggaggccgtgcagaccgccatcgtgggcattggtgaggaaaagcatacgctggcccagcttggggaaagctatgccgaggccaagcgggccatggaggtggggagcatcttccaccccggcgaatccatccacatgttccggcggctgatgctggaacgtttcctgatgaacgtgccgcgcgaggaaagcatgctctatcacagcctgctgtttaaccgcaaaaccgcgaagctgttcaatgaggagatgcttcaaaccatcgagatgttcttccgcaaggacctgaacctctccgatacagcccggcagctctttatccaccgcaatacgctggtctaccgactggataaggttcagcggcaaaccgggctggacctgcgccattttgacgacgcggttaccttcaaaatcctctatgagctgaaaaaatgcgggcaggaaaagcccaggcagatttattga

SEQ ID NO: 843 - DNA, 3807 bp, unclassified Ruminococcaceae
ccggccccgcgcacggcacatgccgctccccgcgcaaccgcgcccaaaaagcctgccgcacccaagggcggccctgtgctcaagggtcgcgccgtgggcgatgtgcccgtcccgatcggtgagctggccgaggacagcggtatcgtggtcatcgagggcaccgtgaccggcgtgaacgatcccaaggaactcaagggtggcgaaacggtgctggcctccttcgccgtctatgacgatacctccaccatctactgcaaggccttttacaactaccgcatgcgccgtgccgcgcgcggcgaaacgcccgatccccccaccaaggaggagagggcgcgggtgatggagcagattggtcagatcaaaaacggcatgcgcgtgcgcctcaggggagactgccgcatggacccgtttttgaacgaattgtccgtaagcgtgcgcgacatgcagcagatgcccaaaatcgagcgcatggataccgccgccgaaaagcgcatcgaactgcacatgcacaccaccatgtccaccatggatgccaccgcggacgccggcgtgctcattgcacaggcggccaaatggggccaccccgccgtggccatcaccgaccacggcagcgcgcaggccttccccgcggccttcggcgcggccaagaagcagggcatcaagctcattcccggcgtggaggggtatctgtgcgacctggtccccatcgtaaccgacgcggacgaccgccccatcgacggccccatcgtggtgctggactttgaaaccacggggctttcgcacgccatggaccgcatcatcgaagtgggcgccgtcaagctggaaaacgggcagatcgtgggcgagctgagcctcctgtgcgaccccggcgtgcccctcaagcccaagatcagcgaaatcaccggcattacggacctgatgctccgcggcaaggaaagccccgccgagggcgtgagaaagctcctggacttcatcggggactgccccgtggccgcgcacaatgcgccctttgacatgggcatgcttcaggccgagtgcaagcgcatgggcgtgagcttccacgcgccggtgctggatacgctcaccttctcgcgcaagctctatccacagcaaaagagccacaagctcggcgcggtatgccggctgctcggcgtgtcgctcaaaaacgcgcaccgggccgtgcacgacgcggcggccacggccaagtgccttgcgcgcatgtttgacgcggccaaggaaaagggcgctgcgaccctcaaggacatcgacgccgtcatcagcggcgataccatcgggcaaagctaccatatcattttgctctgcaccagccagaaaggcatgcagaacctcaatcacctcatttccgacagcaaccttcgctacttctaccgccatccctgcatgccccggcacctcatcaatcagtaccgcgaggggctcattctgggcagcgcgtgcgaggcgggcgagctgtttcaggccatcgtcaacgaccggccgcaggaggagatcgaacgcatcgccagctggtacgactatctggagattcagcccatcggcaacaacggcttcatgatccgcaacggcaccgcccgcgacgaggagcacctgcgggaattcaaccgcaggatcgtcgcgctgggtgaaaagctgaacaagcccgtggtcgccaccggggacgtgcatttcctcaaccccgaggacgccatctaccgcaccattttgcaggcgggcctcggctatgacgactgcgacaaccaaccgccgctctacttcaaaaccaccgacgaaatgctggaagaattcagctacctgggcaaggaaaaggcgcatgaggtcgtgatcgacgcgccgcgcaggattgccgatcaggtgggggaacttcgcctgttccccaagcatccggagggcaaggacaccttccagccctactgggaggaggccgcgggggacatcgaaagccgcgcctggggccgcgccaaggagctttatggggaccccctgcccgagattatccagaagcggctggaaaaggagctgggctccatcatcggctatggcttctccaccctgtattccatcgcgcagaagctggtcagcaagtcgctttcggatggctacctggtaggcagccgcggcagcgtggggtccagcttcgtggccaccatgtgcggcatcaccgaggtcaatcctctgccgccgcactaccgctgcgatcactgccacaagatgttcctgaccccgccggagctggccagcgtgggcgtggacctgccggacaagaattgcgaaatctgcggccacaagctggccaaggacggctttgacatccccttcgaggtattcctgggcttcaagggcgacaaggtgcccgacatcgacctcaacttctccggcgaataccagccgcgcgcccatgcctacattgaggagctcttcggcaagggctacgtctaccgcgccggcaccatctccggcctcgcggaaaagacagcctacggctttgccgccaagtacctggaggagcgcggcatccatgcgggccgcgcccacaaggaacggctggcggcgggctgcgtgggcgtcaagcgcactacgggccagcaccccggcggcatcgtggtgctgcccaaggaatatgacatctgccagtttacggccatccagcatcccgccgacgacgtggaaggcaccaccatcaccacgcactacgacttcaactccatgcacgacattctggtcaagctcgactgtctgggccacgacgatccgaccatgatgcaccggctggaggagctcaccggcgtcaacttccgtgaaatcccgctggacgaccgcaaggtgatgagcctgttttccagccccgaggccctgggcgtcacccaggagcagatcatgtgggaaaccggcacgctgggcatcccggagttcggcacgagcttcgtgcgcggcatgctcatggagacgcggcccaccaccatggaggagctcatccgcatctccggcctctcgcacggaacggacgtgtggctgggcaacgcgcaggacatcatcaattccggtacggccaagctggctcagtgcttctgtacccgcgacgacatcatgaacttcctgatctccaagggcatgcaggagaagatgagcttcgacatcatggaaagcgtgcgcaagggccgcgggctcaaacccgaatgggaggaggccatgcgcgagcacgacgtgccccagtgggccatcgacagctgccacaagatcaagtacatgttcccgcgcggacacgccgtagcctatgtgaccatgggcctgcgcgtggcgtggtacaaggtgtaccgtccgcaggcatactacgcggcctacttcaccattcgcggcgatggatttgacgcggggcgcatgctgctcagcccggaaaccctgcgcgaccgcctcaccgatttccaaaaccgcgaggaaaagatgagcgtgcgcgagaagcaggaggaaaacgcctatcacatgctgctggagatgcagatgcgcggcattcacatgctgcccgtggacctgtacaagagcgacccaaagcgctttttgatcgaggatggcaacctgcgctgtcccttcacggccatcaacggctttggcgaatcggccgtggagggcatcatcgcctcgcgcgacccaaaccgtccctacatcagcatcgaggatttgcaaaaccgtgcgcacatcggccagagcatcgtggagatgctgcgaggccagggcgcgctggaagggctgccggaaaccagtcaggtggatctgttttccctgctgggatga

SEQ ID NO: 844 - DNA, 1581 bp, unclassified Ruminococcaceae
atgatgacggataaaagcatggattttttggaaaagcagggctccagcgccgccaaagcgctggaggtgctccgggaggaactgcccctccagcgttttgtgggcgaaagcctgagccaggccgtggtggagggcgaggtagcgctgccaggcggcctgcgcgaggaaaccaccgtgcttagcgccgaagccatggcggtgctggaccgcagcgcggcggaggccgatcgcgtgactgccgaaggcaaggtggtctttcatgtgctctacacccagggcgaccccacgcatgtaagcgcgctggaggcctcggccgaattcagccatccggtggagctggctggcgcgcagtcggggatgaacgcacccgtcagcctgatggtggagcatgtggaggccggcgctcagggcggacgtctgcatctgatggcgattttgcgggtacaggtgcgtgttttctcggacgagcccatggaggtggtcacgggcattcgcggggtcgatggcctgatgctgcgcaccgaaacgctcagcggctgtcagaccgtggcgcggggggaacaggacgtacttgtgcgcgacgaatgtgacctgggcgcggtcttgcagatcaccgatacgctgtatgccacggccattgccactgtccaggacgtgatgggcggcgaggagcgggctacgctgtcgggcaacattttgctggaagtggtgcaccgcagcgccatgccctcgcgtccgctggtggtcacacgccacaccattccctttgaggagacggtatccctcacgggcgacgagggggattcgctctgcgcgggcgcggtggtcaaggatgtggccgtgctctcccaggaagggcaggaggagggcagccgcacgcttcgggcggaggtgctgctgggattgaacgcgcaggcggcgaggcagagggacctgtgcctgctgctggacgcctataccacccagggcgactgcctgtcgctggagaagcaggaagtccggcgggcgctggcgcacaagcaggtgcataccgccgaaagcggcaagctcacgctcctgctggacggccagacacccgtgcgcacgcccctgcgcgcggcgcttcggcccgtggtgacggacatgacccaggcgggcggcaagctcagcgtggaaggcatgatggaagtgacccttctgtacatgaccgacgatacggaaacgccccagacctatcagacggaggaacccttccgcatgtgcttcgcgtgcgaggtgagcctgccggaaagcctggtgctgaccaccagcaacatcgacgtcaacggcatcaccagcgatcgcgtcgaggtgaaatacatcctgcatctggactgccatgatgtacagctggcaagcgaagcactggtgacgcaggtggagcaggagcccgccgaggaagccgaaccgggcatcctgatgtatttcagccagccgggcgaaagcctgtgggatatcgccaagcgctatcgtgtcagctgtgacagcctcaagcgcatgaaccccgatctggaggaagacggaagcactcaggcgcagcgcgtgatcttgtggcgaaaataa

SEQ ID NO: 845 - DNA, 1593 bp, unclassified Ruminococcaceae
gtgaaaggcatgaaaaaagcgtggaaagcgctggcggcgtttctgcttgcgctgatgctgccgctcggcggcgcgtgtgcgagtatcgcgggcctggatgaaacgcttgcaggctatttggatacggacggcgatctgcgctacagctttgccctgcaggtggggacgctcctgccctacggcgaggaaacgctgacgatgatgaacggcgtgctggagcatatccgcgtggccgcgtccgagacggacgcaggggccgaaagcacgcttgctctttgcgtggacggcgagagcgtgatggacctcaaccagcacaaggcgggggagagcacctcgctgaccacctcgctcctgcccaaccgcacgctggtcagcggcggatctccgctggacctgttgatggggacggaaaatggcgaagcggaatttgacgcgctgctggccattcagcaggtcgagggctgctaccagacgctgaccgacgccattttgccctacgcggagcagaagaaggccaactacaagatcaaggatatcgccacctcgcgctggagccgcatcgcgcggctgaccaccgagcagagcacggagctggcgccgttgattgcgcaggtgctgggctgcggcatggacgcggccttccgtgccgaactggagaaaatgacctattccaagggcttcatcgtgggtctgtaccagtccgaggaaaacggcgaggacctggccgtctatatcaagggcaccgtcaccatgggggacggcaccacgcggcagctgtcgtatcagtgggcttttacgggcgacgcggcggagcgcatcgacacctataaatttgagctgacccagggcaagggcgacgcggaaaaccgcacgatctccgctacctaccggcgcggggaggcggaaggcgccttctccgtaaagggcgagtggtccgccgccatcaagcggggcacctccaccgtgaccaccacggtggagcacgacctcaccggcgcttccgggtccggcgatcgcacgctggagggtacggtcataaccgcggtcaagacggcggccgacggggagaccgaaaccgtcaccaccacgctgacccccgcggtgaagctgtcctccgcgcaggagggggagatcctcacgggaacggtggcgctggaggagatgaccggcaagaacgtgaccaaggcgctcacctttacctttgacgaggagcccgtgcaggtgacggaccagccggaggaaagcgtcgacatggcgtccgccgcagaggacggcgagccggtctacgatcctatgccccagagcagcctgagccagaatgaggagcccgtggacggtgtggattcggattatctggtggggcagccgcccatcggttaccagatctacgaagtgccggataccatgcagacctatgatctggacaccgcgcaggcggaccagctggaagcgctgcggggcgagctgtatcagaacctggccggacggctgctcaccgcgctggccaagctgcctgcggaggacgccgcgctgcttgcggacaacctgtccgaggaggactacgcggctttcctggagctggcgcaaccttga

SEQ ID NO: 846 - DNA, 1716 bp, unclassified Ruminococcaceae
atgaaagtagtcattgtcggcggcgttgcaggaggagcaagcgccgcggcgcgtctccggaggttggatgaatccgctcagattattgtgtttgagcggtctggatatgtatcttatgccaactgcggactgccttattacatcggcggtgttattgaaaatcgcgatctgcttactttgcagacccccaagagcttcaaaagccgttttaatattgatgtgcacgtccatcacgaggtcgtcgccattcatcgggaccgcaaggctgtcacggtacgaaatctggagacgggcgcggaatttgaggaaacctatgacaagctgatactttctccgggggcgaggcctattcgtccgcccatgcccgggttggagtccaagcgtctgtttacgcttcgcacagtggaggatactctgcagatccgcgattttgtagagaaagaaaagccgcggcgcgccgtgctggcgggtggtggattcatcgggcttgaattggcggaaaatctttgcgaaatgggcgttgaggtcacgatcgtccagatgctggaccagctgctgacaccccttgacaaggatatggcatcctttgttcatgcgcggttccgtgcaaaaggggtgcacctgatgctcaaaacagctgtaagcggctttgaagagcgcgaaggatgcatcctgacacatgtagatgggggagagcccctctgttcagaaatggctattctggccattggcgtatcgccagattccagcctggcacgcgaagccgggctagcgctcggcgcacgcggagccatttctgtggatgaacacatgcgcacatccgaccccgatatctatgccgtaggcgacgctgtgcaggtgcgaaacgctgtgaccggttctctgggactggtatcgctcgccggaccggccaacaaacaggggcgtattgccgccgaccatctctgcggactggatagcgcgtatcacggagcttatgcttcctctgtcatcaaggtgtttgacatgacggccgccgcaaccggaatcaatgaacacgcggctaaggaagcgggcctctcttacgaaaagattgttctttccccagaaaaccacgcctcctactatcctggcggacgtgccatgaccatcaaacttctctatgagaaggaatcgctgcgtattctgggcgctcagattgtaggttttgatggcgtggataagcgcatcgacgtcctcgcaaccgccatgcaggccggaatgaaagcccccgaactggcgtgtttggatctggcctatgcgccgccttactcctcagccaaggacccggtaaacatggccggttttattgcagaaaacatcgaaacaggcaaggtgaagcagttccattacgaggatctggccgatctgcgtagccgtcccggcgttacgctgctggatacgcgaaccgtgggggagtatgccgcggggcatgctgagggctttatcaatattccgttggacagcctgagagaccggcttgccgagctggatgcacatcagcccgtttatgtcatgtgtcaaagcggcctgcgcagctatctggcctgtcgtatccttagccagcatggatatgagtgctataacttctccggcggttatcgcctgtatcgcgccattgtagaaaacgcttttaacgagcaggccaacacacggtactgtcaagagttatgcgcaaaatcggtttgcagactccgg

SEQ ID NO: 847 - DNA, 1197 bp, unclassified Ruminococcaceae
atgaagattttggtcgtttgccagcactactggccggaaaactttcgcgtcacggagatctgcgaggcattggctgcgcggggacaccaggtaaccgcgcttgtgggtctgcccaattatcccagcggcgtggtccccgccgaataccgtcactttcggaacagacgtcagatgcgcaacggcgtggaaatccgccgctgctttgaaatcggacgcaggccgggcaagctggggctggcggtgaattacgtcagctacatgacctccgcgacggtcaaggcgctgctgctggggcgggattatgacgtgatttatgcctattccacctcaccggtgctcatgagcctgcctgccgcagtgcttcgctgcttcacctccaaaaaactgatgatatatgtgctggatatctggcccgcctgcctggccgccatgaatgtgggcgaggatgcgctcctctatcgcttcatgaagcgtgtcagccgctgggtctaccgccgggccgatatgctgatctattcatccaagcgttttcagggctatctgcgcgacgtgcacggtattgaggtgccggatgggcagtacatgcctcaatttgccgatgatgtatttcgcgcgccccttccaccaggacctgcgtcggatgggattaacctggtctttgcaggcaatatcggcaaggtgcaggcggtggaggtactgattcgttcggcggcgctgctcagggacctgcccatccgctggcacatcgtgggcgatggttccaacgaggccgcctgccgtgagctggctgccaagcttgcactgggggagaccgtcgtgttttacgggcgcaggcctcttgaggacatgcccgccttttatgccatggcggatgccatgctggtgagtatgcgcgacgatatcagcgtcaacgacacgctgcccggcaaggtgcaaagctacatggctgcgggcaaacccgtgttgggaagcatcgccggagaaacagcctatgtgatcgagcaggctggatgcggcttttgcgctccgcccgacgacccggaagcctttgcgcaggtagtgcggcgtttcttgtcctgtgaggaccgcgaggccatggggaagcgcgggcgggcgtattatgacgcccacttcaccaaacgcgaccatatggacaggctggaagcgctgctcacttcgcttgcgggagggaaatag

SEQ ID NO: 848 - DNA, 1746 bp, unclassified Ruminococcaceae
atgaaaacctcaacgctcatccgccggttcctgccctattttaaaaagtaccggggcatgctgtttctggatctggtgtgcgcggcgctgaccaccgtgtgcgacctggtgctgcccctcatcgtgcgcgatgtgaccgacctggccgccaataacctctccgctcttacggtgagctttgtgctcagggtgggtggcatctacgtgcttttgcgcatcgtggacgcgctggccaatttctacatggcctcccgcgggcacatcatgggcaccttcattgagcgcgacatgcgaaacgacctcttcgcccatctgcaaacgctgggctttgcctattacagcaacgccaaggtgggccagatcatggcccgcatcaccagcgacctgtttgaggtgacggagttcgcccatcactgcccggaggaatttttcatcgcgggtatcaaaatcgtcatccccttcatcattctgatgggggccagccccgcgctcacgctcatcatctttgccatgctgccgctgatgatagcgtgcacgcgctttttcaacaagcgcatgcgcgccgtctaccgcgaaagccgccaccaggtgggcgagatcaacgcccaggtggaggacagcctgctgggcattcgcgtggtcaagagctttgccaacgagccggtcgaaatggaaaagtttcatcacggcaacgacgagtttgtgcgcatcaaccgccgcaaatacctctatatggccggcttcaacaccactacgcgcgtcttcgacggactgatgtacattgtggtggtggtcgtgggggcgctgttcatcattcaggggtccatcaccgcggcggattacatggcctatctgctctatgtcaataccctgctgacctccatccgccgcatcgtggatttcatggagcaatttcagcgcggcataaccggcatcgagcgcttctgcgaaatcatggatgaaacacccgatatccaggacgcgcccgacgccgtggaactgacccatgtgcgcggcgacgtaaccttcgaccacgtcagcttccattacagcgacaacgacaaaaacgtgctggccgacatcaacttccacgtcaacgccggcgagcgggtggcgctggtcggccccagcggcggcggcaaaaccacgctgtgcaacctgattccccgcttttataatgtttccggcggacgcattctcatcgacgggcaggacatcacccacctgacccagcacagcctgcgcgaaaacatcggcatggtgcagcaggatgtctacctgttctccggcaccatctttgacaacattgcctacggcatgcccggcgccacccccgaaaaggtgagggaggccgcgcggctggccggggcggacgaattcatcacccggctgcccgaagggtatgataccttcgtgggcgagcggggtatcaagctctcgggcgggcagaagcagcgcatctccatcgcgcgtgtatttttgaaaaatccgcccatcctgattctggacgaggccaccagcgccctggacaatgaaagcgagcgcctggtgcaagaatccctggaaaagctgtccgagggacgcaccacctttaccatcgctcaccggcttaccaccatccgcaacgccaccatcatctgggtgctgacggagaacggcatcgtggaaaagggcacgcatcaggagctgctcgagctgggtggcatctacgcccatctttaccaaatgtatacggaggtggcctga

SEQ ID NO: 849 - DNA, 1365 bp, unclassified Ruminococcaceae
atgcgaatcctggtggttggtgacggcaaagtaggtcatacgctggcggaacatctcgcgcgagaggggcatgacgtggtcattgtggaccgcagcgaggaagtcctccagcgcagcgaggatacgctggatgtgctgtgcgtgcgcggcaatggggccaacgccgccactttggtggacgcgggggcggacaaggcagatatcatcattgccgccaccgccagcgacgaaaccaacatgctttgctgcctggtggccaaaaagctgggaaccaagtactccatcgcccgcatccgtgaccctgaatacaacgacagcctgacgcttctgcagcgcgagatgggcatcgacatgccggtcaatcccgagcgtgccaccgcgctggaaatcagccggctgctgcgctttccctttgcaagcaacatcgaatcctttgccaaggggcgggtggagatggtggagttccgcgcgcaggagcacgatgtggtggtgggccacgcgctcaaggaccttccgcgcaaactcaacggcctgccccaggtgctttatgccgcggtggagcgcgagggaaatgtggtgattcccaacggtgattttatcatccgcgccggtgaccgggtgcatgtggccgccgatatggtaaccattacctcctacttccgctacctgggcaaaaactccctgcgtgtgaaaaacgtgatgctgctgggcggcggccgcatcagctactatctggccaagatgatcgttcccatgggcattcacgtgtcgatgattgaaatcaacgaaaaaaaggccaatgacctcagcgaatccctgcctgatgtcaatgtgatctatggcgacggcaccgatcaggagctgctggagcaggagggccttcagcagatggacgccttcgtggccctgtgcgaccgggacgaggaaaacctgatgaccggtcttttcgccgtcaaggaaggcgtgcccaaggtgattgtgaagaacaaccgcgtggcctatgccgatatcatcagcgccatgggtctggacagcattatcagccccaaggccatcacctgcgccaacattctgcgctatgtgcgcggcaggggcaacgcctacggcaccaagctggaacgcctctaccgcctggtcaatggcaaggcggaggcgctggaattcatccccaagggtacggacccctatatcggcattccgctgcgcaagctcaacattcgccgcggcacgctggtagcggtcattgtcaggcagggcaaggtgatcgtgcctttcggcaacgaccacatcgaagccggcgaccgtgtggtggtgattgcctgtgaaagcggcatcagcgatttgaacgaggttatccgcaaatga

SEQ ID NO: 850 - DNA, 3051 bp, unclassified Ruminococcaceae
atgagctttgagtaccgtcgtttgaaggaccctgcctactttgcggaaaaccggcttgccgcgcactccgaccacatcgtctatgcccggatggaagagctgctgcgtggagagagcagcctgtattgtccgctggacggtctgtggaagttcttttgcgcccgcaacgagaatcagatcattcccggctttgagggcagcgactatgactgccatccgtgggcggatattcccgtgcccgcgcacattcagttggagggctacggcgcgtcccagtatgtcaacgtgcagtacccctgggatggtgtagaggacgtgcccctcggcgacgtgccgcaggagcataacccggtggcctgctacgtccggtattttttcctgcccgaagccatgcgcggccagcgtgtgctggtgcgctttgagggggcggaaagctgcgtggccgtatggctgaatggccattatgtgggctttgcggcggattccttctctcccgccgagtttgaactgacaccctatttggctgagggcgagaacaagctcgcctgccgtgtgtatcgctggaacatcggcagctggctggaggatcaggatttcttccgtttctccggcctgttccgcagcgtttccctggtttgccttcccaaggcgcatgtgtgggacatccggattcaaacgctgctggacgatgcgtataccgacgcaaccctggtgctggatacgtcgctcctgctgggtcagggtgcggaaggcgcaaccctgcacgcggcgctgatggatgggaaagccgtactcgcgacggcgcagggcggtggcgaaacgcaacacttcgagctttccgtccaccagccgcagctttggagcagcgaatctccccggctgtacgaccttctcatgaccgtatgcgaggaggacggcagcgtggtggaggtggtccgggagcgcgtgggctttcgccgttttgaaatgaaaaacggtgtgatgtgcctcaatggccaacgcatcgtcttaaagggagtgaaccggcacgatttctgtgccgaaacaggccgtgccgtacggcgggataccatccgccgcgacctgctcaccatgaagcgcaataacatcaacgccgtccgtaccagccactatcccaaccagcgcgccctctacgccctgtgcgatgaactgggcctgtacgtgatggacgaaaccaacctggaaacgcatggcgtgtgggaaacgatcatcaggggcaagcattctgtgtcctacgcccttccgggggaccgtatggaatatctgccccggctgacggaccgcgtggattccctctatgagcgggacaagaaccatccctgcgtgctgttctggagctgtggaaacgaggccttcggcggcagggtcatctacgagctgagccgccatctgcgcgcgctcgattccacccgtctcgtgcattacgagggcatttccaacgacccccgctatcctgaaactagtgatatggtcagccggatgtatgcgcccgtttcggaaatccgcgcctatctggccaaacaccgcgatcggccgtttattctgtgcgaatattcgcatgcaatgggcaattccaacggcgccatgcacaaatacaccgaatatgcctacgaggagcccctttatcagggcggatttgtatgggatttcatcgatcagagccttctccacaaggaccgctacggtcaggcggcctatggctatggcggcgactttgacgaccgcccgtgcgattacaacttttcgggcaacggcatcgtttacggggacggaaccgaaagccccaagatgcaggagatcaagtacaactatcaaagcatcgtagcccgcgtgagcgcaacacgggccgtcatcaccaaccgaagcctcttcactccgacctcggcctttgcctgtgtggcgacgcttgcgcgggacggcattgtgatcgacacggcagcgctgcgcatcaacgtccccccgatgaagagtcaaagctgccatctgcccttcaaaaaacagacagaacccggagaatatgccgtcaccctgtccttccgtctcaaggaggatacgccctgggcttccagcggacacgaggttgcctttgctcaggggatttacaaggtgaagggaagcgcggcaactccggtttgccggccgctccgcgtcatccgcggcgatttcaacaccggggtggaaggcaacggtttccgcgttttgttcagcgacctctccggagggctggtctcctatgtgtatggcggtaaggagatgctcaaatccattccatgtcccaacttctggcgtgctcccaccgataacgaccgcggcaacggcatgccccaacggtacgcgcaatggaaaatcgcctcgctgtacgcctctgtcaagggcacgccccagctggccaggaaaaatgcgcatcccgcgcccagggaaaacggggatggttctgtgtccatcgactatacttacgcgctggctaccgtccccgccgcgcagtgctccttgcgctatacggtatacccctgtggaaccgtgcgcgttgccctgagctacgaccccgtatccggcctgggagacatgccggaattcggcgtaatgatgaagctggacgcggattatcatcggatgcgctactatggtcttggtccggaagaaaactacagcgaccgttgtcggggggcacggctgggaatttttgaaacaacggcgcaggacaatctggcccgttatctcgtaccgcaggagtgcggcgcgcgcaccggcgtgcgctgggcggaagtcatggacgatcgcggccggggcttgcgcttccaggcggacggggatatgaccttttctgcgctgccctatactccgcatgagttggaaaacgctgcacacgcttacgagcttccgccggttcactacacggtggtgcgctgcgccatgcagcagatgggggttggcggggatgacagctggggcgcgcgcacccatgaggaatacctcatcgatatatcccgccggcgtttcttcactttctgcttccgtggaattgtctaa

SEQ ID NO: 851 - DNA, 1254 bp, Eubacterium sp. CAG:115
atgcaaataattctgatagtaattctgataatctgttcggcgtacttctccgcaacggagaccgccctgagcagcgcaaacaagatacgcctcaaacacatggcagataccggaaaccgcgccgcagagcgcaccctgaacattctggaaaagtacgacaaggcgctgaccaccatactcatcggcaacaacatagtgaatatcgcgtgctcgtcaattgcgacgatacttgcgatatcactggtcggcgagaaatacggttcgctggtgtccactatcgtgactacagtcatcgtgcttatcttcggcgaggtaatgcccaagagcattgcgaaggattaccccgagacaatcgcaatgcttgcttccggcgttatttcgttcctgatggttatttttactccgttctcggcgctgttcattctgctgaaaaagggagtttccaagcttatgcacagctccgataaggtcagcatgaccgaggaggagctaaaggtcatgatcgacgagatcgaggacgaaggagtgcttgagcagcaggaaagcaacctggtacgcagcgcgctggaattcgacgagataaccgtcgacgagataatcacgccgcgcgtccgcataaccgccgtggaaataggcgacgacgccgcttcggtgcggcagaagttccttcaggaggaatactcccgcatgccggtgtacgagcgcacgcttgacaacatcgtaggcataatcactgaaaaggaatttttcaagcagtacgaaaaaagcactgatttcacgatacgcagcattatgcaggaaacgctgtatctcccgcagatgcagaagctatccgaggtgttccgcaccatgcagaagcagaagtgccacatgagcgtggtgctcgaccagcacggaggcaccctcggcatcgtcacgatggaggatatccttgaggagctcgtaggcgagatatgggacgagagcgatgaggtgaaatcccccgttaccatggtcggcagcaatgttttcgaggtctacggcgatgtttcgctgaattcgctcaggcgcttcctgaccgcccgggacattccggcggagatagaaagcgaggctcacactgtggcaggctgggtgctggggctgttcggaagcattcctaaaaacggcgacatcacccagaccgacgacttcatagtaacagtactcgacgcggctgcgcttcgcgtgaataaggtacgcatcgagataaaagacaggaaagacgaggattga

SEQ ID NO: 852 - DNA, 1425 bp, Eubacterium sp. CAG:115
ttgtcaggtaatatacacgaggaatgcggcgtattcggcatttactgcaatacgccgtccgacgtggcgcactccgcttatttcggactgtatgcgcttcagcacagaggtcaggaaagctgcggcatcgttgtcaacgaccgcggcgtgttcaagactcacaagggacttggacttgtgaacgaagtgttcaacgaacgcgttctttcggagttcggtcagggaaggatagcagtcggtcacgtacgctactccacaacaggtaacgtaaataccgcgaactgtcagcccatgaccgtccgccacgtaaagggcgcactcgccatcgcgcacaacggaaatctcataaacgcactcgagcttagaaggcagtacgagctgaaaggcgctatcttccacagcacaagcgatactgaggtcatctcctacgcagttaccgaggcgcggcttgagaccggctccattcaggaagcggtcgagaaagctatgtacaaaataaagggcgcttattcactagttgtgatgtcgcccaagaagctcatcgcagcaagagatccacagggattccgcccgctgtgcatgggcaggctcccggacggcgcgggttacgtgttcgcttcggagagctgcgcactcgacagcatcggcgctgagttcgtcagagacgttgaacccggcgagatagttgtcgcggacgaaaacggcatacagaccatcagaacacactgcggtcagaaaagctcaatgtgcgtgtttgaattcatatatttcgcacgtcccgattcggtcattgagggagcaagcgtacatcgtgcaaggcttcgcgcagggcattaccttgcgcttgagcaccccgttcaggctgacgttgttatcggctgtccggacagcggacttgacgctgcgctcgggttcgctcagcagagcggtatcccctacggcgtaggcttcgtcaagaaccgctacataggcagaacgttcattcagccgacccagggaatgcgcgaaaactccgttaaaatcaagctgaatgcaatatcggagaccgtcaagggcaagcgcgtcgtccttatcgacgacagtatcgtgcgcggaactacctcggctaaggtcgtgaagttacttcgccacgccggagctactgagatacacatgcgtatctcttccccgccgttcataagcgagtgcttcttcggaaccgacatcgacagcaaggagaacctcatcgcaaacaagcattcagttgaggaaattgcaaagatcatcggcgttgattctcttggattcctcagtaccgacagcgttgttaaaattgccgagaacgcgggctgcggcttctgctcaggctgctttaccggtaagtaccccatcgacgtaccgaaggatatccccaaagacaaatttgaaatgaagttcgaggaatga

SEQ ID NO: 853 - DNA, 957 bp, Eubacterium sp. CAG:115
aggttaattatgaaaacaggacttatattagaaggcggcgccgtaaggggaatattcacagcgggagttcttgaccgccttatggaaaacgggatatactatccctacgtatgcggagtttccgcaggcggcggcaacgcgatgagctacgtttcaaggcagatagggcgcaccgcgcggcagataaacgctccgaaatcggaatcctacttcggattcaagcagtttgttgaggttcacaagataatcaacctcgacaaaatggcgttcgagtacccctacaagcagttccccttcgactttgatacatatttcaagagcggaatagacgtggagtacgcgtgcacctgctgcgagaccggcaaggcggagttcttctccgaatcctccgacgagcagaagctgctgaccatcgtcaaagcgacctgctccgtgcctatgctctgcgacccggtggagataaacggaaagcactacctcgacggcagcatcgcagattccataccgatacagcacgcgctcgacatgggctgcgaccgcgttgttatcgtcatgacgaagccggacgccaacgtaccgccgacgaactacgcaaaattccgccaggtgatctcccacatgtacaaggactacccggcgttcattgaagcctgcatggagcgcgttgacaactacaaccggaacatcgcgctgatggataagctccaggcagagggaaaggcgttcgttatacgcccgcagattccgaccataagcaagttcgagcaggacagccgcaagataatggagctgtaccgccacggttacaccctgatggacaagcgcctgctggaacttgtggagtggaacgaaggcaaacccgcagccgagcctgccggagattcagagctggcaaaagaccaggctgttcccagcgagtttgccggggaagaaaacgttctgctggcttccggctga

SEQ ID NO: 854 - DNA, 1368 bp, Eubacterium sp. CAG:115
atgaaaagaatggaacagctcaagaactctgctaccttcaagcagatgtgcgacgattttttaagcactacggctatcgatcccagcctgcccggaaagttcggagtaaagcgcggtctgcgtaattccgacggttccggcgttgttgcgggcatcacaaacgtatgctgcgtacatggctacgttataagcgagtgcgacaagcagcccatcgagggcgagctcatctaccgcggatacaacattcgcgatatcgtgaacgacgtgctgtcgtccgggcgctacggctacgaggaggtcgcgtatctcctcctgttcggtatgctccctgacgagcgacagctcactacgttctcacgccttatcgctgagtaccgcgaccttcccatgtacttcagcgaggacgttatcatcagaaatccgtccccgaatatcatgaataagatggctcaggcagtgcttgcgctgtacagctatgattccgcgccggaggacaagtccgttgagagcgaaatgctcaaggctatttcgatcatctccagacttcctgcgatcatggtaacttcctaccaggcaatgcgccggttctaccacaacgattcaatggtaatgcaccagataaacaaggacgagagccttgcagagagcattctttccaccctgcgcgacgaccgttcctacactgccgaggaagctcacctgctcgacctctgccttatgctccacgctgagcacggcggcggaaacaactcgacgttcacctgccgtaccgtatcttcctccggcaccgacgcctactccgcatacgcggcggctatcggttcgctgaagggtccgcgtcacggcggcgctaatatcaaggttatggaaatgctcgacttcgcaaaggcgggtatcaagaactgggataacgaccaggaggtcagcgacttccttcacaagctgctccgcaaggaagccggagatcattccgggcttatctacggcatgggtcatgcggtttacacgctgtccgacccgagagcgaagatactcaaggccaacgcgatgaagctggctaagggcaccgagtttgagaaggaattcctgctgctggacagcatcgagagacttactccgggagtattcgcggacgagcgcggtgatatcaagaatatatgcgcaaacgtggacatgtattctggtctggtatacaagatgctgaagataccggtagagatgtacaccggtctgttcgcgtgcgcgagaatctccggctggtgcgcccacagaatggaagaaatgatcaacggaaagcgcataatccgtccggcttacaaggcgataaacctcaacaagaactacataccgctcagtcagagaatataa

SEQ ID NO: 855 - DNA, 699 bp, Eubacterium sp. CAG:115
gtgaaaggatacgcaatgaaagaaaaacagaaaacattcgagcttgagcctgtacagcagcttctccctgcggacgcacagcagcgcgttatggaccagctctaccagttcatggagcttgagcatctctacgagtccgcgatccgcgaggtcaagaccaagcttgagatactcgacagcgaattcaagacgaaatacgaccacaacccgatacatcaccttgaggaccgcgtgaaatccccgcagagcattcttgagaagctcaaccgcaagggaataccgttcagctgcgataacgcaaagcgcgagctgaacgacatcgcaggcgtccgcgtagtgtgcaactacatcgacgatatctacactgtggcagacctcctgaccgcgcaggacgacgtgaagctcatcaagcgcaaggactacatacagaaccccaagccaaacggctaccgcagtctgcacctggttatcgagactccggtgtacctctccgaaaaaaaggagcttgtccacgtggaggttcagatacgcaccatcgcaatgaacttctgggcgaccctggagcacgacctcaaatacaagaccgacagcgtggtgtcagctgaccttgcgcagcagctcaaggactgcgcggagaccattgcctccaccgaccagcagatgcaggacatctacaaggcgcttcacaatattgattaa

SEQ ID NO: 856 - DNA, 1722 bp, Eubacterium sp. CAG:115
ttgttaaaactacttgttcacattaaaaaatacaaaaaggaatgcatactcgggccgctgttcaagctgcttgaagctctcctggagcttttcgtgccgctcgttatcgcttcgataatcgacgacggcatagccaacggcgacaagggctacgttatcggaatggtatgcctgctcgtgggtcttggtatagtcgggctttcgttctccatcactgcgcagtactttgccgccaaggcggcggtagggttctcctccaaggtgaagcacgaattattccgccacattgagagcctgtcgtggtctgaaatcgaccaggtcggaacttccaccctcatcaccagaatgaccagcgatatgaaccagatacagaacggcgtaaaccttacgctccgtctgctgctgcgctcgccgttcgtggtattcggcgctatgatcatggcgtttactatcaacgttcaggcggcgcttatattcgttgcggctataccggtgctttccgttgttatcttcggaatcatgctgtggtgcattccgctttacaagaaggttcaggcaaggctcgacaaagtgctcggaattacacgtgaaaacctcaccggcgtccgcgttgtgcgcgcgttctgcaaggaagatcaggagatcgacaccttcaataagagcaacgacgagctgaccgccggtcagaagttcgtcggaagaatatccgcgctgatgaacccgctgacctacgtaataatcaacctcgcaataatctggctcattcagacaggctccgttcaggtaaacgacggaaccctttcccagggcgatgttgttgcgctttacaactacatgtcccagatactcgtggagcttatcaagctcgcaaacctcatcatcagccttacaaaatgcgttgcctgcggaaaccgcgttcaggctctgttcgacatcaagtcgtctcaggaagtcacctctgacaaggacgttatcggcaatgctgattacgcagttgaattccgcggcgtttccctgaaatacaaaaacgccggagaggattcccttaccggcatggacttcgcagtaaagcgcggcgaaaccgtcggcataatcggcggcaccggctcgggcaagtcctcgctggttaacatgataccgcgtttctatgacgctaccgcgggtgaagtcctcatcggcggccgcgatgtaaagagcttcgaaattccggagctgcgcgagcgtatcggaattgttccgcagaaggcggtgctgtttaaaggctcaattcgcgacaacatgcgctggggcaaggacgacgccaccgacgacgagatacttgcggcggctaaaaccgcccaggctgcggacgttatcgaaagcaagggcggtcttgacttcgagatagaacagggcggcaagaacctctccggcggtcagcgccagagattcaccatcgcccgcgcgctcgtcagaaagcccgagatactgatactcgacgacagcgcctccgcgcttgacttcgcgaccgatgcggcgctccgcaggtctatccgcgaaatggacacgaatcctaccgtattcattgtgtcacagcgtacctcctcaatacagcacgcagataaaataatcgtcctcgacgatggcaagatagccggcataggcaagcacgacgagctgctgaacaactgccccgtctacagcgagatctacaattcccagttcaagaaggaggcggtataa

SEQ ID NO: 857 - DNA, 1050 bp, Eubacterium sp. CAG:115
atgcagatagtcattgcaatactcgcgttctgtgttattatcattattcatgagctgggacatttcacagcggcaaagctctgcgggattcaggtaaacgaattcgcggtcggaatgggtccggtgatcctgaggaaaaagggaagggagactaactatgtgatacgtctgctgcccatcggcggttcggtatcaatggaaggcgagcaggattcaagcgacaacccgcgcgcattcaaccggaagccggtctggcagagaatgatagttatacttgcaggcccgataatgaacctgattctcggattttttgtcgcaatgatatatgtctgcacaatttcgaacatcggaacgaccacggtaagcgttgtcaacgatatacccgggattacaagtcagctaatggtcggcgatgagatcgtctccgtggagaatacgacggtctggacaacgttcgacattcagtacaaaatgcagaacaacggcggtcgcactgacgaaaacggaaatctcctgcttgatttcaaggtgaagcgcggcggagagcttatcgcgctgaaagacgttcagttcaaggtcgaaacagacgataacggaaacagcgatgttatctacagtttctacgttcagccgctcgagaggaacttcctgacggttattgagtacagcggacgtgagaccgcctcgataagccgcatgataatgttcacactggctgatctgttcaagggaaaatacggtctgaaagacctttcaggtccggtcggaaccgtcacggttgtttcgcagagcgtaagttatggactcccgtcgttctgctaccttttcgcgtttattactatcaacgtgggagttttcaacctgcttcccattcccgcgctagacggctgccggttcctgttccttgttattgaagcgatacgccgcaaaccgctcaagccggaaatcgagggcgttgtacacctggtaggcttcggtctgcttatggttcttatgcttgtggtaacattcggagatatttctaagctgatcggcggaggtttcaattga

SEQ ID NO: 858 - DNA, 1092 bp, Eubacterium sp. CAG:115
cctgccggcgcaggaaaggatactactatggatatcaaaatcgaattaaccaaaaaccctaagcccaagcccgctgacgaaaccaagctcggcttcggccatatctttaccgaccatatgttcgttatggactacgatgctggtcagggctggcatgacgcacgcattgtgccttatggtccgatcgagcttatgccttccgcgatggtccttcactatggtcaggagatctttgagggcatgaaggcttacagaaccccttccggcgacattcagttcttccgccccgaggagaacttcaagagaatgaacgtctccgctgagcgtctcgttatcccgcagatcaacgagaaggacgctctcgaggctcttcacaagctcgttgagatcgataaggactgggttccgcatatcgaaggcgcttccctttatatccgtccgttcattttcgcggctgatccgttcctcggcgtacgccccggtgaaaagtactatttcatgatcatcatgagcccctccggcgcttactacagcaccggtatcaatcccgtaaatatctatgttgagaccaactatgtccgcgcggtaagaggcggtatgggcttcaccaagaccggcggcaactacgctgcttctcttgcgggtcaagacgaggctcacaagcagaactattctcaggtactctggctcgacggcgttgagcgtaagtacatagaggaagtcggcgctatgaacatcatgttcgttatcgacggcgaggtcgttactccgtccctccagggcagcattctttccggtatcaccagaaagtccgcgcttgagctttgcagaaagtggggcatgaaggtttccgagcgccgcatcaccattcaggaggttgctgacgcttacgacgcaggcaagctcgacgaggtattcggcactggtactgcggctgtcgtttctcctgtaggtcacctcaagtggggcgataaggtaatggagatcggcggcggtaagatcggcccgatcacccagaagctctatgacaccatgacaggtatgcagttcggtaagattccggacgacatgggctggatcgagaagctctga

SEQ ID NO: 859 - DNA, 1689 bp, Eubacterium sp. CAG:115
aacaaaccaaggaaaggcggtggtgcaatgagtaatatcacagaaaaggacataaagcttttttatgaaatgctggaacgtgacaagaattccgcgcatttcctctgggactgcgcagcggggactgtcgtttccgccggctccggaatatttgcagacgtctcgggcgatccgctggagtatcttcgcgaaagcggtctgatcgacccgcagtccctgccttccttcaatatcttttcctcgtgcgtagaggaagggacgatctccgggagcgacagaatgagcctcagcgccgatattcgcatgaagctgtcagcggacggagaattccggctgtgcgggttctacgcacattttctgaaggacgacggcggcaggataatcgccgtacacggcaccatcagaccctacacgagccgcgaactttttgaccgccgcgtgctgagcagcttttcgtcagaccgcgacccgcgtattttcagcgacgaggctgcggagatgataaagcgccaccctaacgaggagatagcgtttatccagttcgatgtggagcggttcaagcttatcaacgaaaagtacggcgttgaagccggcgacgagcttcttgagtttctgtacggcacgctgggactgatttgcagcgaggaacagcccttcgcacggctgaacgctgatgttttcatggtggtgactatgttctcaagcgactccgacctgcttgattttatccacaggattgaaagcatgctgaccgggttccagaacatggagtacaggctgattttcggcgttgcgattgtcgaggacaggtcgctgcatatacgcaggcacggcgacaacgccgcgctggcgcgacagtcgataaaggggaacgccctgaacaacataggattcttcaacggaagaatgaagagcgagcttcacaagaagcagtccatcgaggacgacatgatgaacgcgctgcttgacggtcagttcgtgatgtacctccagccgaagttcagcatttccaccaagcggataatcggcgcggaggcgcttgcaaggtggatccacccggaaaagggcatgatatctccggcggatttcgttccggtgttcgaggagaacggatttatactgaagctcgaccagataatctgggagagcgcgtgcaggaaaatccgcgagtggatagacaagggaatagagccggttccgatatcggtgaacatttcccgggagtacatacacaccttcgacgtggtgggcgaaatgctgcacctcgtgaacaagtacgatatcccgataaagctgctggagcttgaaataactgaaaccactgattccgagggagtttccgacgtagttcagaagatgaaggacgcgggattcaccatgctgatggacgatttcggctccgggtattcatcgctgaacatgctgcaaaagacgcagttcgacgtactcaagatagaccgcgggttcctttcggaattcatggagtccagccgcggacggaagattatctcgcacacgatctcaatgtcgcgtgatatcggtctcgatatcatcgcggagggcgtggaaactccggagcaggcttcgttcctgagcgactgcggctgcgattcggcgcaggggttctactactccaagccgataacccaggaagaattcgacaaaatgcttgtcgaggtcaataaataa

SEQ ID NO: 860 - DNA, 1392 bp, Eubacterium sp. CAG:115
gtgtatgatataataaaaatatatatgacgctcatacagatgatgactgtattattatatactgaaaatcaagatttgtcaagtgcaaaagaggtgttttttataaattcgggcaaaaaaatagcgcgggtgatcggactgacagtcgcttcgctgcttggagtgatattcctgctgatggtgatatcagcggcggcgttcggttctgcgggaactgtgggagttttcggattcaacctgttcatatgcgacagcagcgattacgacagcatacctgccggaagcgccgttatctccacttcctgcgcaccctacgacctcgaggaaggaaacctagtactctacaccaccgaccccgaggataagaacgcgccgcttgcgatggggtattacgcagatttcaaaatgaccgacggcgtgtactacctccacctcgtgaacaacagcgacagcaccgtaatcagcgaggacgcccttatcggaaaagcaggctggtgcagtccgttcctcggagccttcatcagattcgtaagaacgccctggggagttctcgtcatggcggtcataccctgcgccctgctgatactgttagatgtcctccgcgccaagacctacgaaaagccgatccccgaagttatcccgcaggtcaagaatcaggacgaccggcccgcgcagccgcagttaactgtcggcgaaagcggcggagcctcatataagcgaaatccaagcggaaagccgtccgtaagcgcagacagcgtgcttttcacgttcgattctgcaaaaaaacagcacgatgaacccagtaccggctcagcgcccagaatgtcggacgccgacgtactttcactgctgaacgctccatcgcccatattcggtcagaagccggaaaaaccgcgcccggagcctcccctgtttaccgccccggctgaaaagccggcttccgctcccgaaaagccgacgctccccgcgccggtcgcagccaagcgctatatcgacaatacggtggctcccgctgtgaaaccagctccagtttccgatgcttcggcgatacccgcggcagtctccaacaccaagaccgccgagatacccgtgataaagaaacccgaaaagaagcgctccgacgcattctttgcacagtcggaggctccgcagataggcaggaacctcaccggaaagcagaccgcaaagtccagccgttcgatcatcgacctcgaggacgccctcgcagcggcgccctcccgcaccgccagacctgaaagccgccgcagcgcggatatcctcgcttccaaaaaccgcagcgaccttataaccgaggatgacgactcaagggacaagtcgcgctatgaagttgacgatattcttgcgggcatagaaaaacggcaccagcagtga

SEQ ID NO: 861 - DNA, 597 bp, Eubacterium sp. CAG:115
gagggactaatgactgataaggaagaatttatttctattttcaaggaaaacatcaccagggaaggctcagacaagctgctggactttctcgaaaaccgcagcgatttcttcaccgcgcccgccagcacgcgatatcataatgcgtttgaaggcggacttctgcggcattccctgaacgtataccactgccttgtggcttatcttgagcgcgagcgcgtgaagaacgaatacgggctgagcgtttccgctgaaacggctgcgatcgtcgcactgcttcacgacgtttgcaaggtgaatttctaccgcgtcggctggcggaacgtcaaaaacgagcagaccggtcaatgggaaaagcagccacgctacgagatccacgatacgctcccatacggtcacggcgagaaatccgtctatatggtcagcggctacatacgcctcacccgcgaggaggcaatggcgatccgatggcacatggggttctccggagccgaggataagaacactataggtcaggcgcttgcaatgtacccgctggcgtttgcgctgtcggtagcagatatggaggcttcctacttcctggaatcccagaacgattaa

SEQ ID NO: 862 - DNA, 1128 bp, Eubacterium sp. CAG:115
atgaagcgacaattaagaagaatcacggcggtactcgccgctttggcggcggccgcgggaatctccgtgacggctgtggcggctccggaaaacatttcggcggtcagcgcgatagtcattgaggcggacaccggcacggcgctctgggaaaagaacgccgacgaacaccgcgcgatggcaagtaccacgaagatcatgaccgcactgctcaccattgaagccggcggcctcgaccgggaattcaccgtggatccgctcgcgatacttgtcgaggggacttccatgggtctgcgcgagggcgaccgggtgtcccggcgcgacctgctttacgggatactgctcccttcggggaacgacgcggcaaacgcggcggcggtctcggtaagcggaagcataggcgcgttcgtggagctgatgaactccagggcgcaggagctgggactttccaacacgcatttcgtcacgccctccggtcttgacgccgatgggcactacaccaccgcccgcgatctcgcaaaacttgcggcgttcgcgatgaagaacgaggtgttccgcgaggtggcggcgtgtaagtcggcggaggtggagttcgggaatccgccgtataaacgtacgctgtacaactccaataaaatgctcaggcgctacgatggcgcgatcggcgtcaagaccggattcacggacaacgcgcgcaggtgcctggtttctgcggctgagcgcgacggagttaccctggtcgcggtaacgctcaacgctggagacgactggaacgaccacgccaaaatgctggactacggcttcacgaaggtgaaggcgtacccgctggagacttcctgcacgaacagggtcgccgtcgcgggaacaggtcagagcgttggagtttacgcgcaggcgcgcacactggcgctcactccggagcagcgcaccaggatcgcccgggaagtctacctaccggggttcgtttacgggagcgtcggcaggggagaccggctaggggagatcaggttcctgcttgacgggaaggtcgtgtgcgcctgcccgcttctggctgattcagccgtggaggcggacgacaccgagccgggattctttgaaacggtactgtcaaaactgggaatatatgtgtag

SEQ ID NO: 863 - DNA, 2223 bp, Eubacterium sp. CAG:115
atgtccgacgtattttccagattcgccccgtttattcaggattacatctaccgctgcaagtgggaggagcttcgcgagatacaggtgctcgcggcaaaggcgatattcgacaccgacgagaacctgctgctctccagcggcaccgcgagcggaaagacggaagccgcgttccttccggtgctgacccagctctgggagaacccctccgcaagcgttggcgtgctgtacctctccccgctgaaagcgctgataaacgaccagttcgagcgcctggaggggcttcttgaagaagccgcgatccccgtcaccaagtggcacggcgacgcctctgcggcggctaaaaagcgcgttatgaagcgtccgcagggagttatccagaccacgccggaatcccttgagagcatgctgatgcacaattccagcggagcctaccggctgttctccgacctgcgtttcatcatcattgatgaaatgcactacttcatggacaacgaccggggacttcagctgttatgcctgctggagcgccttgcaaggctcatcgggtaccacccgcgccggatagggctttcagcgaccctcggggactgcaccagcgcagtgcagtggctcaacaccgacagcggcagggactgcatagttccaaagtgccacgaaaaagggcgctctctgcggctttccgtcaggtttttccccatcaaggagaagataccgaactcggacagcaaggttctgctccagaattactacgactacctctttgaaagcacctggaacaaacggtgcattctcttttcaaactcaaagggcgaggtcgaggagaacatcgcgcacctccgccgaatagccgcggagcgccggcttccggataactaccttgttcatcacgcgaatatttccccggctctgcgggagttcaccgagcagaagatgaaatcctccgagcagccggtctgcaccggggccactgtcactctggaactcggaatcgaccttggaaagctggaacgtatcgtccagaccggctgcccgctgaccgtctccgggcttgttcagcgcctggggcgtacagggcgccgcggcggagtcgcggagatgcgctttgcgttccggtgggatatgagcctgccgccgcaggagttttacaaggaaataaactgggatttcgtgatgtgcattgctatgatactgctctacacccgggaacgctggatagagccgatgtaccttccgaagctcccttacagcctgctgtaccaccagacgatgagctggctgtcctcgcaggggagcgttaagccgcaggaacttgcccggtacattctcaccctgggagtatttaagcacgtcagcaaggacgactacctcagactcctgcggcacatgctggagaacggtcagatagagcgcggcgaggaaggcggtctgctggtcggagagaagggcgaagcggcggtgaacaactacgagttccttgcggtgttctccgtaccgtcggagttctccgtgcgctgcaacgccgaggagataggcacggtgcagactccgttcccggaaaaggctcagtttgcgcttgcgggtcaggcgtgggaggtcacagagcttgacctcaaggagcgccggatattcgttaagcatatcccgggtatctcggcgaatatgtggcaggataccggcaacgagtacgtccacacgaaggtgatgaagaagctgcacgaggtgctttgcagcgacgaggaatacgcgttcctcgacgattctgcgaagaagcgtctgaaccagatacgcaccgcatgccggaacgccgcgatggcaaacgcggacatatccgattcagaaaaccgtctggcgggcggaagcatagcgttttccggagggagggcgcttaaaatcacaccgacgctgtacgcggtgttcccattcctgggaacgagggcgtgcgctgcgctgatgtacgagctgcgcaggcgcggattcggcgctaatgtgtggcttcacaggtacattcccgtctgcatagaggtcaagaccgaccgcagccttgaggaactggaatccgccctcgccgagataaagcgggacggcgcggataagtacagcttcaatattccggacaactgcgagatatccggaaaatacaacgactatatcccacgggagctgctgaaaaagcagtacgtcgaggactatctcgacgccgccgacatgaaagaaaatctgtaa

SEQ ID NO: 864 - DNA, 957 bp, Eubacterium sp. CAG:115
gtgtcagttttaaagaggaactccgtttatttcggcggcggcgtcgatatttcgaacaccatcgacctgaaaaggttccagcccgctcccgagccggcgcaacccgcaaagcaggagccccagccggaggaaccgaaaaagcccgaccccgagcaggaactgctcgaggcaaagcgcaggctggacgataagctccagcaggtggcattccgtgagaaacagctcgaacagcagaagaaggagcttgaagagctcaaagagcgctgcgttcagcagggcaaggacataatccttgaagcgaagaaccgtgcggagtcgataatccgaaccgcgaacgacaacgcttcacagatagtctccgacgccgaggcgaaccgcgacagcgtgtacataaaggcaaaggcggagggcttcgaacagggtacccgcgacggcagggaagcatgtcttgccgccgggagggatatcctcgatgaggcaaaatcctatgccgagaggataaactccgagaaggagcagcttttcgcggactacgaaaaagagatatacgacactgtaatgcagatagcgaagaaagtcacgctggacagcattacttcaaaggacagcgcggcagtcaagcgcctaataaagaaggcggcgaaggaattccgcaactgcgagcgcatcaagataacccttaacgacaacggcgcaaacgaggagctgacaggtgactacgagtacctgaaggagctttgcggaggcattccgaacgttgaggtggagcttctgccggaggcggacccgggaacggtgatagtcgataacggcagcgagatagtggacgcgggaataatgacgcagctccgcatgattcaggagcttggcgacggaaagttccgcgaacctaaacccacaaggaaaaagaagaaacccgccccggagcctgccgaagaagcagacgccgaggaatga

SEQ ID NO: 865 - DNA, 1503 bp, Eubacterium sp. CAG:115
ttgtctgaaaaagtacacacatcaataccgtcggatactccgcttgcaaaatcgctcgaccgcaatcttgtgatgctgaagggaataaccggcggctcaagcgatgtgataataaagaccggtactctgtgcggggcgcgcattgcggtgataacctgcgagggaatggcagacacggacacgctcgcgcagctcatctacaaaaagctgaacgacgccggaaattccgaaaagctaccgccggaggagataatgtcgcggctgttcgacgactggctgatagccgcagagcagcttgacgtactgaacatcggcgacctggttctgaaaatgcagagcggcttcgctatagtccttgtggacggcacttcccggggtatcgccatcggtatccaggggtacccctcgcgcggggtggacgagccttccggggagctgaacgtccggggcagccgcgagggcttcgtggaggtgatacgccgcaacatggcgctgatacgccgccgcataaagtctcctactctggtgttcgagatgatggtgataggtgagcgcagcaacacggatatctgcctgtgctacctaagcgacaaggcgtcgccgaagctgcttgaggacgtaaagaagcggctcaaagccgtgaagctcaacacgatacttgagagcggctatttgcagccgtttttcgaaggaagcggcggctggttcttctcggagtgcgggacctgcgagcgcccggattccttcgcggcgaagctctacgaaggacggatcgggatactcgtggacggcactccgttcgcgctgaccgttccgtacctctttatagagaatttccagaccctggacgactacacccagaagccgttctacgcgcttttcatcaggatagtgcggctggcggcgtacttcattacgctgttccttccgggagcctacgttgcgatagcctcctacagcccggaactgctgccgtcgtcgctgctgctgaacctcgcagcctcggagcaggcggcgcctttctcgcttatggcggaatgtctgcttatccactttatgtacgagatcctccgcgaggcagggatacgccttccgcgcccgataggccacgctataggcgttgtcggcggtatagttatcggcgatatcacggtcaacgccgggctggtcggcgctccgatggtgctggtggtggcgctgagcggactttgcagcttcgttgtgccagcgctttacgagcgcaccgtgatcctgaggttcatctatatccttgccggcggcattttcgggcttttcggactgctgctcccggcgggcgtaattataatcaagatgtgttcgctgaacacctacggcgtgccatatatggcgccgatatccccgtataatccgagaagctcccgggacatgctgttccgcgcgggctggaagcgcctccagaagggcgacgtcacggtgcagggtctgaacggcagcgaacttagcggaggtcagaatgcctga

SEQ ID NO: 866 - DNA, 1800 bp, Eubacterium sp. CAG:115
gtgagtaattccaaaaagaatgagaaaaaaaatgcagtgctgaatacgctgaaattctacctgccggtggcatggaagctcagcaagcggtacttcatcgtttcggtgataaacgtaatcgtgcaggcggtactgccgttcatcgacctgatattcctgccgctgctggtggacgctctctgccagccggagcgcagcgttatacagataatactgtacgcggcgctgatggtggggcttgatatcgcggtcggcaccgccgggacgcagctcactatctatctcgagcggttcgaggataagttcctcaactattcccgcgaaatggtcgcggagcgctgcatggagatagatttcgcgctcaccgagaacaaacaggcgctcgaccagatacgaaaggcaaacgacggtatcgactggtcgggaggcctgcacggtatctgcgtgcagttcttcagcattatttctaacgtcattaagatagtcggcgttgtgactatactcgcagtttccgcaccctggctgctgctgataatcggcgtgctgctggcggtttcctcaatactcaacgcgaagaagaacaaaattgaagtcaagtggttcagcgagctttcaaaggtcgaccgcgtgtattactacataaactacgagcaggaggatatccgcttcgcaaaggatatccggctgtacggcgcggcgggaacgctcatcgcgaaagcggcggagcagataaagcgcacgataagctacgacgttgacaaggaaaaggaactctacccgctgaatatcctcgatgtgaccgtgaccgccctgagggatttcggcacatatctgtatctcggtatcctcgcgatactgggaagcattaccatcggtcagttctcgcagctcactgccgccggaggaactgtcaaccaggcagtccagggcgtgatattcaatattcaggatatagtaaagcggtgcagctacgcctacgaaacggttaagctgatggaatacccgccgtacctccagaaaggcacgcggaaggtcgaggacctgaaaaatccgcacgagatagagttccggaatgtcagcttctcctaccctaacacgggagtgcaggtgctgaaaaacgtttcgataaagatcaaggcgggagagcgcctgtcggtagtcggacttaacggcgctggaaaaaccacgttcattaagctgctctgccggctctacgacacggacgagggtgagatactcctcgacggcgttaatatccgcgactacgactacgacgagtacatgaagctgttctcggtggtgttccaggacttccggctgctggcgttctccgttcaggaaaacgtgctgcttggcagggaggatactcccgaggcggtagattcagtgcttgaaaaggtcggtcttcttgacaaggtgaacactctgccgcatggaagggacaccatgatgttccggcagttcgagaaggacggcgtgcagctttccggcggcgaacagcagaaactcgcgatcgcaagggcgctcttcaagaacgccccggtggttatactcgacgagcctaccgcggcgctcgacccggtggcggagtacgagatatactgccggttcaacgagcttgtcggcggcaaaacggcggtgtacatctcgcacaggctgtccagctgcaagttctgcgaccgtatcgcggtattctccgactgcacgatcaaggagctcggcacacacgacgagcttgtacacaaaccaggcggtatctacgccgagatgttcgcggctcaggcgcagtattacgtttaa

SEQ ID NO: 867 - DNA, 996 bp, Eubacterium sp. CAG:115
atgaaacataagattataatgtccgcagcgcttattatttcaatgaccggtatgaccggctgcttttttttccctgccgaggaagaactcctcgaaccgccgaccgttgcgatcgaggacatagcctactccacctacacagccaagcaaaaaacaatagaggacaagaccgttgcgaccggctacgtattctgcaaatctcagtataacgccagcttccctgaaagcggcggaactctgaagacgatctatgtaaccgccgggcagcatgttgaagagggtgaccttcttgccgagcttgacgtcggcgaccttgactatttgtataagcagcagctgctgatcgtccagaaggctcagattgcctacaactcgtccggaacggcagacgcacgcctgaccctcgaaatggagcagaacaccctgacagagtacgagcgccagctcaacaactcccgcatatatgcgggaatgaccggtgaagtctgcttcgtgcaggatatggaccccggaacgacggtgaccgcatataagactataataaagatagttgacccttcgcagctctgtatacagtatagttcttccaatatgaaaagcttcccgctgggcgaagaggtcaccattacggtagacggcgaagattactccggctacgtttccaaaactcccaccgatgtaaaggaaggactttacgacgacttccccgccgtgatgaaggatacttcgtcgatatactgtgaattcacagatggaacgccctcattcctgaccgtaggacagaccgcggatataaccgcagtgttcgcgcgtcatgagaacgctgtagtaatatccaagaccctggtaaaaaccgacggcgaccgcacctatgtaaccatactcgacgaaaacgacaccaagaaagaagtcgacgtaactgtaggaataaccaacgccaccgaagccgaaatactcaccgggctgaacgcaggcgaccgagttgtagtacgctga

SEQ ID NO: 868 - DNA, 1248 bp, Eubacterium sp. CAG:115
gtgcagaactacacattgacagaactcattaaaccgaatatactccagcagattcaggacgcattttcggagtattccggcatggcgtcaatcactacggacgctgagggagttcctgttactgctggaagcaattttacccatttctgcaccgaccttatacgaatcacagaagcagggtgcaagaactgcttcaactgcgataaaatgggagctgcccaggctatggaaaccgggctgccctcggtttacacatgtcactccgggcttgtggatttttccgcgcctatcatgctgaacggaaagatgataggctgcttcgttggaggtcaggtgctcactgacgagccagacgcagatttctgccggagaaaggcgttagaatacggcattgatcctgatgcgtatattgaatcgctgagcgcaattaagcgtatgccgcgcagtaatgttgaacgctcggcaaaactacttttcgatatatcgaaggctctgtcgtcgatggcgctgcataactgctctgaaattgaaaacagcaagagcatggaacttgcggcgcggtcgcagtccgactacataatgagcctcacctcggatatgacaagcattacgcttgattacatggacactgcaaaagaagctctggactcgggcgacccggacgagatgaagcgtgctcttgaaatgattaccagccgcggagccggcgcttctgaaatgattcgtgattctattgcctacctccagatgataggcagacgattcagaatgagcgaggaagaatacgctccacgcaaagttttcacagccatcacggacagccttaaccagaaagcagactccgcttcgatttcgcttggaattgaacagaaaatccctgagatactgctcggcgacgcaggcggaatttgtcagctgattgataaatttgcagcattattcagcgaaaacggcggcaagtcgctgaagctgggtatttcgtcctataagcgtggttatgctgagatgctcaagatccagctttgcagtgaaagtgcggaattatccgatgaacagatcggcaaaatcaggaatatcattacttccgacgaggaatactacgcggaaacgatgtcagagcttgcgctcagtatcgtcagaacacagattcgtgctatgtccgggacttttgatatattccgaagcggcggcagtgtaactattgagtttacaattccgcaactgaagatagagggaggtgcttcctga

SEQ ID NO: 869 - DNA, 2415 bp, Eubacterium sp. CAG:115
atgacagaggcagtccaggcggcggtcgagggaaccgcgtacagcttcgacgcgctgtttacttacctcgttcccgaggagctatgcggcaggatatccgcaggaatgcgcgtagtcgtgccattcggaaggggcaacaggagccgcatagcgctggttttcgcggtggagcctgccccggctgaccgctcgaagctgaaatacgtaagctccatcgcggacagcgagccggttatttccccggaaatggtgaggctatgcaaatggatacgcgacaacacgttctgcacgtattttgacgcgttccgcgcgatactcccgccggggctgagctacacgctccagacccgctacgagccggtaaacggatttacggggtcgctgacctccggagagcagtcgctgctgacccgcatttcggagcttcgcgagaagtacagcccccagcccgaggacaagccgctgctgaaagcgctgaaagactccggcgcgataaaggaatccgagctgctgaaacgcagggtcggcgacgaaaccacgctgatggtgaagctcgcggagcttcccgaaggctcggagccgccaaagctcaccccgaagcagaagcaggtgctggagttcctggaggaaaacagcgcggcttcggtgcatgaggtgtgctacgcgctgaacatcaccgccgcggtagttaagcggctggtcgagaaggggcttcttgaggagtacgagtaccaggtgttccgcctggagaataccgaggggaagtccgaaagcccgtcggatatcgtgttttcgccgaagcagcagggcgtgttcagcggtctgctgaagctgatgaacgacgacgcgccgaaatgcgcgctcctgcggggagttaccggaagcggcaaaacctcggtgttcatacggctcatagacgaagccgtgaagcagggaaagaccgcgataatgcttgtccctgagatatccctcacgccgcagatggtgggaaagttccggcggctgttcggcgacgacgtggcgatactccacagcagtctttcgctgggcgagcgcgcggacgaatacacgcgcataaagaccggcagggcgcacatagtggtcgggacacggagcgcggttttcgccccggtgaagaacctcggcataatcgtcatcgacgaggaaggcgagggaacgtacaagtccgagagcgccccgcggtatcacgcccgggacgtcgcgaagcagaggtgcttttaccataacgcgttcctgcttctggcttcggcaacgccgtcgctggagagctactataacgcaaaaatagggcgctacagcctgttcgagctggacgagcgctacaacaacgcggtacttccggacgtatacatcgttgacatgcgcgtcgaacagcagaacgggaatcactccgcgttcagcatgccgctcatcgacgaaatgcggaagaacctcgaaaacggcgagcagtcgatactgctgctgaaccgccggggatatcacacgagcgtccgctgcgcgacctgcggcaaggcgatagagtgcccgaactgtgcgctcccgctgacctaccacaaggcaaacggcacggtggtatgccactactgcggatacagccacacgctgacggcggtctgcccgtcctgcggggggaagttcctgacgatgaagggaaccggtacacagcgcatagaggacgagatatccgagatattcccgaaggcgcggatactccgcatggacgcggacacgactgcggcaaagaacgcattcgagagcaaattcaaggcgttcgcggcgggggagtacgacataatcgtcggaacacagatgatagccaaggggctggatttcccgaacgtaacgctagtcggagttctgaaaacggataacagcctgtacgccggggatttccgcgcatacgagcggacattctcactgataacccaggtagtcggccgcggaggccgcggaggcaagcggggaagggcgctgatacagacctttactccggatcactacgtgctgaacctcgcggcaggccagaattacccggatttctacaaagaagaaatagagctgcgggaggctatgctctacccgccgttctgcgatataatcgtagtgggcttcacgtcgctcagcgacaatgaatgcagcgtggctgcgctgaagttccgcgacatgctggaaaagcgctgggaagcggagtacacggatattccgctgcgggtgctgggaccggcgaggtacgtaataagcaaggtgaacgggcggttccggtggcggctgattctgaaatgccgcaattcgccgcggctccgggagcttatggagcttacactgaaagaagccggcgccgacaaggcgttcgggagagttacatttttcgcggacatgaacggtgatccgtga

SEQ ID NO: 870 - DNA, 2400 bp, Eubacterium sp. CAG:115
atgtgtatcaacgaggaggtcaacaacatgaattcaataagcggattttctgatagtgcggtgaaggcgctcaattcggcgctaggagccgctatgggatatggtcacacctatgtcggcagcgagcacatgctttacggactggtaagcgacgacagctttccgtccgcgtcggtgctgcggaggtacggcgtaggtcgcaatgaagtccttcggcggctggaaacgctggtcggcaaggggagacctacccgcctgagcatgaacgaccttacgccgcgttcgcgcaggctgatggaaaacgcgctctcctttgccgccgccgaggacaagcgcaaggccgggacggagcaccttctccgcgcggtggtgctcgacagggagtgctgcgcctggtcgatactcgcggagcttggcgtgaatatggtgaagctcgcgggggaggtctgcgcgcagcgttatatcgagccggacttccagcagagcgaaaaggagcgccgcgcgaaattcccggcgctcacgaaatacggcagggacctcaccgagcttgcagcctccgggaagctcgacccggtgataggcagggagcaggagaccgaccgccttataagggtgctgctgcggcgctgcaagaataatccctgcctcatcggggacgccggagtcggcaagaccgccgtagtggagggattcgcgcagcgcatagcggcggggagcgtcccgcaggggcttctcgggaagcggatatattcccttgacctgacggcgatgctcgccggggcgaagtatcgcggcgactttgaggagcgcctgaaaagcgtgatagaggaagccgccggctgtcagaatgtgatactgtttatagatgagcttcacagcattgtcggcaccggagctgccgagggcgcgatagacgcggcaaatattctgaaaccccagctagcccgtggcgagatatgtcttataggagccactaccaccgaggaatatcgacgcttcatcgagaaggacagcgcgcttgagcggagattccagccaataacagtggagcagccgacggaagcgcagactctggagatactccgtggaatgcggcgcagctacgagacccatcattgcgttacgataaccgacgcggcgcttgaggaggccgtaaggctgtcggtgaggtatatcaccgaccgaaacctcccggacaaagctcttgacctcgtggacgaagcggcggcgcgggtgcgctcgggggctctgaatgctccgtatgcccgcaggctttcggaggtacgcagggggcttgcagtggtaaaatccgctgcggaggcggagaagctccgcaatgaggaatacgcgctggtgaaggcgctgagcagcggcattggcgcgacagtcgaccggcaggacatcgcatgcgccgcctcggcggtgactggtatcccggcgcagaagctctcgcaggacgaagccgcgcggctctccgggcttgaggagcagctccgcaggcgcgtggtaggtcaggataaggcggtggagctggtcgcgaatgcggtccgccgcgggagaacggggcttaaagagccggagcgccctacctgctcgtttctgttcctcgggcagaccggagtgggaaagactgagctggctaaggcgcttgccgaagcggttttcggcgatgagaagcgcatgatacgctttgatatgtcggagttcatggaaaagcactcggtttcgaagctgatagggtcgcctcccggctacgtgggattcgaggaggaggggcagctcattaaaagggtcaggagcgctccatattcagtcgtgcttttcgacgaggtcgagaaggctcacccggacgtgctgaatctgcttcttcagatactcgaagaggggactctcaccgccgccgacggcaaacgggcggattttcggagctccattgtgataatgaccggaaacatcggtgcggagcagctctctaaaaacacgatggggttcggttcggggcagcaggacgatggggaatccgaagtcttatcggagctgaaaaagcggttcagcccggagcttatcaaccgaatagacaatgtggtagtgttccgcaagctgggcgaggagcagatggaatccatctgccgcatacttctgcggaagctcacggcgcgcgctcagctctgcggcatagagctgagcttcaccaacgacgccgtgaagcacatttgccgcgacagctcttccggaagggagcgcggcatgggagcgcgtccgctccgccggacgatcaccgcggaaatcgagaatatgctctccggaatgatgatctccggcgggctgagaagcggctccagagcggaggtctgcgagcagtccggactgctttctgtcagggtgctttcaactcaataa

SEQ ID NO: 871 - DNA, 1017 bp, Eubacterium sp. CAG:115
atggcacttgatataggcatagaccttggcaccgcgaatatcatcatcaccattgccggaaagggcattgtactgaatgaaccgtctgtggtggcttacgataagaagaaaaaagcagtcgtcgcggtcggcgcggaggcctacaagatgataggcagaaccccggagtacatcgttgcagtgcgccctctgaaggacggcgttatctccgataacgacatgaccgaggcaatgatccgcgagtttatccacatggtgaacggcggcgccatgatgaagccacgcatagttctgtgcgtgccctcctccgttaccgacgtggagcgccgtgcagtagtcgaggcggcgatgtccgcaggcgctcgcaaggtgttcctcattgaggagcctatcgcggctcttatcggtgctggcgtggacatctccaaacccaacggaaccatggtagttgacatcggcggcggtactgccgatgtggctatcgtttcattcaacggtatcgtccagagccgctccatcaagatggcgggaaacaagttcgaccaggcaataatccgccacatcacccagaaatacaaaatactcatcggcgaaaagaccgcagaaaaagccaaaatggagatcgcaaacgtattcgaccccaccggcgaaaagaagatgacgatacgcggcagaaacctcctgaagggtctccccgagagcattgagatatccgatcaggacatctacgacgctatccacgagaacgccatggagatagtcgagcaggtaaagctggtgctggaatccacgccgcctgagctggtcggcgatatcctctcgaacggaatactcctcaccggcggcggagcaatgctcggcggtctgccggagcttatcagcgacaacgtgggcgctccctgcttcgttgcagaaaacccaatcgagtgcgttgcgcgcggcgtcgacgcggcgttcaagatgtccggagagctcctcgacggcttcgagcagatacagctctacaacttcaagtaa

SEQ ID NO: 872 - DNA, 1374 bp, Eubacterium sp. CAG:115
atgtcagacaaactggacggactgaatgtctgcctgatgaacgactcgttccctcctgttattgatggagttgcaacgacgatacttaattacgctgaaataatcaacaacggacttggcaaggcaaccgtagttaccccggaatatcccggcgcaaaggacgatttcccgttcccggtggtgcgctataccagcatgtccatcactgagaagatatgcagctaccgcatgggatatccgttttccgcaagcaagctggattccctcacaagcagcggatttgatattatccacacccactgcccgtttgcgtcaatgctgatggcgagagtcctcaggatcaagaccggcgtgccgatggtgctgacctatcacaccaaattcgatatcgacatacgccgcgccctgccgacaaagctcatgcaggaccaggcgataaaaatgctcatctcgaacatctcctgcgctgacgaggtctggacggtaagcgaaggcgcgcgtcagaaccttatcgacctcggctacgaggagaacgagcaccaccgtatccgaatcatggaaaacggcgttgacttcccccgcggaagggcagattccgaagacgcggcggaactccgcgcagagcttggcgtggaaggtcacggcccggtgttcatcttcgtgggacgcctgctgtggtacaaggggatacgtcacattctcgacagcctcaaaatactcgatgaaaagaacatcgacttccgcatgatgttcgtaggcgacggcgccgaccgcgccgaaatcgaagcctgcgtcgacgaactgaagctccgagaaaaagtgatatttaccggcgcgatatacgaccgcgaggagcttcgcgtgtactataccgccggcgacctgttcatcttcccgtcgctttacgacacgaacggaatcgtagtccgggaggcggcagcctgcggagtggcctccgtgctgataaagggaagctgcgccgcagaggggatcacccacatgcgcaccggaatcctcaccgaggacgacccgcaggcgatcgccgccgagctggagttcgcggcttctcacattgacgaggttcgccagatgggcgaccacgcaatgaacgaggtgtacatgtcctggcagacctcggttgagaacgcataccgccgctacggcgagataatcgaggaatggcgcaccggaaacacctgcaaccaggaaaccgagcttcagcaggatcttttcaccggtatcagccgcgtcaccgacgcagtccagaagttccgcagcattcccgcggtctccgcgatacgcgagagcaacagccggaacatggcaaaataccgcgcccgcaaggaagaaaagaaaaagcaggaatccgagtaa

SEQ ID NO: 873 - DNA, 1221 bp, Eubacterium sp. CAG:115
atgagcctctgttcctgctccgggaattcccccgtgcagaccgccggctcatcgtcagaagctcagaacgacaacggaatcgagcaggtaacactgaaggtctgggctgaagaagccgctttcgacacgatgaacgaaatgatcgaaagcttcaaggaagctcaccgcggcgaggctgaattcaacatcaccatcgagcagaaccttgacagcaagacgaaggacgttatccttggcgacgtgcataacggagccgacgtgttccccctgccggacgatcagctgtccgcgatggccgccgccggagttctgtctgctattccgaaccaggaagaagtcagcgccgccaacactgccgagtcggtagctgcggcgagcataaacggcgttatgtacgcctaccccatgaccgcggacaacggatattttctttattataataagaagtttctgaacgaaagcgacgtttcttcactggaacgcattctggaagtctgcgaggaaaagaacaaggaattcagcatggagttcaactccggctggtacatgtattctttcttcggcaacaccgggcttgaactcgggctgaacgacgacggcgttaccaactactgcacctggaactccacggataattccatcaagggcgccgatgtagtgaataggatgatggagctgacctccagcccggctttcgtgaaccgcgccgacggagacctccccgcagcgctggcttccggaaaggtcattgccgcaataagcggagtgtggaacagcaccgacgtcgaaaaggcgttcggctccgactacggcgcatgtaagctccccacctatcaggtcgcgggaaagcaggtgcagatggcgtcgttcaccggcttcaaaatgatgggcgtcaattactacagcgagcacctcgaatgggcgcacaaactcgcggactggttcacaaacgagcagaaccagacgctttcctttgaaaagcgcaacataggtcctgcaaataagaacgccgccgcttccgacgcagtttcaaaagttgcagcgatccaggcggtaattgctcagtcggagtacggaaagctccagcgcgtcggcaacaagttctggaccccctgcgtggagtttgcagacaacatacttgccggaaatccatcacacctgagtgcgcagaaaatggcagataatctcgtaaaagagataaccgcctcggtaattgattaa

SEQ ID NO: 874 - DNA, 1194 bp, Eubacterium sp. CAG:115
atgcttacactagacaaggtttacaaggcgtcacacgttctcaaggaagtcatcagggagaccgacctcatcaaggctcccaagatcaacaaggaggccgaggtctatctcaagaccgagaacctccaggtaactggttcgttcaaggtgcgcggcgcgtatttcaagatctcccagctcagcgacgaggagaaggcaaagggcgttatcgcctgctccgcaggaaaccacgcgcagggcgttgctctcgcggcttccagagccggtatcaagtcgctcatctgcctgcccgacggcgcgcctatctctaaggtagaggctaccaagtcctacggcgcagaggtctgcctggtagagggcgtttacgacgacgcctacgcgaaggctctccagctccgcgatgagaagggctacaccttcattcacccgttcgacgacgaggacgttatcgcaggtcagggcaccatcggtctggaggtgctcgagcagctccccgacgttgacgctgtcgtagttccgatcggcggcggcggacttatctccggcgttgcctacaccataaagcagctcaatccgaagatcaaggtttacggcgtacaggccgccggagctcccagcatggtgaattccataagagacggcaagatcgagcgccttgacaatgtttccaccatcgcggacggaatcaaggtaaaggaacccggtcagcatacctttgatatatgcagcaagtacgttgacgagatcgttaccgttaccgacgacgagatcgcggcggctatcctggcgctcatcgagcagcagaagctcatcgcagagggcgctggcgcagtttccgttgcggctgtaatgttcgataaggtacccgtaaagggcaagaaggtcgtgtgcctcgtatccggcggcaacatcgacgttactatcctgtccagagtcattcaccgcggccttgttaagtccggcagaaccgccctgctcaacatcgagctgctcgacaagccgggtcagctcctcggcgtatccaggatcatcgcacagctcggcggcaacgttgtcggcgtacatcacgagcacgttggaaactccgacatcaacggctgctacctgagaattgaaatggagaccagaaacttcgagcacctcaatgaaatcagaaaggcgctcacagaggctggcttcaagatcgtagattaa

SEQ ID NO: 875 - DNA, 2280 bp, Eubacterium sp. CAG:115
atgagcagaaccaaccagatctattttgaccaccccggcgacttcgggctgtgggaacagacctgccttccgataggcaacggatacatgggcgccagcatgttcggcggtatcgaacaggagcgcgtcgtcctcaacgaaaagacgttctgggcgggcggtccctgcgcggcgcgccccgactactacggcggaaaccaccgcggcagatatacatatgtaaagcaggtgcagaagctcctcgccgccggcgagaatgaacgcgccgaggaacttctcccgatgctcaccggcgacggggatttcggcagctacctgctcctctgcgacgcggtgctcgacttcacgctccccgatggggaggtaagctcctaccgccgctgccttgatctggacaagtcgctgtactcctgcggattcaccaagggcggagtgcgattcacccacgaggcgttcgcaagctaccccgcaagggtcatcgcgttcaggttcaccgcttctgaaaagggcgcgctcaatttcaggctctccctcgacaagacccacgcagcggcgataaccgctgaaaataacacactcatatactccggcgccgccgaggataacggcatgcgcttcgacgcgagattccgcgttttctgcgacggaagcatcacctccgccgggaaggcgcttgagatctccggcgcttccgaagctgcggtgttcttctgcgcagccaccgactacgacatgaagttcccgaaataccgcaccgaaacggagccttccgcagtcacaaagccgctgctccacaccgcggagcgcctcggctgggacgcactctacgaggagcactacacggattattccagcatgttcagccgcgtttccctcgacctcggcgaggaaagggagcttcccgcggacaagctcctggaagcctaccgcgctggcgacaagtcagccatgagacgcctcgaaacgctgtatttcagctatggaagatacctgctgatctcctcgtcaagggaaggctcacttccggctaacctccagggcgtgtggaacgagagcaacactccgccatggtgctgcgactatcatataaacgtaaatctccagatgaactactggggcgcatataacacgaacctcgcggaaacagtccctccgctgacggatttcctcgattccctgcgggagccggggcgcgtcaccgcgaaggaatactacggcatagagagcactcccgagaaccccgaaaacggctggactgcgcatacgcagtgctcacccttcggctggacggctcccggctgggagttctactggggctggtcgaccgccgcggtcgcatggctcatgcaaaacatctgggagcactacgaattcaccggcaacaaggactacctccgtgacaaaatctacccgataatgcgcgagagcgtgcggttctacgttcagtggctcatctacgatgagaagcaggacagaatggtgtcctcgccgacatactcaccggagcacggtcccgcgaccatcggaaacacctacgagcagagccttatcgagcagcttttcatcgacttcctcaaggcctccaaggagcttaacaccgacccggagcttgcaggaaaagtcaaggatatactcccgaagctgaagccctaccacatcggcaggaccggactgctcaaggagtggttcgaggaggacgagccggacttcgaccgcagcagggtgcagaagaatcaccgccacatctcccacctgatgggactttacccaggcaagcagataaaccactccagaccggagctgatgaaggcggcgatcgccacgatgaacgaccgcggcgacgagtccaccggctgggcgagagcgtacaaaatcaacctgtgggcgcgcaccggcgacggcgagcgtacttacaagctgttgcgcgggcttcttgagagctgcacgttccagaatctgtgggacttccacccgccgttccagatcgacggaaacttcggagcctccgcaggtatcgcagaaatgctgctgcaaagccacgaggaatctatcaggctgctcccggcatgccctgccgactggaacactggtaaattcaccggactgtgcgcccggggcggtttcgtcatcgacgcttcttgggaaaagggctcggtacggaagctccgcataatgcccaaactcggcggaaaatgtgaaattgacgttcctgtaaacggcgaggtgcgtcacatgtcgcttgataccgaaaagggcaaggcgctcgaattcacattctga

SEQ ID NO: 876 - DNA, 1398 bp, Eubacterium sp. CAG:115
atgatacacaagttcaaacagctcggctacaacatagtgctcgacgtcaacagcggcgctgtccacctccccgacgactgcgcgtacgacatgctcgacttcgttgacgcccccatgaccgaggaaatgcccgctgacctccccgcaaagcttccgaagtactccgaaaacgaagtgcgcgagagctacgccgagctttaccagctctacaaggacggcgcgctcttcgccgaggacgactacgaaaagtacagcgacacaatggtcaagtccccggtaaagtccatgtgcctgaacgtttcccacgactgcaacctccgctgcgagtactgcttcgcacagcagggcgacttcggcggcgagcgctgcattatgacccccgagaccggcaagaaggctatcgacttccttatcgagcgctccgccaaccgcgagcagctcgagcttgacttcttcggcggcgagcctctcatggcgtgggatacggtagtacagaccgttgaatacgcgcgctccatcgagaagcagcacggcaagcgcttccgcttcacgataaccaccaacggtatcctgctcgacgatgagaagatagactacatcaaccgcgagatgagcaactgcgtgctctccctcgacggccgccgcgaggtcactgaccgtatccgaaagaccataaacggcaagagctgcttcgacatcatcgtgccgaagttccagaagctggttcagaaccgcggtaccaaggactactacgtccgcgcgaccttcacaaagtataatctcgatttcaccgacgatatcctcgcaatgcgcgacctgggattcgttcagctttccgctgagccggtcgttaccgacccctcgatgccctacgccatcaacgaggaggatctcccccgcgtattctccgagtacgacaagctgtgcgacgtcatggcaaaccgcaccgaggacaagttcaacttcttccacttcatggtggacctcaacgccggtccctgcgcgataaagcgcctgcgcggctgcggctgcggcaacgactacgttgcggtggagcctcacggcgatatctacccctgccaccagttcgttggaatagagcagtggaaaatgggcaacctttatgacggaacattcaacgatgatatcaagacctatttctccaaggttcacgtctacagcaaggaaggctgccgcagctgctgggcgaagttcttctgctccggcggatgcaacgctaacagcttcatctacgagggcgacgtgaagaagccctacaagatcgcctgtgaaatgcagaagaagcgccttgagtgcgccatcgcccttgcggctgacagagccgtgaagggtcacgaggctccctcgatgagcgaggctcccgcaagcatgggctga

SEQ ID NO: 877 - DNA, 930 bp, Eubacterium sp. CAG:115
atgagctttatttcttacctcatcagcggaataagcctcggaagcatctacgcgctcatcgcgctcggatatacgatggtttacggcattgcaaaaatgctgaacttcgcacacggcgatatcatcatggtcggcggatacgcagtatttaccgctatgtccacggcatggtgtccggtatggctctcggtcattatcggcatcgtggtctgcacggtgctcggcgtcgtgatcgaaaaggtggcttataagccgctcagaaacgcgcctccccttgcagtgctcatcaccgccatcggcgtcagctaccttctccagaacctcgcactgctgatttttggttccgcagcgcagaatttcacgtctgttgtcgacggcatgccgccgttcctcattgtaacggataacggagcgcagttcttcacggcagcggagcctggcgtgcgcacctccctcaaggtttcaatggagacattcctctccatagtggtttcgctcataatcatggctgcgcttacatggttcatcaacaagaccaaggccggcaaggccatgcttgccgtcgccgaggacaagggcgctgcgcagctcatgggtatcaacgtaaacggtactatctcccttacattcgcgatcggctccgcgctggctggcgttgcgagcgtgctgatgtgctccgcttatccgcagctcagcccgtacaccggctctatgcctggtatcaaggcgttcgttgcggcggtattcggcggcatcggctccattccgggagcgatgatcggcggcgtactgctgggaataatcgagcagcttgcaaaggcttacatatcctcacagctttccgacgcgatagtgttcctcgtgctgataatagttctggtggtaagacccaccggcattctcggcaagaagatccgcgaaaaggtttaa

SEQ ID NO: 878 - DNA, 708 bp, Eubacterium sp. CAG:115
atgaacaatttttcggtgcttgaatgcccggtttatttcgacaagaccaacatgcttgacatgctttccctttcggcggggcgggctatcctctgccagaaccgtttaggcgagcagataatcgccgacaactcctgggggcttgacccgatgaagggcatgatacgcttcggcaatcgggaattccgcgcaggaatactcggctctgaatccgagatacagaacacctggctctggagctgggcgcacaccgagagcggtctgccggaaagctccactgctgtctccaggcgagtcaagaagctcctgccggagcttccggagttccagaccgggaagttcatgctggacgaagtccacaacggacacgatcttgcgatgatctcctgcggagtttcacacgagaacatctgctactacagatgcccctacgacggcggcgccgcactggtgacgatttccggacttcccgaggatatctttgccccagtggacagcacggcgttcctgcggcagtatatcgagataatcagtggattctactgcgaccacaggcttctcgcagcgggattcctgtaccagaacggaacttctttcacggagagcgaaaatgcgctcacagcggatttcggcgagcgtaacctcagattccttttcgagcagaccgaggacggtatctcaagggttctggacatatcggaggcctga

SEQ ID NO: 879 - DNA, 2727 bp, Eubacterium sp. CAG:115
ttggaaagagttctcaatttagcagggaagaacagcagcgagatatttcagcttcgctatccctattcgctgctgacgttctgcgattacgacctgtcgtattttgccgaaaacgccatcgcagtctgcgacgaagcgctccgctcaggcacgctcgacgcggaccgcgcaacggatcttcgcaactccctgaaaaacatgcacgtctggatagagcataacctccgcacggtgtacgataagatcgtgctggactgctggatagactacgtatgccgcagggacaacatcggcaccgccgcgctgtggaaccgcttcatagactgcaagaccacgtttgaaaaggcggttttcgtaaggctctgcgagtaccgctacaacaaaggtatcaatgaatggctgaaccttgtaagagtgcaggattacgcaaagagcaaggtttattttctgttttcacgcgagatttccggcgtagaagaggcaaatgcccggaggaactactttgaccttatgttcagcgtcacggcgcgggagcttggctgccgcctcgaggacctgggcgtaactcaggtgttttccaccggcagggttccttctgcgccttttatgtatcctaatatttccaaggacataatcaaaaacctgcttccagatttcgattacaacgatgattactcggacatcggctcgtatgagtgcctgtccgaccagatagcgatggacgcgttttcgcacatgaaggcgggtctggcgcaggaactttccagctacaatatgtcgcgctcagcgatggagcatacgccgatgagagtgtacatgccgtgcggtctgaaagcggtggtcgaccttgagatagacgcgctcattgaaagcggcggctggctcacgaggtgcaagcgctgcggaaggtacttcgtgcgcgacggggagcacactgaggaatactgctcgcttcccgtgccgaacggcaaaacctgcctggagctgtacgaaatggagcacccgcgcagcctggtaactcccgaagcggagaagctgtgcagcgagataaccgacgaaatgtacggccgcgtcgcctccggctcgatgagcctgaaggagtacgaaagctggaagcagtaccttgaagcgatgaaggggaaggtcaacaacggcgagatacctccggaggatctgactgcgttcgtaaattactcccgcacaatggatattacacggagcaatccggtgtccgaggtgccgaagagggagccggagcgctcgcagggacgcgtagtcaagccgttcgtgccggagcgcatcagccgcagcgacttggagcgcaagcccgaggagccgcagcccgagccggtggagatcccgagaccgcagccccgccgcgagggatttttcacctcgccaagcgttgaaaggcagcgccaggggaagccgccggtgtcgcatataatccgcgccggggagcccagggactaccagccccagcccgcgtttgttccggagtatccgctgggtgctcaggagccggcgtttgcgccggaaaccagggagcctgctcgtgccgaggcaccgcagtgggcttatcagcagcataatgagaatgttcagagtgttccgaacgttccgagcgctccgaatgctcccgggtatacacagagcgcaccgaggcagtcaagggagcagggattcacaccgtttgcagaacctccgcgcagcgcggagccggagatccaccacatcgtaagagccgcagagccgcagggtacgtcggagcgctatgaagagccgaagttcgtttcgttcggtggaaccgagttcggttctgatttcgccgcccccgccgctgagccggatattacgcaggagccgcgcgacgcgtttgaagttttccagccggaaccagttcccgagtgggaagaacctgcggaatctgctgaaccttccgaaccccaggaggagccgtctcagcccgagccagttccggagcctgcgccccgccccaaggtgataaagaaaaacgccgcggctatctcagcctacggaaagatcgcgggaactccgcttgcaagagccgacggctacgaggcagtatcccgtccggagcctgtggagccgctggagcctgcgaagccctctgagcctgtaaagcctgtggattcgcccgcagagccggaatccgccgaaaaggatccgttctgggagataggttcgatattcgacgtgctggagcagtccgaaaacgacatgagccgcagctcgacaatgaccgcgctcagcgagccggattcctccgagccgcatggaacagcgtttgaacgggaatcagcccagccgtctgagccgccagaaccggctgaacgtcccgcgccggctgagaaaccggcggcgaagcgtaccgcgcacagaaagccgctacaccagccggaggtaacttccgcgcaggcagactcaggtgaaatgcgccgccagaccaagaagcgcagtgccccggctgaggctccgcaacccgagacaaaggctccggaagcgcacgcagagccgcaggagataccgtcgggaatatggacggaggagcgccaccttttcgatcctgacgatcacggaatgactccgcatgaggagctgaacatgctcaaggacaagaagcgcggcaggtcgagcaagactcagcgccttttcgacgcgataatgcgcgagtccgacgataaccccaatttccgcaaaaagtaa

SEQ ID NO: 880 - DNA, 981 bp, Eubacterium sp. CAG:115
atggtcatgaaagaagtagtaaagctgatggattacagacctgatataaagatagttgacgcgaccctgcgcgacggaggtctggtgaataatttccgtttcacggacgagttcgtaaaggatctgtatcagaccaacatcaaggcgggcgtggacgttatggagttcggctataaggctgataaggagatgttcgacgtaaaggatttcggcaagtggaagttctgcgacgacgaggatatccgcgcggtagtaggcgacaacaacaccgatctcaagatcgccgtaatggcggacgttggcagatgcaactacaagcaggacatcaagccccgtgctgaaagcccggtcgacgttatccgcgttgccacatatatcaaccagatcccggccgctgtcgacgttatcgaggacgccgttgcaaagggctacgaagttacctgcaatataatggctatctccaatgcgcaggaggcggatatccgcgttgcgctcgacctgctcgggaagtcgccggtgaacgttatttacatcgtagacagcttcggcgcgctgttcccggagcagatagcgcgtatcgcggcgctctacggggagtacgctgcaaagtacggcaagaagctcggaatacacgcgcacaacaaccagcagctcgcgtttgcaaatacggtcgaggcagtgggcgacggcgttgactggctcgacggtacatactccgagatgggcagaggcgccggaaactgcgcaatggagctgctcctcggtttcctcaagaacccgaagtacaacctgtaccccgctgttcagttcatcgagaagcatatgacaaagctcaaggaagatggcgttgtctggggctacgatatgcagtacctcctcaccggcatgctcaatcagcacccccgcaccgctatccagttcacaaaggataagcgcaaggatttctccaccttctacaaggagataacatcccaggaataa

SEQ ID NO: 881 - DNA, 2250 bp, Eubacterium sp. CAG:115
atggaattccgcagacagaatattaaggagaaacgcatgaaaattagaaaatggctcgccgcagcgactgcgggggcaatggcgcttgcaatggcgggctgttctgacatcgatgaggacttcttcgccaccgccgaagccggaaacagcacggcagaatacaccgccgaagccggaaacagcacggcagaatacaccgccgaagccggaaacagcacggcagaatacaccgccgaggctccggtgcagtccggcggggaagaggagtacgacaacgcaggccgcagcttcgacaacggagcgacccagctttccatgacgaacggcagtctcgatatccaccgccgcacccgttccgagtcggctccgatgggcgacagcggctggacgatcatggtgtacctctgcggcaccgaccttgaaagcgaatgctatgcggcatccatggacatcgaggaagcccttaacggtagatacagcgacgacgttcgcatagtctaccagaccggcggaaccgccgagtggaacgagtactacggcatttcgaacagcgtatcgcagcgctacgtcacaaacaacggcgagcttgagctggtcgacgagttcgagctttgcaacatgggcgacccgaatactctcgcggatttcgtctcatggggagtcgagaactaccctgcaaagcgcatgggacttgtattctggaaccacggcggcggcagcataagcggcgtgtgcttcgatgagatgaacgattcggacagcctctcgctgcgtgagatagacagcgcgctgaactccgtttacggccagatgagcgacaagttcgagttcatcggcttcgacgcttgccttatgagcaccctcgagacagcgaacatcatcgcgccgtacgcgcgctacatgttcgcctccgaggagaccgagccgggcggcggctggaactacaccgacatcgtggacttcctctccgggtaccccgacgcgaccggcgccgacctcggcgagatgcagtgccagagctactatcagcactgcatggacaacggcgacccggacggcactaccttcgcaataaccgacctttcaaagataaacggccttctgaccgcattcgacgccaccgcgaaggaaatgtacgaaagcgacagcatgaccgacatcgcccgcgcggtgtactccgcggataacttcggcggaaacaaccgaaacgagggctacaccaacatggtagacctgcttgggcttctcaatgcggtgcagccttatgcgccctccgcgtccgacgcaattgcaaagctgaaggaagcggtgatctacagcgtaaacggcgacaaccacgaaggagccggcggactttccctgtactatccgctttcagtccagggcaccgaggagctttcggtgttcgcggacatctgcaccagctcatattacctcgcgtatgttgactctgcggcgtacggcaccaccggcggcgacctctcggactacgacaacagcggccttatcgccgactgcgacgacatctggaactacggctatacggcagacccgaacgtaggttcaaactacagcgacgtatcctacgcagatgataacagcaccatcggcatacagagcgtatactttgacgaggacggcacctacacggttcagctctcggatatgagcgcgttcaactacgcgacctgcacgctgttcatgacctacgacggcacaagcgtttacctcggcgaggacgacgaggtcgtcaccgactacgacgcgatgatcctccaggacggctttgacggctcctggccatctatcgcgggacagccgcttgccatagttgcggtaagcgtcggcgaggaccgctcggtatacacggcgccgataacccttaacggcgagcagaccaacctgcgtatcgagtacgatttcaccagcagcgagtggcgcgtatgcgggacctggtccggtatcgaccccgagaccggcgtagcctccagggacacccagcccctgaaggacggcgacgttatcgccccggcttacttcgtgttctccgatgagttcaacgactacatctacggcgacgacatcactgtcagcggcgagctccagatagagtacgacgcgcttcccgccgccgattacagctattctatgtcgctctacgacatctacggtaactactactacaccaccagcgtgacattcacggtagacgagaacggggaactgttcttctaccctgacgagctgtaa

SEQ ID NO: 882 - DNA, 1392 bp, Eubacterium sp. CAG:115
atggcagaaatgatgtgggctgggcgttcctcacagggcgtggacagcagagttaacgcgttcaattcttctatcgctttcgacggaagaatgtacaaacaggatatccagggcagcattgcccacgcgaccatgctcggcgaacagggcataatcagcatgagcgacagcctggagcttatcggcggtctcaaggagattcttgcggacatcgaaagcggaaagctccagtttgacatgacggcggaggacattcacatgttcatcgaggcggagcttacaaagcgcctcggcgacgtgggaaagcgccttcacacctcgcgctcaagaaacgaccaggtcgcgcttgacatacgcctctatctccgcgacgccatcaaggaactgcgggagcttgtggtatctcttgtcaaggtactctgcagcatcgccgatgagaacaccgagactatcatgcccggatatactcatctgcagcgcgctcagccgataaccttcggtcatcacatgatggcgtacgctcagatgctgctccgcgacatcgagcgcttcgacgacactctgcgccgcatgaacgtttcccctctcggaagctgcgcactcgccggaaccacctaccacatcaaccgcgacagaaccgctgaattgctcggcatggaagctccgatggtgaactccctcgacggagtttccgaccgtgatttctgcattgagcttgccagcgccatctcaatctgcatgatgcacctctcccgcttctccgaggaaataatcatgtggtgcagctgggaattcaagttcatcgaactttccgaccgcttctccaccggctccagcattatgccccagaagaaaaatccggacgttaccgagcttatccgcggcaagacagcccgcgttatcggcgacaatatgaccctccttgccatgatgaagggtctgccgctcgcctacaacaaggacatgcaggaggataaggaagcgatattcgacgcagtggacaatctcaagctctgcctgactacgtttatccccatgcttgaaacaatgaccctgtacaaggacaacatgcgcaaggctgccgcaaagggcttcatcaacgccaccgactgcgctgactacctcgttaagaagggcatgccgttccgtaccgcttataagatcaccggcggtctcgttgctcactgcatcgaactcggcaccacgcttgaggagctcccgcttgctgattaccagaagcagagcgacctctttacggacgacgtttacgaggctatcagccttgacacctgcgtacgcgagagaaagtcgttcggaggccccgcgcccgagagcgtaaagaagcagattgagcttaccagaaagaaactggaggaactttgcaatggttaa

SEQ ID NO: 883 - DNA, 1173 bp, Eubacterium sp. CAG:115
atgagcaagtatttattcacctccgagagcgtaaccgagggacaccccgacaaaatctgcgacaacatttccgacgctatcctcgacgccattcttgagcaggatcccatgggcagagttgcctgcgagaccctcaccaccaccggtatggtaacagtaatgggcgagatcaccaccacagcgcagatcgacattccgtccatcgtgcgcaagactgtccgcgacatcggctacaccagctccgagtacggctttgacgctaatagctgcgcggtattcaccaccatcgacaagcagtcccctgatattgcaatgggcgtaaacaacgcgctcgagggcagagccgagaacgcacacgacaccggcgccggcgaccagggcatgatgttcggctacgcatgcaccgaaactccggagctcatgcctatgccgataagccttgcgcacaagctcgcgaagaagctcacagcagtccgcaaggacggcacgatcccctacctgctcccggacggaaagacccaggttacggtagagtacgacagcggcaagcctgtccgcgttgatacagtcgttgtatcctcgcagcatcttgcttccgctgcactggagcagatccgcgctgacattatcgagaaggtcatcaagccaaccattccgtctgagcttctcgacgctcagaccaagtactacatcaatcctacaggaagattcgttgtgggcggtcctatgggcgacagcggcctgaccggcagaaagatcattgttgatacttacggcggatactcccgtcacggcggcggagcattctccggcaaggatccgacaaaggttgaccgttctgcggcgtacatggctcgctatgcagcaaagaacgtagtagctgccggacttgctgagaaagctgagatacaggtcgcatacgctatcggcgttgcgaagccggtttccattttcgttgacacattcggcaccggcaaggtcgatgacgatgttatttccgcggcagtagctgaggtgttcgatttcagaccggctgcgattattgaggcgctgggtctgcgtaagccgcagtataaggctctggcggcgtatggtcatatgggccgtgaggatcttgatgttgcatgggagcgtacggataaggtcgacgcgctcaaggcggcaatcaagtaa

SEQ ID NO: 884 - DNA, 1686 bp, Eubacterium sp. CAG:115
atgcgggcggatctcccaaagccgcccgcagaaatggaaaatatctgctttatgcagtttcaatgccgctttgatcccgttttgaacgtattgacagccgactgctatggtgatataataaactgtatatctcctgtgaaaagccgcactgaaattgcacaaagcgccgatatatttcaggaggttaatgcaatgacaagaattgattacttcgtactcccatggtacaaaaaggtattgttccgcgtggcggaattcttcaaggcgcttggcatgggcattgctcatttcttcatgagtatcccaggcgcgctcgctaagttctttaaaaagttcggcagaggcttcgcgtggctgggtcggacgttcgtacacggcggtatccttaccaagctgtcgtacatcgtgatgggcgcgggcagcctgttccgcggacagatcataaaaggtctgatgtacctcgcggctgaggtcgcttacttcggcttcatgatagacaccggattcgggttcctcgcagggcttcggaacctcggaacagttcagcgcggctggcaattcgacgagtccctcggcattgacgtgcttcaggacggcgacaactccatgctgatacttctctacggtatcttcgcgctgttcattacggtggtgttccttttcctgtgggttcagaacattcactccgccgacatcgcggaacgcctgaaaaaagcaggcaagaagctcccgggcttcgttgacgacatcaagtccctgcttgacgagcatttccacaagacgctgctgtttatccctgttaccggcgttgtcgtgttcacgatagttccgctggtatacatgatctccctcgcgttcaccaactacgacaaggatcaccaggttccggcaaacctctttacctggataggtcttgacaacttcaaggtcattctcggaagcgattccaccatcggacatacattctggccggtcctcgcgtggacgctggtctgggcggtatttgcaacattccttaactacctgctcggaatcattcttgcaatgcttatcaataagaagggcattcgcttcaaggcattctaccgcacgcttttcgttctcgctatcgcagttccgcagttcgtttcgctgctggtaatgaagaacgtcctcgcagaggcgggtcccatgaacgtcctgctccaggagcttggctggataagctcgccgctcccgttcttcaccgacccgacatgggcgcgcgtgacggtcattatagttgacctgtggataggtattccgtacacgatgctgatagtttccggtatcctgatgaacattccggaggatctctacgaagccgcaagaatagacggcgcgtctccgttcgttatgtttaccaagatcacaatgccgtatgtgctgtttgttaccactccgtacctcatcacacagctcgtcggcaacatcaacaactttaacgtcatctacttccttaccggaggaactccggcaacgctggattactaccaggcgggcaagaccgacctgctggtgacctggctgtacaagctgaccgtcaactcccgcgactacagctacgctgcgacgatcggcattctggtattcatcatctgctcgctgctgtcgcttatcacgttccgcagatcggcatcttacaagaatgaggaggcgttccagtaa

SEQ ID NO: 885 - DNA, 1833 bp, Eubacterium sp. CAG:115
aatataatcacaacaaggaaccaccgcccgaaagggtattttcaaggaggagatcatatgtactactcaagcggtaactacgaagcatttgcaagacctaagaagcctgcgggcgttgacaataagtccgcgtatattataggaagcggtcttgctgcactgactgctgcgtgctatctcgttcgcgacggtcagatgaagggcgaacacgtccacattctcgagaaggagcagctcgcgggcggcgcctgcgacggctggaagtacgaggacgtcggctatgtaatgcgcggcggtcgtgagatggacaaccactttgaggtaatgtgggatctgttccactccattccttccatcgaaacagaaggcgtatccgtcctcgacgagtactactggctcaacaaggaggacccgaactactccctctgccgtgcgaccgtaaaccgcggcgaggacgcccacaccgacggcaagttcgacatctctgacaagggcgcaatggagatcatgaagctgttcttcacccctgaggaggatctccaggacaagaagataaccgatttcttcgatgacgaggtgctgaactccaacttctggctctactggcgtacgatgttcgcgtttgagaactggcacagcgctcttgagatgaaacgctatattcagcgctatatccaccacatcggcggtctgccggatttcaaggcgctccgcttcaccaagtacaaccagtatgagtccatgatcctgccgatgataaagtacctcgagagcttcggcgtacagttccacttcggcgttaaggtcgtgaacgtacagttcgactgcaagcccgagcgcaagctcgcgacccgcatcgacgttatccgtgacggtcaggaggaaagtatagacctcaccgaaaacgatctcgtgttcatcacaaacggcggctgcgtcgagaattccacgatgggtagccagaacaagcccgctgaattccgcccggagatcagggcaggcggcggctgggatatgtggcgtaagatcgccgctcaggatcccgcgttcggcaaccccgacaagttctgcggaaatcctgagctatgcaactggatgagcgccaccgttgaaaccctggatcagcgcataatcccctatatcaagaagatctgcaagcgcgacccgttcaccggtaaggtagtcaccggcggcatcgtcaccgtcaaggattcctcctggctgctgagctggacgatcaaccgccagccgcagttccgtgagcagcccaaggatcactgcctcgtgtgggtatacgcgctgttcagcgacaagcccggcgactatatcaagaaacctatgcgcgaatgcaccggcaaggagatctgcatggagtggctgtatcacctcggagttcccgagaatgagattgaggacatggcagagcattccgcaaatacagttccggtaatgatgccatatatcgacgcgttcttcatgccgcgtgcgatcgaggacagaccgaaagtagttccggacggcgctgtaaacttcgcattcctcggacagttcgccgaacttccccgcgacaccatcttcaccactgagtactccatgcgcaccggtatggaagcagtctacaccctgctcaacgtcgaccgcggcgtaccagaggtatggggaagcgtgttcgatatccgcgccctgcttgaagctacagttaagctccgcgacggcaagaaggctaccgacatgaagatgaatctcgcccaggaactggttgtaaagaagctcctcggcaagataaaggacactgatatagagaagatactcaaggaatacaacgttatctga

SEQ ID NO: 886 - DNA, 1056 bp, Eubacterium sp. CAG:115
atggaaaacgaagaagtaaagcacaagcgcagagtgcgctattcgggaactcacccgagaagattcgaagaaaaatacaaggagctgaaccccgagaaatactccagggatatcgagcacataatctcccgcggagccactccggcgggaatgcacatttcaataatggtcagcgagatactggaatttctcgacataaaaccgggacagaccggtcttgacgccaccctgggctacggcggtcacacccgcgcaatgcttgaaaagctccggggaagcggacacatctacgcgctggacgtcgatcccatcgaatctgaaaagacgaaaaagcgccttgcagacctcggattcggcgaggatatcctcactgtaaagctgcaaaatttcagggacatcgacaaggtcgccgccgacgccggaaagaagtttgacttcgtgctcgccgacctcggcgtaagctccatgcagatagacaatccggagcgcggattctcctataaaatcgacggtccgctcgacctccgaatgaacccgcagaagggcaaaagcggcgcggagcgtctccaggagctgacctacgcggagatagtcggaatgctgacggaaaactccgacgagccatacgcggagcagatagcgcgtaccatcatgagataccgcaacaagggcgtgtacatctcgaccaccacacagctccgcgagtgcataaccgaagcgctgtccttcctgccgaaaaacgagcagaaggaaacgatcaaaaagtcctgtcagcgcgtattccaggctatccgcatcgacgtcaacagcgaatttgaggtgctgtatgagttccttgagaagctgccgaacgtgctcgctcccggcggacgggcggctatactgacgttccactccggcgaggacaggctcgttaagcgctcattcaaggagctgcaccgcgcgggcgtttacagcgacgttgcaagggacgtaatacgccccaccccggaggaatgcgtgaagaaccgccgcgcgcggtcaacaaagatgagatgggctgtgcgggcggagtaa

SEQ ID NO: 887 - DNA, 1530 bp, Eubacterium sp. CAG:115
atgtccgaaccatatatcaggttaaaaaacatctgcaagagcttcggcacggtgcaggcgaacaagaacgtttccatcgacgtcagcaagggcgagatactcgcgctgctcggtgagaacggctccggcaagagcacgctggtaaacatgctcagcggtatctacacccctgacagcggcgagatcgagataggcgggaaaaacgtagtgttccgctccccgaaggacgccatcaacgccggaatcggcatgatacaccagcacttcaagctgatagacgtgctgaccgccgccgagaatatagtcatcggtcaggaaaacagcatggtgctcagcaaaaagaagatgaacgcccgcattaacgagctaagccagaagtacggaatttccatcgacccggacaagaaggtctacaacatgtccgtcagtgagaaacagtcggtggagatcatgaagatactctaccgcggcgcggacgttcttatcctggacgagccgaccgcagtgctcaccccgcaggagatacgcgcgctgttcgatatcctccgcggaatgaaggagcgcggctgctgcattatcatcatcacccacaagctcgcggaggtaatggagatctccgaccgcgtgacggttctccgcaagggcgaatcaatcaccaccgcagtcacgaaggactccaccccgcaggagcttaccgaaatgatggtaggcagcgcggtttcccttgagatagaccgcccgaaggagaagctcagcgaacagcccgtgctgtccgtcgaccgcctgtccaagaagtcgttcgagggcgtcgacctgctccgggatttgagcttcgacctctacggcggcgagatactcggcgttgcaggtatcgcgggaagcggtcagaaggagctgtgcgagataatcgccggacttatgaaggcggacagcggctccgtgaaattcagcggcgaagagatactcgggctttccccccgggcgatactccgtcgcgggataagcatgagcttcattccggaggacagactcggcatgggtcttgtggcgggaatgagcgtcatgaacaacgttattctcaagagctacaaccgaaatcccggaccgttcctcgacaggaagttcgcaaggacgctcgcggagcagatagtgcatgatttcgacatctccaccccgtcggtcacacacgaggtaaagaagctgtccggaggcaacattcagaaggtgctcctcggacgtgagatatggcttgcgccgaaggtgcttataaccgcgtatcccgtccgcggactggatatcggagcttcctacaacatctaccgcgtgctcaacgagcagaagaaaaagggcgtagccgtgctgttcatcggcgaggaccttgacgtgctaaagagcatttccgaccgcctgatggtgatccacggcggcgaagtcgtggatatcgtcgaccccgaaaaggtgacgaaagaggacatcggcatgatgatgctgggtcacaagcccggcgcagagggagtcgaagcggtatga

SEQ ID NO: 888 - DNA, 1092 bp, Eubacterium sp. CAG:115
atgacagagaacaacggcggcgcaacaactcttcgcgagctgctggcgcagggcaagcagaagggcagcctcaccacaaaggagataaccgacgtactggaggaactcaactttgacgcagagcagatcaacggcatctacgaggagcttgagaacctcaacattaaaatagtagacgactacaccgcggacctcgacattgacaacctcattgacctcgctgagaccgagagcgcagacgagagctacgacgccgacggcatgctcgccgacgactctgtaaagctctacctcaaggagataggacgtatcccgctgctcaccaccgaggaggagataaagctcgcagagcgcatggcaaacggcgatcccgccgcaaagaagcgcctgagcgaggcaaacctccgtctggtagtaagtatagcaaagaagtacgtaagacgaggcatgcagttcctagaccttattcaggaaggcaacctcggacttatcaaggcggtcgacaagttcgactacacaaagggcttcaagttctccacctacgctacatggtggataagacagtccatcacccgtgctatcgcagaccaggcgcgtactatccgtattccggtgcacatggtcgaaactatcacgaaggtcaagaaaatgcagagccagctcctccacgctaacggctacgagcctaccgaggacgagatcgcggaaaagctcaacatgccgcttgacaaggttcgcgagattatccgcatagcgcaggatcccgtttcacttgagacccctatcggcgaggaggaggacagccacctcggcgacttcattcccgacgaggacgctcccgcgcctgctgacgaggcatgcaacagcgtgctcaagcagaccatcggcgaagtactcgacacactgaccgagcgcgagaagcgcgtgatcatactgagattcggtcttatcgacggcagacagagaacgcttgaggaagtaggtcaggagttccaggtaacgcgcgagcgtatcaggcagatcgaaaccaaggcgctccgcaagctccgccaccccacccgcagcaagaagctgaaggacttcctcgaatga

SEQ ID NO: 889 - DNA, 879 bp, Eubacterium sp. CAG:115
atgataaagagcatgacaggcttcggcagaggtcatcaggtacttaacggcagggatatcaccgtagagatacgcgcggtgaatcatcggtattacgagttcagctcgcggctcccgcgcagcctgggctacatcgaggagaagctcaagagcctgctccagggcaggataaaccgcggcaaggtggagatatccgtgctggtgaacaacgttgaggccgcggacgagaagataactataaataaggaaatagtaaaggaatacgttgacgcgctgcgctccgttaaggaggagtattcgctgaacgacggcctttcgctgtcggatatcctgcgtatcccggacgcgttcaccgtagtaaagaccgagaccgacgaggagcagctctgggctgacgtgaagtcggcggcggaggaggctctggagcacttcatcgcgatgcgtgaagccgagggcgagcgcatgaagcgggacgtaatgtcgcgcctggataaaatcgaggagtgggtcggcgtagtagaaacgcgctccccgcagatggtggaggactaccgcagccggctctacgacaagatgtgcgaggtgctgagctccacgaacatcgacgaaaaccgcatactcatggaggcggggatattctccgaaaagaccgccgtggacgaggaaacggtacgcctgcgcagccacatcgcgcagttccgcacaatgctggaatccggcgagcctgtgggcaggaagcttgacttcctggtgcaggagatgaaccgcgagaccaacaccataggctccaaggtgcaggacatcgaggtaacgcgcatagtcgtcgaccagaagagcgagatagaaaagatacgcgagcagattcagaacatcgaatga

SEQ ID NO: 890 - DNA, 609 bp, Eubacterium sp. CAG:115
gtgctgcgcggcaggcatttatcgtcagccggcgcagtaatatctgaaaggaatggtggcgaaatgtctaaatcgatcctgattacgggcggagcggcaagcggaaaatcgcgctgggcggctaccagctactcgcactatgactacgtgctttacatgagaaccggggaggctgttgatccggacaccctgcaccgcatagaatacagcaacaaccagaacggcgttgactgggacatcgtagagggcgtgtatgacgacccggcaggcaggataggcgaccacaagtttgttatcttcgaccgcctgagcgactacgcttccatcatgatagaccgcatgtgcccggatatctcccagatgtccgacgagctgatgaagtccatcgagcgccgcattatcgcagatatcgaggatatgcgcgagcgtatccgcgaactcaacggcagcatgatcgtaattaccctcgagaccggattctcggtcgcgcccaccgaccccaggcagatagctttccgtaagatactcggaagcgtaaaccagcgtatcgctaattcctcagatgaggtttatttctccgcaagcggcattcagttcaaaatcaagtaa

SEQ ID NO: 891 - DNA, 1887 bp, Eubacterium sp. CAG:115
gtgataaaatataaaagggggtgcggtaatttgaagaagatatgcggcaactgtttttcaaggataagcgggaatgtctgccggaaatgcggtcatgtcaatgtccgcaccagcgcggagtatgacgcgctgccggtggggacgcagctccgcggacgttacacggttgggaagctgatgggcaggggcggtttcggaatgatctacctcgcttacgacgagcagtccgacaagactgtcgcggtcaaggagttcttcccggacggtacggcggtccgttctcaggacaacatcaccgcagagcctatgaccacgatccagcaggagaactacggcgaagggctggagcgcttcttccgcgaggcggagattatttcaggattcccggagtgctccgagcttatcgggatatacgatgtgttccgcgaaaatggcacggcgtattacgcgatggagttcgtccacggagcttcgctgaaaagctacgccgagaccagcagcgcgatctccccggcgcaggcggtctacatagcgcagaagctgctgccgtcgctccagatactgcaccagcgcggagttatccaccgcgacgtttcgccggacaacataatgctgtgcgcggacggctccgttaagctgatagatttcggttccgcgaggtatatccaggacaggacgtgcagcatgtccgtgatactgaaacagggttttgcaccgcttgagcagtaccagaggaggggcgcccagggcggctggacggatatctactcgtttggtgcgtcgctgttctacgccatgactcttgtaactccggaggatccgctgacgcggcttgaggacgacagcgactttgaattccagcttcatgggataacgccttcgctggctgagatactgaggagatcctgcaatgtgcgccgggagctccgctaccagaacgcggaggaaatgctgggagcggtgtcagtctgcggagtggagccggtgggattccctgcggacaagatacagcaggcagtgcggagcagcgctgcgccggagggctcccttgcccgcggaggtacgttcctgtcgaccgcagcggcggcgctgacgtctgcggcaagctcggcggctgaattcttttcggggataagccgcactataacgcctataaaggtcaggataggcggggagatgttcccggtaaattcggtggaacttgacctttccgacagggagctgaccaatgcgcagataatcaacctgcggcacatgaagcggctgaaagtgctgaatctgaactacaattacataacggatctcgcctgcctggaggggctgacgcagcttgaggagctgcatttcagccacaataacgtaactgatccaagctttttttccggaatgacggagctgcggcggataagcgctgagaacacgggtctgactgatatatcgccgctggcggggaaactgcggcttgaaacggtgtttatcggcgacagtcttgtaacggatataactccgctgaaaagcgcgcgggggctgaggtttctcgggtgcaacgagctgcagataggctcgcttgacgccctggagggcatgactgagcttgagacggtgtgccttgcggggtgcggtctgtggagcatacagccgctttcttccgggaagaagctgcggaacgtgtatctcgggcggaacaatgtgtcggatctttcgccgctgatcggctgtgatattgcggagatgtaccttgatctgaataagctgaacggcaacagggaggcgttccggggactcacggtgcatggtttcatcgtgatgaacggaaacgggtacgctcaggaggatctcgagtatatcaggtctactatcaatggagaagccaatcttgaaatatga

SEQ ID NO: 892 - DNA, 930 bp, Eubacterium sp. CAG:115
atgatagaatcattggtgtcggtcaggcttccggctgacgaggagctgaccataaaaaagaaccgcctgaccggcgtgggctgcgaggacggcaagcgtatcgctgtcgtcaccggtatccacggcgacgagctggagggtcagtatgtgtgctacgagcttgtaaggctcataacggcgaatatggcgcatttaaagggtactgtggatatctatccgtcaataaatccgctgggtatggagtcggtcagcagagccgtgccgatgtccgggctggacatgaaccgggtctttccgggaagcacctccggagctgtggcggagaatatcgcggcaaagctggtcgaagatataaagggcgcggacgtctgcgttgatatccacgcgagcaacatttttatccgcgaaataccgcaggtcaggatacccagcgccgagagcagccaccttctcaaatacgctaaaatgctcaacaccgatttcgtgtgggtgcatgattcaaacgcagtcggggaaggctcactggcggctgcgctccgggaggtcggcgtgcctacgctggtcattgagatgggcgtgggacagagaataactaaggcgtactgcaagcagctcctcagcggaatattcaaccttatgtcgaaacttggtatctgggttggacctacagagaatgtttcacatccgatggtcagcagcgatggtgcggtacacgttatacattccggtgaaagtggaatatttatacctaaagttgagcacaacatgtgggtacagaagggtacgctcatcggcgagatagtaactccgatcaccggaaccgtcgaggaagagataacagcgccgtcagacgggcttatcttctcgctgagggaatatcccatcgtttacgagggcagcgtgattgcaagaattctcagcatgagttga

SEQ ID NO: 893 - DNA, 1104 bp, Eubacterium sp. CAG:115
atggagataaagaccgtcacctaccagtgcccgaactgcagcgcggcgctggaatacaacaacgccctcgggaagttcaagtgcctgttctgcgacagcgaattcaccgaggaggacatcaagaaacggttcgccgagaacgagggcttcgagctttcgcaggagaacctcgaagccgagcaggaagccgctcaggacgaatccaaccggcaggcggaggagttcgcgggagcctccgcgctctacacctgcccgaactgcggcgcgggagtcatctgcgacagcctgaccgcctcgacgcgctgccacttctgccacactccggtcatactgaccgggcggctctccggcgagttcagacctaacctgataatccccttcgccaggacccgcgagcaggcggagaccgcgttcaaagagtactgcaaggggaagttcctgcttccgaagggattcgccagcgaagcccagatacagaacatcaccccgctgtacgtcccctactggctgaaaagcggcacggtggacgcattcatggaagccgagggtcacaaggtgcattcctggcgggtaggcgacacgcggttcaccaacaccaagatattcaatgtcacccgccgcgcggaaatgacgttcgtaagagtcccctgcgacggctcgaagcgtatcgacgacagcctgatggaaagcatagagccgttcgactacacgggtatcaagccgttttcgatgagctacctctccggctgcggagctgaaaagtacgacgtcaccgcccaggatgccgcgccggtcatcgacaagcgcatttcggacgctgctgccgatctcctccgctcggatatgaacggctacagcaccatcgcggagaagcgccggaatatcagcttcacaaagcagcagacggtttacggactgcttccggtgtggtttctcaactatacatacaagggcagggactacccgttcgtgatgaacggtcagaccggctgcaatttcgggatactcccggtgagcgggctgaaaaaattcctgttcggcgcggggctgttcatcgtgctcggcgtgctgctgggtctgttagggggtgtgctttttgcttaa

SEQ ID NO: 894 - DNA, 924 bp, Eubacterium sp. CAG:115
atgaagataaccaggataacaggaacattcccgagtacgtccgggctttgccggtgcagatattatatgtatattccggaaaatcccagggcggcggtaatgctctcccacggcatgtgcgagtacttccagcgctaccgcgggtttgcggagttcctctgcaggaacggcatagcgcttgtcggaaacgaccacatcggccatgggaattccgtcaccgaccgcgacatgctgggctatttcggcgaggcgggcggctacatgtatatggtgaaggatctccaccgaatgcgcgctattctcgacaagaagctcccggatattccgaagttcctgctcggccacagcatgggaagcttcatcgcgaggatctacctgtcccggttcgacgaccgctgggacggcgccgttatcatgggcaccgccggcggagttacaggctccgcgccgctgcgtaggctgcttgaggtgctgacccatgcgaaggacagccgtttccgcccgcagttcagcagcaagctggcgttcggagtgttcaatctgcgattcccgaaccaccgcacgaacaacgactggctctccagagtggaggagaatgtcgaccgctacattgccgacccgctgtgtaatttcacgttcacagtcgcggggttcaaggatctgctgaacgcgctgatgtgcgcgaattcccgcagcattattgagaacacccccaccgatctgccgatacttttcctgtcgggttcaatggaccccgtcggcgagtatggcgcaggcgtacgcgcggcgtgcatgaagtacctcgagcacggctgcagcgtgaatatccgggtgtacccggaagctcggcatgagctgctgttcgagctgaacgccgatgaagtcatgaacgatatcctggcgttcataaataagagattataa

SEQ ID NO: 895 - DNA, 1404 bp, Eubacterium sp. CAG:115
atgtcaatgaacgaagcagttatcagggatcgcgcagcggagatcgcagagcttgtcaggagcgatctctcaccgaaggcggctcaggagcggctcgcggaatatcatgcaggtgatatagcagcggcggcggagcttctcagcgcgggggagcgcacgaagctgttccgcacgctggacatggacgagcttgcggacgttttcgagtatttcgagccggagaattccgcggagtacctcaaggaaacggatctcgggaaaactgttctgctgatcggcaaaatggagaccgacgcggcggcggacgttcttagagaattcccgaaagaaaagagaaatcagcttttcgagcttctcgacgaggagctcaggagaaagctggagcttatcgtgtcgtttgacgacgatgagatcggcagccgaatgaccacaaactacatttcgataagctccggaatgaccgcggcagaggctacgcgggcgctgatggatcaagctaaggaaaacgacaacatctccatactttttgttacggcagagaacggatttttctgcggcgcggtggggcttagggaactgcttaccgctgagaagcattcggagataaagccgctgatacagcagagctttccgtatgtttacagcactgaaaagacggaggactgcatagagcggctcaagagctattctgaaagtagcattcccgtgctggacagcgggaatcacattctcggagtgatcacgctggaaagcctcctggaagctgtcgatgatgaaatgggcgacgactatgcaaaactcggcggtttgtcagaggaggaggatctccatgagccgcttttcgcaagccttaaaaagcgtatgccgtggctgcttatactgcttgtgctgggtatggcggtatccggagttgtcggcgcatttgagaaggtcgtgtcgcagcttacgataatcatggcgttccagtcgcttatactcgatatggcgggcaatgtgggaactcagtcgctggcggtgactatccgcgtgctgatggacaaggacctcacagcgggcaaaaagctcaagctcgttgctaaggaaatgcgcgtcggactttcatgcgggcttattctcggagtgctttcggtactgttcgtagggctgtatatcatgctgttcaaggggtatccggtagggttctcgtttgcggtatcagcttgtatcggtgcggctctcatgctggctatgcttatttcaagcggagtcggcacgctagttccgatgttctttaagaagatcggagttgatccggctgtggcttccggtccgctgatcaccaccgtcaacgacctcgtggctgtcgttacctattatgggctgagctggcttctgcttttgcaggtgcttcacctaggcggataa

SEQ ID NO: 896 - DNA, 1449 bp, Eubacterium sp. CAG:115
atggaagtcaggacaagatttgcgcccagccctactgggtacatgcatataggcaatctgcgcaccgcgctgtatacttacctcatcgcgagaaagaaccacggaaagttcattctccgtattgaggacacggatcagggacgctacgttgagggcgcaactgatgttatatacagaaccctcaagacatgcggtctgaactgggacgagggtccggatatcggcggcccctgcggcccgtatattcagagccagcgcatgggtatgttcaaggaatacgcggagaagctggtcgagagcggccatgcttactactgcttctgcaccaagagcgaggacagcagcgaggataccgcgaacggtcttgcctccgctaaccgctgcccctgccgcgacctcgaccccgcagaggctaagaagcgccacgacgcgggcgaatcctgcgttatccgccagaagatcccgaacgagggtaccaccacgttccacgatgagatatacggcgatatcacggtcgagaataccgacctggacgaccaggtgctgctcaagtccgacggaatgccgacctacaacttcgcaaacgtggtcgacgaccacactatgggcattacccacgtcgtaagaggcaacgagtacctttcctccgctccgaagtacaatctgctctactccgcgttcggctgggagcctccggtttatattcacgttgagcatatcatgcgcgacgctactcacaagctgtccaagcgcgacggcgacgcgtcctttgaggatttccgcgcaaagggctacctcaccgaagctatactgaactacattctgctgctgggctgggctccgaagggcgagcaggagatcttcacactggacgagatgatcgaggcgtttgacctttccggtatctccaagtccccggcgatattcgacccgctgaagctcactgcgataaacgctgtttatatccgcaacctgccgcttgagaagttcatcgagtacgcagagccgtggatccgccagacctgcaggcgcaccgatatcgacatgccgctcctctgcgcaggacttcagcccagaaccgaggttttcaacgatatccccgagcgcgttgacttcatcgaccagatgccggaatattccatcgacatgtacgtcagcaagaagatgaaaaccactccgcagacatcccttgaggctcttaagaagctcattcccgttatcgagggtattcaggatttcaccaccgaaaatatccacgacgcgctcttcaagcagatcgaggcagacggcgtgaagaacggtctgtacctctatccgctgcgcgttgcgctgagcggcaaggctgtcacccccggcggcggcgtggaacttgcgaagattctcggcaagcaggataccctcgaccgcatgcacaaggctgtcgggaagctcacagccgagatcggctga

SEQ ID NO: 897 - DNA, 909 bp, Eubacterium sp. CAG:115
catcagatgaggacgagtaatgtaacataccttgtgaaaaagggcatttcctccatctggaagaacttcctgatgtcattcgcaagcttctgtatcctgatggtgagcctgctgctggtaagctgcgcagtgctgcttatgatgaacgtcaacaagatcatgagcaacatcgaggacaccaacgaaataaccatctacctcaaggaagacatctccgacaagcaggttgagcacataaaatccgtccttgagaaaaaccaggacatcaccgacgtcaagtactactcaaaggaacaggcgctcgatgatttccgcgataatatggcggaatacagcgaacttctcgactacctcgacaagaaccccatgcccgagacattcctcgtgcgcgtaaaggatctttcgaaaatccgacatgttgtaaacaccgtcaacgacatagagggcgtagaacagaccaaggccccctatgacttcgcaagcgtactcgttcagatacgcaacaccttcacgctcatcggaggagctgtgctcatcgcactggtcgttgtcagcatcgttatcgtgtcgaattcgatacgcaccagcgtgttcgcgcgccgcaacgagatctcgataatgcggtatgtcggcgctacttcggggttcatcaaggctccgttcttcgttgagggtatgttcatcggtatcctcgccggtgccgcggcgtgggggctcacgtggcttatctacgactccgtgttcgcgctgttttccgctgatctcaccgtatggcagatgttcggattctacgggctcacgccgttcggagatatcatgtggtatgtcctcgcggtgaactgtgccgccggagcgctcctcggcgctgtcggaacagtattcagcaccggaaagtatcttaaagtctga

SEQ ID NO: 898 - DNA, 939 bp, Eubacterium sp. CAG:115
atgagggagagtgaaattatgtcgctcaaggtcgacaacatcgtcaagacatacggcagctgcagggcagtagacggtctgagcttcgaaatgaaggagccgggcgtgttcgcgctgctgggaactaacggcgcgggaaaaaccacgtctatacgcataatactgggaatgctgagcgcggacagcggctcggtcacatggcacgggaagaagttcgtgaccgctgcggagtccatcggctacctcgcggaggagcgcggactttaccccaagtacaagataatggatcagctcatgtatttcgcttcgctgaagggcatgaagcggcaggacgctcagcgcgcaattgattactggttcgacaggctgggagttcaggagtaccgcgacaagcgcgcggagcagctctccaagggcaaccagcagaagatacagctgatagctgcgctcgcgccgaatccggagcttctgatacttgacgagccgctttccggtctggacccggtaaatgctgagcttttcaagagcgttatccgcgaggagataaagaaaaacaagttcgtgataatgtccagccaccagatgtcaacaatagaggagttctgccgggatatcgtgatactcaacaagggcaggacggtgctccagggaaatctgaacgatatcaagaagggctacggcagggtgaagctcaccgtcaaatgcgagggcgacatcaccgcgatggctcaggagtgcggtctgaacctcaccgaggagaccccgaacggctccagctacaacgtatccagcgaggagcaggcgcacgccctgctgaacaggataattgaaagcggaatgccgcttataaagtacgagctgcgcgagccgtcgctcaacgagatattcattgaaaaggtcggaaatgctgcaaaggcgggtgagtctgatgagaaatga

SEQ ID NO: 899 - DNA, 1953 bp, Eubacterium sp. CAG:115
atgaatacggtcagctatgtggttgaatatgaatacgctgcgatggggcttatcgctgtcctggtgctgatcttctgcgcccgccgaaagtacccgggaatgtcaaaccgtatctacgccggaatgcttatctgcacgttcttttcgtcgcttacccacgtgtttgcgatgaagtcgctgccggtggcgtcgtcgcttccgctgtggctgaactacgtcatacatatatcgtacctgctcttctacgactttgaagctatcctctacatgatgtacgttattgcgctcacaaagaggaacaagatatcgaaggctagttcggttttcacgctttcgcttattggcgcggaaaccctgctgcttgtaacaacgccgttcacgaagctgataatttactttaacgacaatatggagtactgccacggaccgctgttctatgtctatccggtaatagcgttgatgctgatgatgttcggctcgttcatgttcgtaaagtaccgccgcaagagcgaaattatccaggcggcttccatgctgtttttcttcgttgtgaccgtcgcggctacagttgtgcagctccttcttccacagcaggtgatggggaactacgctattgcgctggttctcgtgatgttccttataattatacagaaccccgacgatttcactgataaggccgccgactgcttcaacgacgaagcatttttcaacagtgtggaagtccgcattgacgaaagtaagccttttaccatcgcagcgtttcggttcgacgggctgaattatataaacgggctgttcagcgtgggagagcgcagcgcggctcccagagcggtcgcggcgaagctgatgtccggattcggcaccggggaggtgtaccacctcggcggctgcgagttcgcgatgttcacgaacgaaaagcgcaagataaccgaaaagtacctcaccgacaggattctcagcatattctcaaagccggtgaagatccacggaatagaagcgaatctcactccgaagatatgcgtcgtgcgctatccggatttcgcgcagtctgcggaggacgtccgcgacgcgatagagtacaccctgcgaaccactgaaaaggcggagggcagcgtgttcgtcgcaagcaaggagtcgatcaccgccaaaaagcgcgaaatgcacattctcagcaccatcaagaactgtatcgtcaacaagagcttcgagatgtactaccagcccatctacgagccggcggagcatgggtttgtgtgttccgaggcgcttatcagaatgaaggatccggagcttggctacgtcagccccgaggagttcatacccctggcggaatccaacggcatgataatcgagataggcgagatcgcgttccgcaaggtgtgcgagttcatgaagagcgggcaggcgcaggctctcggcgtgaaatacatcgaggtgaacctgtcggttctccagtgtgtgcaggaacagctttccgaccgtcttatggagataatggcggagtacggaatacctcccgaggagataaatttcgagataaccgagacggcaggcctcgcaaactacgacgcgctgctgaaaaatatgaactgcttgatctcaaagggcgttacattctccatggacgactacggcacggggttctccactgcaaactacctgataacgctgccgatggatattgttaaaattgacaagagtatcctgtggccggcaatgaagaacgaagaagcattcgtgatcctgaagcacaccgttgaaatgctgaaatcgctgaaaaagcgcattgtagtcgagggtgtggagactagggagatggcgaagctgctcattgatatgggctgcgattatctccagggttactactatcagaagccgatcccggctgacaagtatcttgagtttctgaaagaaaatcagaatatttctgaaaaaattcagaaaactacttga

SEQ ID NO: 900 - DNA, 1491 bp, Eubacterium sp. CAG:115
atgaatcctctgtttgaggtagtccgcaaccctgaccgctgcattaagtgccgcgtctgtgagcgccagtgcgccaacgaggtgcaccattacgaccccgacctcgatagaatggtgtccgatgaaaccaactgcgttgactgccagcgctgtgtaacgctgtgcccgacaagagcgctgaaaataaggaagaacgagaacgagttccgcgagaatggcaactggagccagcaggtaatggacgaggtctacaagcaggcaggctccggcggagtgctcctctctgcgatgggcaacccccgcgagtacccggtttactgggacaagatactgctgaacgcttcccaggtaacaaacccgcctatcgacccgctgcgcgagccgatggagaccaagaccttcctcggcaagaaggagcaggagatccactacgacgagaacggcagggctgaattcaagcacaatccgtacctcgagctggacgttccggtgatgttctccgcgatgtcattcggctccatttcgaagaacgcgcatgagtcccttgcgagagcggctcaggaactgggaacctactacaacaccggcgagggcggtctgcacaaggatttctacaagtacggccccaacacgatatgccaggtagcttccggacgtttcggcgtgttcaaggagtacctcgacacgggcgccgctatcgagataaagatgggtcagggcgctaagccgggtatcggcggacacctcccgggtatgaagataaacgaagaaatatccagaacccgtatgatacccaagggcacggacgctatttcccccgctcctcaccacgatatctattccattgaggatctccgccagcttgttctctcgctgaaggaagccaccgactggaagaagccggtcatcgtaaagatagcggcggtacataacgttgcggctatcgcttccggtatcgcgagaagcggcgctgacatcatcgccatcgacggctacagaggcggcaccggcgcggctccgacacgtatccgcgataacgtgggcattccgatagagcttgcgctcgcaagcgttgaccagaggctccgcgacgagggtatcagaaacaatgtttccatcgttgtcggcggttcgatcagaagcagcgcggacgtcgtaaaggctgtagcgctcggcgctgacgcggtttatatcgcaacggcggctctgctgtcgatgggctgccacctttgcaggagctgcaacaccggcaagtgcaactggggcatcgcaactcagcgcgcagacctcgttaagcgcctcaatccggatatcgcgtacaagcgcctggtgaacctcgtacacgcgtgggatcacgagatcaaggaaatgatgggcggtatgggtatcaactcgcttgagtccctccgcggcaacagactcatgctccgcggcataggactcaaccagaaggaacttgatatactcggaatcatgcacgcaggtgaataa

SEQ ID NO: 901 - DNA, 2442 bp, unclassified Eubacterium
ttgaaacagtatacaggtaaagctaagaaagctatagacttagccacacgtatatcaaaaaaattagattataattatgtcggaacagaacatatactcgcaggtcttataaaagaggggacaggtgtggcagcacaggtgctgagtgcagatggtgttgattacgataaacttatccagatgataaaggatctcatttctccgggtgaaggtgttgcgatggcagaaaaaagcggtatgacgcccagggcagaaggggttcttgaaagggcacaggagatagcagagcatttaggatatgatgaagttggaacagaacatatactgatggcaattatttcgcagggagattgtgcagcggcacgacttcttaatacaatgaatgtcaatatgcagaaaatgtatgtggatatcttgactgcaataggagaagatcctgccagatacagagaggaactacagaaaagcagggcaggagcatcacagacacctactcttgaccagtattcaagggatcttacagagatggcagaaaatggagagttagatcctgtcattggaagagataaacagatgttaagggttatacagatcctgtgcagacgtggcaaaaataacccgtgccttatcggagagccgggagtaggaaaaacagcaatagttgaaggtcttgcacagagtatagtaaacggaacggttcctgaactcatagcaggaaaacgtcttgtgtcgctggatatgtcaggtctggtcgcaaaatcaaaatacagaggtgaattcgaggaacgaataaagaaagtcattaatgaagttatcgctgatggaaatgtgattttgtttatagatgagcttcatactataataggtgcaggcggagcagagggggcactggatgcttctaatattttaaagcctgcgcttgcaagaggccagcttcaggtgataggagctacaacaatagaagaatatcgtaaatatgtggaaaaagacgcagcgctcgaacgcagattccagccggttacagtcgaagaacctagtgaagaagaggcaatagaaatattaaacggacttaagagcctgtacgaaaagcatcatcatgtcacgataacgcaggaagctgttacggcggcagtaaagctgtctgtacgttatataaacgacagatttcttccggataaagcaattgaccttatggacgaagcggctgctaagcttcgtcttgataattttgacgcatcaaacgatatgaacagattgaggaatgaaaaacagcttctccaggatgaatttgaggaagccctatcggaggatgatatagataaagcaaggctgataaaaacgcagattgaggatgcaaagaccagattagataaggcatacaaaaagaatataaggaaccgcaatagaaaaaagcctgttctgggggagaatgagattgcaagagtagtatcaggctggacaaaaatccctgttacaaggcttacagaaaatgaagctgaaaagctgtcaaaactggaaaatacacttcacaagcgtgttatcggacaggaggaagctgtaagtgccgtggcaaaggctgtaaaaagaggacgtgtaggcttaaaagatccggcaaggccaattggttcatttctgtttctaggacctacaggagtaggaaaaactgaggtcgcaaaagctcttgcagaagctgtatttggaaatgaagatgcgatgatacgtgttgatatgtcggaatacatggaaaaacatagtgtatccaaaatgatcggttcaccgccaggatatgtaggacatgaagatggtgggcagctaagcgagaaagtaagacgaaatccgttctcagtcatattgtttgacgagatcgaaaaagcgcatccggacgtgtttaatatacttcttcaggtattggatgatggcaggatcacagattcacagggaagaacagtggatttcaaaaacacaataataattatgacgtcaaatgcaggtgcgtcatctataatagaacctaaaagacttgggtttggtgatatgtcagatgaaaagcaggatcatgaacttatgaaaaataatgtcatggaagaagtgcgcagaatatttaaacctgaatttttgaacagaatagatgaaacgatagtattcaggactttaaataaagatgatatgaaaaagataacggcacttcttatgaaagaactcgttaaacgggcagaagaccagcttgacattgaactgacagtaagggattccgcaagaacatatatagtagaaaaggcatacgataaaaaatacggagcaagaccattaaaacgaaagattcaggatgagatcgaaaacaggcttgccgaagatataataaatggcaggataaaacgtggagataaggttattgtttcgactaaaaataaacaaatttcgttgactgttgaggcagaatag

SEQ ID NO: 902 - DNA, 2340 bp, unclassified Eubacterium
atggactattcaaaaggattatcaaaagaagatgtcagattaaaatttgaaaatggagaaaacaactataaagttcaatcttcgacacagacagtcggtgaaattatcaaatcaaatgtatttacatactttaaccttgtatttttagtgcttgcaattcttctggcaattgcttcagcatggagagatatgctgtttctgcctatcattattgcgaatacacttataggaatagttcaggaagtccattccaaaaaagtacttgataatttgtctatattaaactcaccgaaaacaaagactttaagggacggacagatcgttgagctttcatcggaagaacttgttttggatgatattgttatatttgaggccggatgtcagatacctgctgatgcggttgttgtagagggggagatatctgtaaacgaatctcttataacaggagaggcggatgagatagtaaaaaatccgggaaaagaacttttgtcgggaagctttgttatttcaggacaggcgaaagccagactctgccgtgtgggacgtgattcatatgtttcaaagcttactatagctgcaacgcagacaaataaagaagagcagtccgaaatgatacgctctctggataacctgataaaaatagtcggtataatcattataccaataggtattgctttgtttgtgcaggcatttttctttaatggtggcacattcagagaaagtataacaagcatggtggctgctgttataggaatgataccggagggcttgtatcttcttgcaagtgtggctatggctgtaagcacggtgaggctgtcaaaaaataaagtgcttgtccatgatatgaaatgtatagagacgcttgcaagggtgaatgtactttgcgtggataagacaggtacgataaccgaaccgggaatgtgtgtatataaatttgagccagtggatgaatcgaaaaaaactgaagttttcgggcttatatcagacatggcggctgtaagcagtaaggataatgctacaatggaagcacttcaggaatattttaatgccggaagcggacgcattgctgataaagtgtatccgttttcttcacagacgaaatattcaggtgttacattcgagaatgaaacatatgtcataggggcaccggaatttgtattaagagacagatatggtgaatacaaagacaggattgaaaagtatagcgaaaaaggctatcgtgtacttgtttttgcaaagtatatgggcatccctgatcagaaaccacttacagaagatgtggaagtcttaggatttacagccctgtcaaatccaatcagaaaaggtgcagttgatacattcagatattttgatgagtgtggtgttgagataaaagtaatatcaggggataatcctgttactgtgtcagcaatagcaaaagaggcaggaatagcaaatccggataagtatattgacgcatcagatctgaaggaagaacaggattattataatgccgtagaaaattatacggttttcggaagggttacacctccgcagaaacgtttcctgatcaaggcaattaaggaacatggaaagacggttgccatgacaggagatggagtaaatgatgtgcttgcactaaaggatgctgattgcagtgttgcgatggcatcaggaagcgatgcagcgtcaaatgcatcacagctggtgcttctcgattctgatttttcgagaatgcctaacgtagtgatggagggaagaagagttgtaaacaatatccaaaggacagcctctcttttccttgtgaaaaatatattttcaatgcttctggcagtattttcggttatccttatgcttgattatccgcttgagccatcgcaggtatcgctcataagtatgtttactataggaataccatcgtttgtgcttgcattagagccgaataaatcactgataagcggtcatttccttacaaatgtcattgtaaaggcatttccagctggtcttacggattttcttgcagtaagcgggcttgtgatattctgccgtgaatttggggtggattcagactgcctgtcaacttcgtgtacgattctagtcgcgatcgttggatttatgatactgtacaggatagcacgaccactaaaaagagcatatatttttatgatgatagcgcttgtatgcggctggttgtactgtatgctgtttataagccacttatttgccataacaagtatttcaaggcagtgtgcaatgcttatggtagtgtttgctattgcaacggagccggttcttagatatttaagtataattgtagaatggatttataaaaagatgaaaaaaaatgtccacgcatcatag

SEQ ID NO: 903 - DNA, 1410 bp, unclassified Eubacterium
atgagagaactaaaggtttacaaaaaaacagtcagtatagttaatgagacagcgatcggaatgtatgagaatgttgtaggtaaaaaaacaggttttctgcttgaaagttatgataaaaactatgacagatatactttttttggtgcacaaccggaggaaataataacgtctgaaaaaaacagccttgttataacaaaagatgatggcacaaaggagataagaaagggtaatcctttggagttattaaaagaatattatagtgattttaatataataaaagataatgaagaattaagcttttcaggtggtctggtaggaaatcttggatatgattttgtaaggtacgcagagaagcttccggataacaaccctgatgagataggaattgaaacgatccagcttatgcttatgacaaaatttcttcttgtcgatcatgtggcagaaactctgacagcgataattcttgaaaaaaatgacactgagggcgaaaaaagagcttatgaacttgctgatgaacttatacaaaaggcaagaagaactccaaaagaagtggaaagaaaaccacttatacatgatggaaaaatagtaaaacagtcagataatctttccgaatacagtagaaaagtagaaaaaataaaagaatacataaaagaaggacacgtttttcagactgttttatcacagagatggacagtggagacgaagcaggatggatttgatctgtataaggaattaagagaattgaatccttctccatacctttactattttaactatggagattttgaagtgataggaagttcgcctgagatgatcgtcaagaaacaggggaataaagtttgcacatgtccaatagcaggaacaagaaaaagaggtgctaataaggaagaagatgaaaagttaaaacaggaattactttcggatgaaaaggaacgtgccgagcatgtaatgcttgtagatctggcaagaaatgatatgggaaggatcagtgagtttggaacagtaaaggttacacagtttatggatgtagctaattactcacatgtaatgcatatcgtttcgcaggtggaaggaagaaaaaaaggagagttccatccgctggatctagtaaaatcgttccttccggccggaacattaagcggggcaccaaagataagggctatggaaattatcgatgaacttgaaagtgtaaggagaggtctgtacggcggtgcaacgggatatatcgatttttcgggagacatggatttttgtataacgatccgtacaatgatcaagaagaaaaataaggtatacctgcaggcaggggcagggatcgttgctgattcagtaccggaaaacgagtataacgaatgctgcaataaggttatggcacttgcaaaaacacttgttaaggaggataatttatga

SEQ ID NO: 904 - DNA, 942 bp, unclassified Eubacterium
atggtaaaatattacaggacagatgatagaaaaatacatgaagtagaaaacatgcagaatggtgtttggatacaaatggtaaacccctcggtgtcagaaggccagcttgtcgcagatgaacttaatgttgacatagaagatgtacttgcggcacttgatgaagaagagagctcacgtatagaattacaggatggatatacgcttattcttgtagatattccttcgatagaaaccaggcatgacaaggaatcctacacgacaatcccactgggcataattttgacagatgaggagatcattacagtatgtacagaggatacacctgttttacaggtctttttaaataatcgtgtaaaggaattcagcacaaaaaagaagcttcggtttgtgtatcagatcctatataggatttcagttttgtatcagaatgaccttcggatcatcgataaaatgaggactgagatcgaggaacgagtcggtgaggatacagaggaagacgatcttatcgcattacatgaattagagtcgacacttgtatactttgccacatcactcagggcgaacggggttgtgcttgaccgccttacaagatacaaaagacttgaacaatatccggaggataaggaacttcttggagatgtgatcgtcgaaaataagcaggctatcgagatgacaggaatatacagggatatcataaatggtacaagggagcttatgagtacggtcatagataacagactgaataacgtcatgaaatcccttacgataatcacgcttgttatggctattcctacagttgtatcaggaatctatgggatgaatgtaaatgcgaaatgggttccgtttgcaaacacagcgcatggatttactataatatgtggaatcataataatcatatgtatacttatccttattatgttaaagaaaaagagaatattataa

SEQ ID NO: 905 - DNA, 786 bp, unclassified Eubacterium
atggggacatggttattacctgtccccataaattcgatttataggagattaagagaggaagatatcatgagtactccaaaacatattgctattattctggatggcaatggacgatgggcaaaaagtaaagggatgccgagaaactatggacatacagtaggcgcaaaaaatgtcgaaaatatatgtaaagcggcggatgaactgggtgtaaaatatcttacgttatatgctttttcaacagaaaactggaaccgtcctgaatctgaagttaaagctcttatgaaattgcttgagagttatttaaaaaactgtataaaaacagcagacaagaataacatgagagtaagagttataggagaaataggaagactgtcagtggatttccaaaataaaataaaaaaactggaggaagcttccgctgtaaatacaggacttaatctgacaattgcgataaattatggaagccgggatgagatggttcgtgctgtcaaaaaaatgatgacggatcatgataatggaaaacttgatatagacaaagtggataacgatgtattttcatcatatcttgacacaaaagaactgcctgatccggatctgatgatcaggacaagtggtgaacaaaggttgtctaattacctgctgtggcagcttgcgtatgcagaattttatttcacggatgttccgtggccggcatttgataaagatgaacttaaaaaggcaatagatgcatataacaaaagagacagaaggtttggtgccttaaaagaggaggaacaggatgtttaa

SEQ ID NO: 906 - DNA, 1938 bp, unclassified Eubacterium
atgagcaatggttttttaccaatatcaaaagcggatatggaagagcagggtatagagcagcttgatttcgtatatgtaacgggagatgcatatgtggatcacccttcattcgggcatgcgatcatatcccggatattgcagtcacacggatatacagtcggtataattgcacagcctgactggaaggatgacaaatcaatttcaatacttggcgcaccacgtcttggatttttagttacagctggcaatatggattctatggtcaaccattattccgtgtcaaaaaaacgaagacaaaaagattcatttaccccgggcggtgaaatgggaaaacgtccggattatgccacagtagtatactgtaacttaatacgtcatacatacaaaacaactcctattataataggtggaatagaagcgagcttaagaagaatggctcactacgattactggtcaaacaaggtaaaacgctcaatacttcttgactccggagctgatctgatctcatatggaatgggcgagcgaagcatagtagagatagcggatgcacttgcatcggggatggatgtaaaagatattacttttatagacggaacagtttttaaaacaaaggacagagacataatatacgatgcgatcgaacttcctgattatgatgagataaaagcagataaaaaaacttttgcaaaaagcttttatacacagtactgcaataccgacccgttcagcggaaaacggctgtttgagccatatggtgggaaaactcttgtagtgcagaatcctccacagaaaccactttcacaggatgaaatggatgaggtttatgccctgccttatatgaggacttatcatccggtttacgaggcagccggcggtatccctgcaatctctgaagtgaagttttcacttataagcaacagaggctgttttggaggctgtaatttctgcgctcttacatttcaccagggtaggatcatacagacaagaagccatgaatccataatagatgaagcaaaacttattacacaggataaagatttcaagggatatatccatgatgtcggcggacctactgcaaatttcagggcacctgcctgcaaaaagcagcttacaaaaggagcctgtccgacgaaacagtgtcttttcccacagccttgtaaaaaccttattgttgatcacagcgactacatagagctgctccgcaagcttcgtacacttccaaaagttaaaaaagtatttatccgttcgggaatccgttttgattatctcatttatgataaggataaaacatttttacgcgaattatgtgaatatcatgtcagcggtcaattaaaggttgcccctgaacatatatcaaatgaagtgttaaacaagcttggaaagccaagtgttgaagtatataataaatttgtaaaagcatacaaggacatgaataaaaagataggaaaagagcagtatcttgttccataccttatgtcctcacatccgggttccaccttaaaagaagctatagagcttgctgaatatttaagggatttaggatatatgccggagcaggtacaggatttttatccgactccttcgacaatttcgacatgtatgtactatacaggacttgatcctgctactttaaagccggtttatgtcactacaaatccgcatgaaaaggctatgcagcgtgctctaatacagtatcgtaatcctaaaaactatgatcttgtacatgaagctcttgtaaaagcaggcaggacagatttgatcggatttgacaaaaaatgtcttatccgtccaagaaatataaatcatgctacaggctataaaggaaaatcaaaaagcagttctggttacgcagcggcacaaaataataataaaactgacaaatcagttagaaataacaagaaaaaaactataaggaatgttcataaaaagaaaagatga

SEQ ID NO: 907 - DNA, 1326 bp, unclassified Eubacterium
atgaaaacaaagaaagtattatcagtattacttgtagcagcaatgacaacagctatggtatgcggctgcggaagctcagacagtaagggagattcacagactgccaaggcaacagagtcagatctcgcaggaacatccatcacattcttaaacagtaaaggtgagatccaggaggctatggaagacctggcagcagaatttacagacgagacaggaatagatgttgaggttttagcatgtggtactggtgaggttccttatacaaaggttacaagtgcctataattcaggaaatgctcctacaatgtctatgctggatacaacagatgcacttgcacttgccgatgaatatgctcttgatctttcagatgaaaaatgggtttcagagtgtggggatcaggtaacaaaggttgatggtaaagtagtaagttatccattctgtgttgagggaagaggacttatcgtaaataaaaaagcaatagaagatacattgggaaaagagtttgatcctgattcgatcaattcatatgactccttgaagtcgcttcttgaagaacttaaggcagcaggaatggaaacacctgttgtaatttcaaaagaggactggtcgctcggagcacatcagcttggatatatatatgatacatatgacggaactaccgccggaagtgctgaagttatctcaaaacttgaagatggttcactcaaagctgaggattatcagaacttcaatgactttgtcgacacaatggatcttttacttgaatataacgtaaataaggctgatccacttggcgctatttatgaccaggatccaatttatcttgcagatggagacagtgcaatatgggcaaacggaacatgggcatggacaaatattgcagattcaggtgcagaaaatgatgatgattattgctttatcccatttgtactcggaaacgacacaaatgctgttgcaaatacaggaatgcaggcatctgcaacaaaacaggtaataattgataaggttcaggcaacagaagaccagcagaatgctgcaaaagagttcttaaactggatggtatacaacgagacagcacagaagatgcttgttgaagatgtaaagatcgtaccggctaatgccaacaataaagttgaaccggtcgatcctctttcaagagacatgaaatcaaagatggaagcaggaaagacatattcttcatgcttcgtagcaccttcagatcactggcaggtacttggcgcagcaatgcagaaatatattgcaggtgagagctcaaaagcagatcttgcaagtgcagttgatgcatactggcaggcacagaaataa

SEQ ID NO: 908 - DNA, 1524 bp, unclassified Eubacterium
atggcgcacagcctggcaacagattgtcaggcctgcgccagaacaatagcaggtgtattcctaaataaggagactaatatgaaaaaacttgaaaataaatgtatgctcatcacatattcggacagcatgggcagtaatcttaaagatttaaataatgtactcgataaacattttaaagatgccataggcggcgtacacattctgccgttttttccttcctcaggtgacagaggcttcgcccctatggattatcataaggtagacagagcattcggtgactggacggatatagaaaagcttgcggataaatattatctgatgtttgactatatgattaatcatatatcagcgcacagtgaatactataaggatttccttgaaaaaaaggataagtcacaatacgcagatctttttatacgttataaggatttctgggaaaacggggagccgacaccggaacaggttgatgcaatatacaaaagaaaaccccgtgcaccatatgtggatgcacatttcgcagatggcacaacagaaaaggtatggtgtacgtttgacgaggaacagatagatataaactgtaaatcagatacagcaaaagcttttataaaagataatctgacaacactctgcggacatggtgcagcaatgataaggcttgacgcatttgcatatgcaacaaagaaagccggaacaagttgcttttttatagagccggatgtatgggagttcctgaatgagtgtgaagaaatcgtaaagccttacggagtcacacttctgccggaaatccatgaacactatacaatgcaggaacgcattgcagaaaaggactattatgtgtatgattttgcacttccaatgttacttataaatgcattatactatggtcagacacagtatttaaaaaattggcttaatatatgcccgcgcaaacagtttacgacacttgacacacatgatggaataggtgttgtcgatgtaaaggatctacttccggatgaggagatcgacagaacaaaagaggatatctttaaattcggagctaatgtaaagaaaatttacaatacagcagcttataataatctagacatttatcaggtaaactgttcatattattcagcactcggggatgatgatgcatcatatctccttgcaagagcggtacagtttttcgcaccgggaatcccacaggtatattatgttggacttctggcaggaagaaatgaccttaagcttctcgaggagacaaaggtcggaaggaatataaacagacattattattcgattgaagaaattgacaatgaggtagaaagaccggttgtgaaaagtcttcttgcgcttatgaaattcagaaatgagcatccggcgtttgatggaggatttgaacttttagactgtgcagatgataagcttgtcatccttagaaaaaacggagatgagtgggcaaagcttaatgctgattttgccaaaaagacatttgaggtgatatatagtgaaaatggtggagaaaaaattcttaattactaa

SEQ ID NO: 909 - DNA, 1545 bp, unclassified Eubacterium
atgaagatgaaaaatgtattagaatggttagaaaaaacagtaaaagagtgcccggacaagacggcttttttggatactgatgataaaattacatttgcgaaggtatcagaaatcgcaaaaaaagagggcgcttatcttataagaaagcttggaataggacgtgagcctgttgcggttttcgcaggaagaaagatgataacacctgcatatttccttggggttgtgtatgcgggaagaccttatgcaccaatcgatgcatcacttccggacaaaagaatagaaaagatacttgaaaaccttatgccaagggcaatcgtagcggacagggaaagccttggacatgtcagggaaatagtcgcagaattgtcaaaagatgaaaactttgttgcaccggagattttcgtggcagaggaagtatgcagcacagatacagaaaataaagaggatgaagaactcttagctgctgtaagaaaacagatgtcgatgacagatccgctctatattatttatacatcaggatctacaggaaatcctaaaggagttatgacatcacatctttcccttatgacatatataaatgcatattgtggtgtgatgcagatagaaagagatgatgttcttggaaaccagtcaccgcttgattatattgcagcgataagggatatttatctgccgcttaaaaccggatgttccacagcgataattcctaaggaatattttatggagccgaatattttattcgactatatgaataataaaaatgtgacaagcgtaggatggagtgtatcggcatttactatactttcatcactcggagcattcgaggaggttaaacttaacagcttaagaaaaatatgcttttcaggatctgttatgccatgcaaaatactgaggatatggcaggaaaacctcaaaggagcgcattttgtgaaccagtacggaccgacagaggccacagcctcatgtacgtactattcagttgaccatctggtggatgatgatgaagtccttcctatcggacaggcttatgataactacagggttttccttataggagaagacggaaaagtgccacagaccggtgaacagggagagatatgcgtgtgcggtccggtgcttgcactcggctattataacgatccggagaggacaaatgcagcatttacattaaatcctctcaataaagcttatccggaaaggatgtacagaaccggagattatggtaaaatagataaagatggtgtgcttcatttttgcggacgcatggatagacagataaagcacatgggacacagagtcgagcttgatgaggtggaacatgcagcaaatgtagttgacggagtcgatgaaagctgtgtaatatataataagcaaaaagaagtgcttatgctgttcttttcgggagagtgtgaaaagagacagctggccatcgcactcagagaggaacttccgggatttatggttccaagaaaaatcaaaaaacttgaacagctcccgaaactccctaatggcaaatatgatatgaaaaaactggaggaaatgtaa

SEQ ID NO: 910 - DNA, 1227 bp, unclassified Eubacterium
atggaatttgaaagaatagacggcggcgtatgtgctgctaaaggatttgtggcaaacggacttaattgtggactgaatccggacaagaacaaaaacgatcttgctcttgtatactcacagacagaatgtcaggcagcagctgtatacactacaaacaaagtaaaaggcgcaccgataatagttacaaaggaaaaccttgcaaaatcaggcaataaggctaaggcagttattgcgaacagcaaaaacgcaaacacctgtaatgcagatggagttgaaaaagcacagatgatgtgtgagcttgccgcaaaagaactcgggatcgcggaggaagaggttatcgttgcatctacaggagttatcggacagccgtttcctattgaaccgataagggataatattaaagcgcttgccagcggactcagcgccgatggaaatgacaaagcagcaaatgcgatcatgactacagatactgtaaaaaaacaggtagctgtcagattcatgcttgatggtaaagagtgtactataggaggcatggcaaagggaagtggaatgatccatcctaatatggctacaacattaaatttcgtcacatcagatgtagcaatctctgcagaaatgatccagaaagcattgagtgagatcgttaaagttacatacaattgtttaagcgtggatggtgatacttcaacaaatgatatggtaagtatcatggcaaacggactggcaggaaataaagaaatcacaactgaaaatgatgattttgatattttcaaggctgctttatatgaagtacttatgaaccttacaaagatgcttgcaaaagacggagagggtgcatcaaagcttatcgaatgcacatgtaagggcgcagctgatcttgacacagccataatagttgcaaagagcgttatccgttcgccactgtttaagtgtgcaatgtttggtgaggatgccaactggggcaggatcctttgtgctataggatatgcggatgctgaatttgatatcgacaaggtggatgtcagcatttcatcaaaagcaggctgtgtaaacgtatgtaaaaacggctcaggaatagagttttctgaagatgaggctgccaagatacttcatgaagatgagatttacataaacatcgatttgaatcagggagatgcgcaggcaaaagcatggggctgtgatcttacatatgattatgtaaaaatcaatggcgattaccgttcataa

SEQ ID NO: 911 - DNA, 1116 bp, unclassified Eubacterium
gtgtttaggtgtgatatactgggtggcaggaataatatagaaaaaggagttatgaaaatgcagacaggaaaagcaatatcaattccgtctattttaaaagtcggagatggaacattaaataaaataggtgaatatttaaagaatgagggtctgtcacagacagttatttttttcggaaacggactgatagaattatttgggcagaccgtaattgattcattaaatgaaaacgaaataaagatattggaatatagcgagatagatacggtcgatgtagatgatataataacacttgctttttccataccgaataaggcaaaagccgttatatccatcggtgggggaaaagttattgatgccggaaaatatgcggcatttctcagaaatataccatttataagtgttccgacttcaagttcaagcgatggattttcaagcgcaagtgcatctcttgtcgtacacgggaagagaacgtcggttccggcgaagcttgcgcatggtataatagtagacacacagatcataaggacggctccggaaaaatttatatattccggcataggagatatgatttcaaagatcacagcgatatatgactggatctatgaagaaaaatgtgggtgtggagaagtaaatgattttgcggtgatgatcgcaaaaaaggctgtaaacagctttgtacgcacaccatatgaaagcataaaggatgaactgtttttaaaggaacttgttgactcacttgcaatgagtggtattgcaaatgaaattgccggaagcagtgcgcctacgagcggaagtgaacatttgatatcgcatgcgcttgacaaaatactagaggtaccacagctgcatggaatccaggtggggatcgcaacatacataatgagtaaggtgcataaccacagatatgtaagggtgcagactgtacttgccgatacgggattctttgaatatgcaaagacacttaaaatgacaaaaaaggacttttgtgatgcgatagatctggcaccacagataaaaccacacagacatacatttttgcatgaagagaaataccgcacaatggcaaagcagatagtaaacgaagacgaaatattaaaagacatacttttataa

SEQ ID NO: 912 - DNA, 1398 bp, unclassified Eubacterium
atggatgttattggtaataacatcgcaaacgttaatacagaagcatttaaatcttcttctgtgcgttttagtgaaatcatgtatcagacaacatcatctgcttcatctggaaatggtgcgacaggaattggtggagtcaatgcaaaacagataggtcttggtgttacaacaggagctacatctgtaagtatcacaaatggtggagctgcagaaactacaggtcttccgtttgaccttaggctttcggataaaaactccacaagtttttttgtggttagtgatggcacaaacagatattttacaagagccggagatttctatgtagatggaaacggatacttatgtatgagctctacaggctatactcttcagggatggcaggtagatgataagggtgttgtgttgaaagatacagtatccccgcttcaggttatggctacgaaaaacatgacatctgcaccggaagctacaacaaaaggaagagttacaggcgtattggataaaaatgatccgcaggcagctgatacaggaagaatcatcacgatgggatttttcgatgaccttggataccaatatacagcaaaattcaatatcaaaaaaacaaatacagatggtacatatacagtatcacttacagatataattgattcgagcggattaaacggaaagtctatatttgatctggacaatgatggaaaccttatcacaacgacaaatgctgatggctctatcaattattcatataacggacagccgatagcagttaatgatattttcgcaaatgcaacacttatctatgatcagagtgatggtacattcaaatcaatagacaatacaggagctgctaatcctggaagaactgtaaatcttaaccttgaggcattaaatacacctggaccgggtcaggcaaataacccaagtaagttcagaaatattgaagtagatttcggtgattctatgaactataacaataacaaaacatctacgatcggtggagatagcggtaatgccaagggagacggaaaaggaaaggctcttggagcgcttacaggaatatatgtcgacagtgatggaaaaatatatggttcatacgataatggtaatacagttttactttgtcagatttcagttgcacagtttgccaatgcatcaggacttgaaaaaataggcgacaactgttaccagacaacacttaactcaggtgagtttgatggtatcggagttgaaatttcagccgatggaagtgctataaattcaggacagcttgaaatgtcaaacgttgatctttcggcacagtttactgatatgatagtgacgcagagaggttttcaggcaaactcacgtgtaattactacatcagacacacttcttgaggaacttatcaatcttaagagataa

SEQ ID NO: 913 - DNA, 2655 bp, unclassified Eubacterium
atggcaatcagattatcaggaatggcttcaggccttgatacagattcaattgtacaggcacttgtatcatcttattcatacaagaaatccaaatacgaaaaagcccagacaaagcttggctggacacaggaagcatggaaatctttaaatacaaaagtatacagtctgtacagcaatgtatctaatctcagattctctacagcatacagtctgaagaaaacatctgtatcagacagcacaaaggcttctgtgaaggccggttcaagtgcgccgaatggaacacagacacttaagataacaaacactgcaaaagcaggatatcttacaggcgagcagatcaatgcatcaagctcaagcactacacttgcgcagcttggatatacaggcggtgatgcaaagatcaatgtaaacacaaaagatggcacaaagagcataacactcagcgctacatcaacaatgtctgatgttgagaaacagttaaaggaagctgggcttaatgcaagctatgactctacatataaacgtttctatatcagtgcaaaagataccggagcagataatgattttacacttaccggtgcaaacacaggtggtgcaacagcattatataagctcggaattgcagtaggaacatctacatcaaatccatacagccagtatgacagcttatatggaggctcagacgcagcaacacagcagaaaatagaaaacgctgttgctgcatataagagttcatcatctaatatagagaaatacactgcacagagtaacaatttgctcaatgccatcacatatggtacagcatatgctgatgtaaaggatttttacagctcattaagcggtacaaaaaccgaatcaggcgctgacatagacacagcaaaacttgagacgcttgcaaaacttggcagtggcagggattcagctataatcactaaaaattctgacggtacatatacgacatacagcaagacaacagcaaaagatgccgatggaaacactgtatacaaatcagaagacggaaaatatatttcagcagaagaacgctacacaaatggtggcaagacatataagaaaaactcagatggaacctatgtgaatgtcagcgatgaaaatgataaatacagcggtgacacggcagatcttacaaagacggtcacatacaaaaaggtttcagaatctaaatcatatgtatccggaagtgatgctgatacaaagacatacacaaaaaattcagatgatacgtatacctgtgacggaaagacatacacaaaacgtgatgatggaaaatattatgctgagggagaagcagcggactcaaaaaatggtgtaaccataacagaaaaggttgagtatacatcgtcgacagaaataagagatgcagaggcagcagctgatgcatataaagacattacaaagaatattgatgagaaagcactctctacatattcatcaaatctttcgacagtgacggcttttgaatcgacaaaagatacatcacttacaagcagtgataaatatacgatagcaggtcttacatccgatatacatgatgcatataataaaggcggcaaagacgctgtatctaatcttatagccggaaacggaacagattcggatgcatatgctgcaaaggtagctgctcttactacaagcatttcaagtgaacagacaaagcttgacgctaacaagcttgtaaaagaacttgcagccattaaggatacaacatccagtgagtatcagactgcacttaagaatatggtagagacagtaaactcagcacatgatctttcatctaatgctcagtacaatacaaaggcaaaaaaagtagatggagaggatgcagaaatctggcttaatggtgtccaatacaccggttcaagcagtacgtttacgataaataacctcacaatagatgctcttgccacaacaggaaatgatgagataagcataactacaagtacggacacgcagggaatctacgataaggtaaaggatttcctcacagaatacaataacatcataaacgagatgacaaagctctacaatgctgactcatctaaaggatatgatccacttacagatgatgaaaaggattcaatgtctgataaagaaatcgagaagtgggagacaaagatcaaagactcacttcttcgaaacgacacaacacttagtggtgttatgagcgcgatgactacagcgatgtcgcaggcagtcgagataaacggaaagaaatattcattatcaagcttcggaatacacacacttggatatctgaatgccgctgaaaacgagcagaatgcatatcatatcgatggtgatgaggatgacacaaatacatcaggaaatgctgataagcttatgaaagctatatcagaagatccggacacgataatgcagtttatgcagaatgttactacgaatctgtataatgctatcggtgataagatgaaatccaccacacttagttcggcattcactatctacaacgataagcagatggcaacacagtatacggattatacaaagcttatcaaagaatgggagacaaagatttcagataaagaggactactactataagaaattctcatcaatggaatctgcactcactaagctcaacagcacacagagttcattaagcggatatttctcataa

SEQ ID NO: 914 - DNA, 1602 bp, unclassified Eubacterium
atggaaacagtaaagtttgaagaattgaatcttaccccacagataatgagagctataaaggaaatcggatttgaggaggcaacccctatacaaagccaggcgatcccggctgtacttagtggctctgatgtaataggacaggcacagacaggaacaggaaagacggcatcgtttggaatcccgcttctcatgaaggttgacccacataataaaaagacacaggcgatcgttctttcacctacgagggagcttgctatacagtcagcagaagaaataagaaagtttgcaaaatatatgcatggtgtaaaagtgctctgcgtatatggaggacaggatatcggacgccagataaagtcgttaaagggcggtgcccagatcataatcggaacgccaggaaggataatggatcatctgcgcagacacacgataaaatgtgagtgtgttgatacgatagtccttgatgaggctgatgagatgctgaacatgggatttcgtgaggatattgagacaatccttgaatatattccaaacgaggatcaccagacagtgcttttttctgcaacaatgccaaagcctattcttgacataacaagaaagtatcagaaaaaagatgtaaagcatatcaaaataacaaagaaggagctgacagttccaaatatagagcagtactattatgatgtcagaagacatgataaaatagatgtactcacacgtcttttagaatattattcacctaaattatcagttgtgttctgtaatacaaaaagaatggtggatgaacttgcctcagaacttacaagccgtggatatcttgccgaggcacttcacggagatatgaagcagcagcagagagatcgtgtgatgaagaatttcagaaacggaaaaacggaaatccttattgcaacagatgttgcagcaagaggaatagatgtagacgatatcgaggcggtctttaactttgatatacctcaggacgatgagtattatgtccacaggataggacgtaccggacgtgccggaagatgtggaagggcattttcttttgtaaaaggaaaagaagtttacaaactaaaggatatcatgcggtactgcaagacaaaaatctatgcacagcctatcccttcaagagatgatgtggcatctataaaggctgaaaaggtactcgaagagattggaaatattatcgaaaacgagaatctgcgcgacatgatagaactcatagaacagcaggtaaatacatctgattacactgcaatggacattgcggcagcgtttttaaaacagtccatatcggggattgaattatccaaagaagacagggatatggacagtgcattcgatgaggatacgggtgcagaagagggcatggtacggcttttcatcaatataggaaagaagcagaaaataaaaccgggtgatattttaggcgctgtggcaggagaggcaaagataccgggtaaagttgtcggagcgatagatatgtacgataactatacatttgtcgaggtgccaaaagattacggaaaagacgtgctccgtgcaatgaagaatgtaaagatcaaaggaaaaagtgtaaacgtagaaccggctaacagacgatag

SEQ ID NO: 915 - DNA, 1812 bp, unclassified Eubacterium
atgttaggaggttttgctatgaaaaatctaaaggttagcgtaaaacttggactgattattgtttcagtagtaattatggttatagttgcaagcttaatgtctgtaaatgatatgaatcaggtgcaggataaggcattagaaactatggaaagcagttcaaggcagagttatgatgatctgataaagcagcaggttggtgtggctatatcacttttatcagatatcaacgatgagtataaggcaggaaaatatactctcgaagaggcaaagaccttagcagctgatgagataagacagctgagatatggggatgcaggatatttctggatcgatcagtctgatggaacaaacgtagtattacttggaagtgatacagaaggaacaaatcgtatggatacaaaggatgctgacggctatcagatggtaaaagagatcatacgtgtagctgttgaggatggtggaggatatacagattatgttttcccaaaagagggagagacagaagcttcacctaaacgttcatacagtgagtattttgaaccatttgactgggttgttggtacaggaaattatacagactacattgatgatgatattgcagcacaggacaaagaattctcatcttttgtaaaaaaagaggctgcatcgtttattggtttttcagtagttatagtaattctgcttgcagtacttatattatttatttcttctgatataataaaggctttaggaaatatttcagtagaaatcaataatatagccagtggagatttttcgaaaaaaatgccacataagctgctggacagaagagacgatttcggcagtctggctggtgttattgaagacatgcggcaatccgtaggaggacttctggctaaagttaagaacgaagccaaaaacatagatatcgttgttgaaaacatagatacaaatgtatcatcactcaatggtgagatagaggacgtttcagctactacgcagcagcttgcggcaagcacagaagagacagcggcatctgtagaacagataaatggaatgacgcagcagatagaagaagctgcaaaggaaatagccagcagggcacaggatggtgcacttgaggcagaagatatacacaagagagctgagaatacaaagaatactactgtagaaaacagacagaagatccagacaatgctgactgagatcagggaaagccttgagaaggcacttgatgatgccaaggttgttgaacagatcggagtgctggcagattctatccttactattactgcacagacaaacctgcttgcattgaatgcttcaatagaagcagccagagcaggagaggcaggaaaaggatttgccgtggttgcagaagaaataagaatgcttgcagaacagtcaaaagatgcagtggcaaatatacagagtgtaacagaaaacgtaaacgtagcagtcggaaaccttacaggagattcaaataagcttcttgatttcgttgatactgacatagtacaaagctttgacgaatttgaaaagatggcagacgattataatcttgatgcaacaaaagttaacgatcttgtatctgatttcagtgccacatcagaggaacttgtcgcatcaatatctaatataacagaggcaatcaatggtatttcatctgcctcaaatgacagtgcagcaggaactacaaacattgcacaaaagacagtgaccatagcaaatggttcatctgaggttatgaagagtgcgcaggatgcagaaaattcagcagcagaactcagaaagaatgtaaataactttaagattgatgagcaggctgaataa

SEQ ID NO: 916 - DNA, 1560 bp, unclassified Eubacterium
atgaataattggaagaatttaacgcttgccaaattatctgtttgggtatataatacaaacaaacgttcgatatatgcggaggaatgtaaaatgttatatacaatgaatgaggatataatggaaaagctaaagattttatcagatgccgccaaatatgacgttgcatgcacatcgagcggagttgacagggcaggcgatggaaaaagtcttggaaatgctgcggcaggcggaatatgccattcgtttacagcagatggcaggtgtatatcgcttttaaaaatacttttcacaaatgaatgtatctatgattgtaagtattgtattaataggtgcagtaatgatgtcagacgtgtaacatttacgccggaagaagtatgccgtcttacagtagagttttaccgtagaaactatatagaaggcctctttcttagttccggtataataaactctccggaatatactatgaaattgatatatgagacattatttttgcttagaaacaaatatcattttaatgggtacatacatattaaaggaattccgggaacatcatcagaactgttggagatgatcggctatttatgtgacaggatgagcgttaatcttgagctgcctacggcagagggattaaaaaagacagcaccaaataaagtaagaaaaaacatactcacacctatgcgttttatacaaaacggcataaaagacagcagggcttatcatggaaatacagacatgaaaaatcgtatgtatcttgatgaaaaatcctattatgatcagatagcagagatttctgacagcagaagcagacttattgaataccataaccggtttacacaaataaaatcgaataaggacattgctgacattacagcagccagtaaaagcagggcattgtcaattcaaagaccggacaggtattatgttccggcaggacagagtacccaaatgataataggagcaactgatgaaactgattatcagattgtatcggtggcagaagctttatatgaaaagtttgatatgaagagagtattttattctgcatttataaatgttaatcgggatgaatcattgccaggtttattttcaaaaccgcccttggcaagggaacacaggctttaccaggcagattttctgatgcggttttatggatttaaggctggggaactcttatctgaaaaaaatcagaattttagtgagtcaatagatccgaaatgccagtgggcagtgcagcatttggagaatttcccaatagaaataatgaaagctgattattatacacttttaagggtaccgggcataggcacaaagagtgccagaaggatactaaaagcgaggagacatgcagtacttgattttaatgacattaagagaatgggagttgtacttaaaagagctttgtatttcataacatgtaatggaaaaatgatgtacgacacaaaacttgaagaaggatatatcacaaggcatcttgtgtataatgaaagaccctctgttatgtatgcagaggaaaatcttgatgaaattacttatgaacagatgaatttatttgatatataa

SEQ ID NO: 917 - DNA, 2478 bp, unclassified Eubacterium
atgaacaaatggtcaagaatcaaattcactcctaatcttccacttggtgcaaacggtgaaagagttacaggaagcaaggctcacatcgagctttcaaaggaagctgccaaagaaggcatggttcttctcaaaaacgaaaacaacgtcctccctctttcagcgggttctaaggtagccctatttggaaagggtactttcgactatgtaaagggtggtggcggaagcggagatgtcaccgttgcatacacacgcaatctctacgagggactttccctgcaaaaagataaaatcagcatatttgaggagctgtgcgattactatcgcaaggacatcgaggagcagtacaaaaacggaaatgtgccgggtatgactatcgagccggatgttcctaatgagcttttacaaaaggctaaagcatacacagatactgctatcatcactatctgccgatattccggtgagggctgggacagaaagagtgtcatcgatcctaacaacaaggctctgtgggattatgagcgtaagatgacagaaaagtctgctgagattttcaaagatggcgatttctgcctttctgtcaaggaaaaagagatggttgatgctgtgaaaacaaatttcaaaaatgtaatcgtgattttaaatgtaggcggaatggttgacacatcatggtttgcttacgacccaaagatccagtcagcactccttgcacttcagggtggaatggaaggcggacttgcagccgcagagcttctggtaggagatggaaacccgtctggaaaaactgttgatacatttgcccgtacacttgatgactatccatctacacacaatttccatgagtcaagagattatgtagactatacagatgatatatacgttggataccgctattttgagacaattccgggtgccgcagaaaaggtagtatatccattcggatatggtctttcatatactacttttaatgtagagacagtatctgccggcatactgcagccatcacatacagcgaatagccagtctgctccacatgatgtcatctcccacacaggtactctctatgtcagggtacgtgtaacaaataccggcaagagagccggaaaagaggtcgttcaggtatatgtcgcaaagcctcagggaaaactcggcaaaccggcaaaagaacttgttgcttttgaaaagacaagagaactgctttcaggcgaatcccagattgtgactcttacatggagcataaatgacatggcatcatatgatgaccttggaaaaatccagaaatccgcttatgtcctcgaggccggctcctacgatatctatgtcggaacaagtgtacgtgacgtacaaaaggctgattactcatatatcttagatgaggacataataacagaacagctttctgcaaagctcgttcctacaagccttgccaagagaatgctctccgatggaagctttgaagaacttccacagagtgaacctgttgatacagacgcatctgttgtcggcaatattgatccaagcctcacagaaggtgttgcccctggtcagagagctattccttatttccgttttgcagatggtatggtcaaaaacggaaaatacgatataatggatgttgtcgaaaggcagatttcattagatgaatttatatctgagctttctgttgatgatctcattcaccttctcggaggacagccgaataccggagctgcaaacacttttggtatcggaaatatgcctgagtatggcatcccatcagttatgacagcagatggtcctgccggtgtccgtataaaccctgaggtcggtgtatgcacaacagcatttccttgttctaccctgcttgcatgcacatggaatcctgatatagttgaagctgtaggtcatgccggtggaaaggagcttaaggaaaacaaccttggactgtggcttaccccggcaataaatatacacagaagtcctctttgcggacgtaattttgaatactactcagaagacccatttgttaccggaaaactcgccggtgcaatggttcgcggaatccagtccaacaacgtaggtgcaacgctcaagcattttgccctcaataataaagagacaaaccgcaagaacagcgattcgagggtttctgaaagagctgcccgtgaaatttaccttaaagcttttgagatgataataaaagcagaaaatccatgggctgtaatgtcatcatataatataataaacggatacagagcttctgaaaacaaagatctgcttaccggaattctccgtgatgaatggggctacacaggaatggtaacaaccgactggtggacctgtggtgagcactataaggaaacaaaggccggaaatgatctgaaaatgggaaacggatatcctaaacgtgtaaaagaagcctacgaaaaaggtgctatttcccgcgacgaaatagaaatctgtgttaaaaggatactcaattttatattaaagcttgattaa

SEQ ID NO: 918 - DNA, 1074 bp, unclassified Eubacterium
atgaaaagaattggaatgttgacaagcggtggagactgtcaggctttaaacgctgcaatgagaggtgttgtaaagggacttcacaacaatatcgaagagcttgaaatctatggatttgaagatggatataagggtcttatatatggaaaatacagacttctgacatcagcggatttttcgggcatacttacaagaggtggaacaatacttggttcatcacgccagccgtttaagcttatgagagtgcctgatgaaaatggactcgacaaagtagaagcaatgaaatcaacatataaaaagcttaagcttgactgtcttgtcatacttggtggcaatggtacacaaaagacagcaaacctcttacgtgaagagggcttgaatgtcatccatttaccaaaaactatcgataatgatatatacggaacggatgttacattcggatttcagagtgcgataaacatagcaacagaggcgatagactgcatacacactacagctgcgtcacataacagagtatttatagttgaagttatgggacacaaagtgggctggcttacactctatgctggtgttgcaggaggcgcagatataattcttcttccggaaatcccatacgatttagataaagtcatagcagctatagcaaagcgcaatcatgatggaaaaggatttactattctggcagtggcagagggtgcaatttccaaagaagattcacagcttagtaaaaaagaatacaagcagaaacgcgcaaagagcaaatatccatcagtttcatatgagatagctgacaggatcagtgagaagcttggttcagaggtaagagttgctgttccgggacatacacaaaggggaggaagtccgtgtccttatgacagagtgctttgtacaagacttggttccgctgccgcaaaagcaataatagatgaggactatggatatatgattgccatgataaatggaaatacaaagagagttccacttgctgacgtggcaggaaaacttaaaatggtcgatccaaagagccagatgataaaagaggcaaaacgcacaggaatctgctttggagactaa

SEQ ID NO: 919 - DNA, 1299 bp, unclassified Eubacterium
atgtcagggaggaacatcatgagcgaaaataaagttacatataaggacatatttagacaatttgagtatatgaagatcataatatccgcaatcgtgaatagattcggcgattcgattgatgcgatcgcatccacgtggatcgtttacgaactgactggaagtgctgcatggtctgcgataatatttggaataaaccgtgtgcctacaatttttatcacaccgcttgcaggagcctgggttgagggaagaaataaaaaggctataatggtgtctacagattttatacgagctgcctgtgtggcatatgttgcgaccggatatctgctttcacttttgcagccatggatgcttatagttactacgttgatcatttctacggcagaggcattcaggggacaggcaaatatggcattgacaccaaaggtcttaaggaaagaatactttgagtatggactttcacttgaatctacattgtctagtgttgctgaacttatcggaacagcggcggcagcaggcataatagctgtcataggaacggcaggggcaatatatgtagatatggttacgtttatcatatcggcgcttatcatatcaacgataaacacaaacgaaaaaggacttataaaacagaaatttgataaaacagagtattttgagactttaaaggatggatttggatatgtaaaaagtgagaagatcattttatttttcctgatggtatgtgtatttttgaatgtgatccttattccgtttaacagtcttcaggcaccgctcgcaagtgaaatcttaggtggcggggcagaactgttatcattacttggaattaccgcaacagttggaatgttacttggatccattacataccccctagtgcagcagatgctgaagggaaagcttatactgtttatgggatgtatgggcatggctgcgttttatatcataattccaatagcaaagccattgtatatgaatagggcagttgtctacatttttaccggagtattgagtcttatcatgggatacacgatagcacttatgagtgcatatatgaatgtatttgccatgaaacagataaaggaagaatatcttgcacggatttccggcataaatacagcaatcggaattgctgcagtacctatggcatcgtttgtggtcagcgctcttgtagcatatgtagacacgggtgttatgtttgtagtttccggaatattggtgttattcataggtgttatcctgcttaataataagatgacagacacagaaacagaagaaatccggcaatcggaactcgcaggctaa

SEQ ID NO: 920 - DNA, 834 bp, unclassified Eubacterium
atgaaaaaaatattattttttgatgttgacggaactctcgtagattttggagcaagcaccatgtccaaaaatacttctgatgctcttattgcagcaaaaaaaaacggacataaaatatttttatgtaccggtagaagttataaccagatttatccttcgcttaaggctttcgattttgatgggactgtagcagcggcaggcggctatgttgtgacaggtggcaaagtcatcactcatcatgtttatggagctgataaaatgcaaaagatcattgatgccgttggcagcaataacacgggacttatcttccagaccaaagacggaagtatcacaaacaataagtgggctgacaaattcgtagacgcattttccggtcagtttgatatgactgttatccaggataacccaacttttaaagatataataatcgatgacgatctgaaaggctttgccactagatatcctgacgttgaaagtacgatctactgtaattgcgactatcatatagatgatctgcggaagatccttggaaatgattttgtcgttaccttaagcagctttaaagaacctgagccttacagcggtgagattactcttgcaggtgtaaacaaagcaaccggcatagcagatgtcgtaaatgctctcggtatgagtcaggaagataccataggatttggcgatggccagaatgactttgatatgctccgctactgcaatatcggtgttgccatgggaaatgcggctgacgaagtcaaggaatgtgccgatatggtcacagacgatataaaagccgacggactttccaatgccatgaaaagactgggacttatatag

SEQ ID NO: 921 - DNA, 1311 bp, unclassified Eubacterium
atgacagataatataagtacaagagaattgtcactccagatgctcatagagataaatgagaaaggacagttttcacatattgttttaaagggtgtacttgataaataccagtatctgccaaagaaagagagggcatttataacaagacttacagatggaacgatggaacatctgatagagcttgatcatataatagatctcttttcaaagacgaaaactaaaaagatgaaacctctgatcagaaacctgatgaggatgagcgtatatcagattaagtatatggattctgtgccagatgcggcagtatgcaatgaggcagttaagcttgcaaaaaaacataaattcggacagctgtcaggattcgtaaatggtgtgctcagaaatatcgcacgaaatataaatgatataaaatatcccgatgttaaaaaagaatttaacaaatatctgagcgtaagatattcaatgccggagtggatagtaagaaaatttataaaagactatggcaatgaaaaaacgcaggagatacttgctgcatttcaaagcggaaattctatctcaatacgtgtaaatacggcaaagtgcacaccttccgaactgaaggatatactatgtgatgaaggtgtatgcgtggaagaaatcgaagggcttgattatgcatttgttatatctggatttgattatttaaacagcctcgaatcattcagaaacgggttattctatgtgcaggatgtaagctcgatgatggttgccgaatatgctaaaccggagcatggtgatcatgttatagatgtctgtgcggcaccgggaggaaagagtacacatattgctgagctgcttaatggaagtggatttgttgaggcaagggatcttacagactataaggtatcgcttattgaagaaaacattaaacgacatggactgtcgaatatgggggcggtatgtatggatgcaacagtattcgatgaagcatctgtagaaaaagcagatatccttatatgtgatctgccatgttcaggtctaggtgtacttggcagaaaaaaggatatcagatacaaaatgacagaacagtcacttgatggactggcagagcttcagaaagaaatacttgatacagtgcatacatatgtaaggaaaggcaaaaagcttatatatagtacatgtacaatgaaccctgctgaaaatgaagaaaatgtcaggtggtttataaaccggtatccggagtttgaacttgaaacatcaaaacagatgtttccaaaagaaattggaaatgatggtttttttatagctgttcttaagagaaacgggagataa

SEQ ID NO: 922 - DNA, 1848 bp, unclassified Eubacterium
atgaaaataacaagtataataaaaaagcttccattttcagtcataatacttcttatagtaagcagcattctgctcatatcatcaaaaaacatgatcatgagccacgcaagctatcccagcgccacaagcattaccactgcatccgctgtcgtggaagctgccgatacatcagataccagcacttataatgatgaaataacacttccgcacaccttcagacacttagcatcccgcacccatgtcactgtgaccacaaatatatcactcaaggcagatgaccagatcctcctaaaaactgtttattcaccggcaaaggtctatctggatggtgatctcatatatgaatttggcaaagccgaaaactaccctgcatttatgaaggatcccgctaccgagctgtatatgataagcactgacggttataacggcgacacagagcttcgcatagagtacctgtcaccggtcaccagaagctctctgaccatatatccgcctatctgcggagcgtacaaatccttattttttaccttgttaaaaacttatgaatggtctttttttattgccctgcttgagcttgccgccggcatcttgtttatttttattgccctcctgctgttgtactatgacatggatgtatgcaaaatgatatttcattttggttttttctcactcatggtcggcatgtggtctatcggtgaatgtaattacaccggaatgataataaaaaatcctacttttctatatttatgtgcatttatcgggcttttttcacaaataattccgctattatatttctgcaaaagcgctgtcggctttaagaatccaaaaccgatcaccattgtgacagaaatcataaccatactcgatattcttgcatgtatattgcagctttgcggcatcatcgcattttcgcagagtatgtacgtgttccatgttattttaccggttacactgtgctttctcacagcatacataatctatgagtttgtccacaaccaaaataaccgggcaaagcggatcatgattcctgtcggcatactggcagccgcttcatgtgctgaaatcatcaattacctcacaaaaatcgtatcttcgctgtccttattgtcgcagatcgggactattatttttattgtgataatgggaaatatcatgggactgaatataagcgatatggttaagatgaaaaaggaaaatgagaagcttgtctttgacatgaatcttctcgaaaattctcttgccgaacaaaagaagcacaatgcaatgattgcaaaaaacgaagaaataactaaaaagcagcgccacgatctgcgccaccagcttattgttattaaagaactagctggaaacaacaatccatcactgacagaatatctggattcattgatccacagtatacctcatgtaccgaaaaaatactgtgaaaacaaggctgtcaattccattatatcccattatgctgccatctgcgcagatgaagccataatgcttgagacaaagcttaatgtcccagaaagcgataatccggttctcgacaatgacctgtgtctggtatttgggaatcttattgaaaatgccatagaggcctgcaggcgtctgaacaattccggctgctttatccgcctaaatgctgatatccgttacaagacgttaattataaccatggacaacagcttcgacgggcattttacagtacgcaacggaaaatacatctcttcaaaaagaaacgatgtcggtatcggattgtcatccatccgatctgttgctgtaaaatatggtggagagactgaatttaaaacaaaggatgatgtatttcaatcgtccttatacttccagctatataaataa

SEQ ID NO: 923 - DNA, 1845 bp, unclassified Eubacterium
atggtagaaagaagtgggcgggggcgcagagtttccgacaggaaaatggaagtacagatggagcttcttaaggttattgcagagcagaaccacgagaagctttttgagtataatgctgataccgataaggcatcgatctatatgataaaggatggcagttttgataaaactataatatatgatgatttttcatttaaaatcgaagaatatatgaaattctgcccgaatgaggacgttgagctttttaaagagaattttaaccggtgtgtcagaaaaccatcccatgctacatttgaaatgcgtctgaattataaaaggggcaggttagagtgggtgagggttttccttgccagtatagatgaaccggatgggaatgtaaaattcgttgccggaaggatcgcatctatacagaaagaaaaggatgcagagattgaaatacggcggaaagctgaaaatgatgcattgaccgggttatataaccatacaacatttgaagatctttgtgaaaagaaactccgggaatatgatggtgaagtgatctttgtcatgcttgatgttgacgattttaagatcataaacgatacattagggcataatgtaggggatcttgtattagggcagacaggatatgcactaaggcttgtcacacttgacagcggatatgccggaaggcttggcggggatgagtttgccattatggtctggggacttgactcacgcatgcagataaaagaattctgcagggagcttatagcaaacctcaaaaatataatatttgacatggaatattcggcatcaataggcatatccataagagatggaaggaatcttacatttaaggatatgtatttcgaagccgatcaggcagtgtactattcaaagaaaaatggaaaaaaccagatagtatgctttgatgaaatacctgatatagaagaaggcagaaagattgaaatagcagcatattccggacaggaaaaatttgtcagtgaatatgagcgctttgcgctaaatatatgtaatgaatatgcatttgtcataaatgtatcagaaaaaagagtggtatttgcaaatgaagctgcaaagggcggaagcaggcttgctatccagatatttgatgaatgtatatcacggtctgtaccagactcatttatcgatacgcttatagaaaactatgagtcaggcatgcaatattcaatatatttcggaggacagaatacatttctagacgaaatatataaaggatgcatgcttatgttaagagctgtttacgtgagtaaagaaaatatcatcaggttgtatgtgactaatctcaacgacaatatgcatttaaatcaggtaatgggaaaagaatcagaaatcataattggcgcaaaaaagtgtattgcgatcggtagaaaactcattgccggaaatactgatacagatgaaatatttaaagatagtttatctcttctttacagcttttataattgtgatgtggcggcacttctttataatacatctgatggttacagggtaagtgaggttcataatgataattcaaacactcttgcaaagcttttaaatgaatcggtaatatcggattcaataaaagagtttaaagcactatgcagcggggataatgaacatatccttattggcaatatacaaatgataaaagataagcatcctatattgtattctaagcttgtggatggccggatttcttcgcttgtatctttatgtataggcgattgtaaagatgatttgggaagaattattgtctttaatccaaaggataacgcacaggagctggctatactggagtttacagcaaaactgcttgctgaaaagctggctggatag

SEQ ID NO: 924 - DNA, 684 bp, unclassified Eubacterium
atgattaaacttgaacatgtcagcaaggcatattcagcaggtgtacctgctgttaatgatgtcaatctggaaattgacgatggagagtttgtttttatagttggcgatagtggttctggtaaatctactatcatcaagctgcttttaaaggagcttgagccgacagaaggtactattaccataaatgaaaaagtgttatcaaagataaaaagaaagcaggtgccgaaattcagaagaaatgttggtgttgtttttcaggatttcaggctgctcaaagacagaaatgtgtatgataatatagcatttgcacaaaaagttataggaaggtcaacagcacatataaagaaacgtgttccacagatgcttgctatggtcggtctggcagcgaaatacaaatcaaagccaagggagctttcaggtggagaacagcagagagtggcaatagcaagggctcttgtaaatgaaccgagtatactgcttgcagatgagcctacaggtaatctggataataataatgcatgggaaatcatgaaattacttgaagagataaatgaaaagggaactacagttatagttgtaacgcataatctcgagatagtaaaagttatgaaaaaacgggtgatcaccatcaaaaagggcgtaatagtaggagacagcaaggagggtggcgaaaatgacgcttaa

SEQ ID NO: 925 - DNA, 2313 bp, unclassified Eubacterium
gtggaagatataacgatagtaatgccggctattgccctccgtgggatgtcaataatgccgggaatgatcgctcattttgacataagcagggatcgttcactaaaagctgtagaagagtccatgcaggcagaccagaagatttttcttgtcacacagcgtgatgtggatgtagaagaaccgatgcagtctgatctgtatgagatgggaatagttgcagagataaaacaggttgtaaaattacaaaacgatgtggtgcgcatacttatagatggaaaaagcagggcaaagcttgtaggatttaccagatgtgaggacttccttgaggcagaaatctgcacatataatacagatcttgagggtgtcccttctgacgtcagggaagctatgcttgtgggagtcagggaatcttttgaaaagtatgcggccgttgtcggcaaagtgaataaagaattgttcaggcagattgaaaaatatgatgacatagaaaagcttatagattttgttacaaataatcttcctgtttcatacgcacaaaaacaaaaagtactgggaacagaggatatatgtgacagatacgaggtgatcgtcgcaattcttttaaagcagatcaatgttgcacagataaagaatgattttcagcaaaaagtaaagaaaaagattgataaacatcaaagagaatatcttcttcgtgaacagatgagtgtcataagggaggaactcggggaaaatgcagattcggaagcagatgaattccttaaaaagacagaaagcttaaatgctccggaagaagtaaggcagaagcttaaaaaagaaatcgaaagatacagaaatttaagcggaagttcttctgaaagtgttgtagcaagaggatacattgagacacttttagaactgccatggaatgatatgtcgacagacaatacagatcttgaccgtgcagaaaaaattttaaatgatgatcattacggactatctgatgtaaaagaaagagttctggaattcttatcagtaagaaatctgacaaataagggtgagagccctataatatgtcttgtgggaccacccggaacaggaaaaacaagtattgcacgttccatagcggcagcacttgaaaagaaatatgtccgtatatgccttggtggtgtaagggatgaggccgagataagaggacacagaaagacttatgtcggagcgatgccgggacgtatcataaatgcattaaagacagcaggaacagctaatccgcttattctgctcgatgagatagataaggtaagcagcgactacaaaggagatacttcggcagcacttcttgaagtgcttgatagtgaacagaacagccgtttcagggatcactatgtggaactgccggttgatctttcggaagttttatttattgccacagcaaactcagtatctgatattccaaagcctctgcttgaccgtatggagcttatagaggtatcaagctatactgaaaatgaaaagttccatatagcaaaggaacaccttgtcgagaaacaaaaagagaaaaacggactgaaaaaagaccagcttacaataacggatagtgcgctgcgtgacgtgatacgatattatacgagagaggccggagttagaggcttagagcgcactataggtaagatctgccgtaaagcagcaagacagatatatcagaaaaatgaagagagcataaagataaagaaaaacaatataaaagactatcttggaaatgtaaaatatatgcctgaaaagagaagcgataaggcagatatcggaattgtaagaggtcttgcatggaccagtgtaggtggtgttaccttagaggttgaggtaaatgtgcttccgggcaagggagaacttgcacttacagggaaaatgggcgatgtcatgaaagagtcagcacaggcgggacttagctatataagatctataagcgataaatatgatatcaagccggaattttacaaagaacatgatatacacatacatataccggagggggcagttccgaaggatggaccatcagccggtatcacaatggcgacagcgatgctttcagccataacaaagaaacctgtgagggcagatatagctatgacaggtgagatcactcttcgtggaagagttcttccaatcggaggattgaaggaaaagctgcttgcagcaaaaaatatcggaataaaaactgtctgtatcccaaaagacaacgaaaaagatcttgaggaaatctcaaatgagataacggacggaatggaaattatacctgtagataggtttgagcaggttgaaaaacaggcatttgccgtttaa

SEQ ID NO: 926 - DNA, 1272 bp, unclassified Eubacterium
atggttgatagttcgttacttggaaaatacataaaatcagataccacacaggtattggcgacgactgcaaaagaaaagaaaaagcaggcggaggatgatcttgataataccaataacaaaatcaatgacataaaagaccagaaggctacagttgacagcagcatcaagtcaaaatcagacgaactggatactgttcttgcagcacagaagaagctgcagacagatattgctgataaacagtcacagatagaggacaatatggtagagcttgattctgcaaagaagcagcagcaggaacagtatgatgcgatgaagcagagaatacagtttatgtatgagaacagttcagatgataatttatggactgcgataattgaagctgatggtatatcagatatgttaaaccgtattgagtatgtttcagatatttatacatctgacagggatcttcttgagtcataccagcaggccgtgcagcatgtgcaggaagttggagaccagctcaacaaggacatggaagatcttaatgatctgcaggatcagtacgaggcacagcagagtgagcttgaaacaaaaatagctgagttaaaagatacatcagatcagtatcagagccagctggcagaagcacagcagcaggctgaaaattacaagagtatcatcagcacacagggtgagatcataagacagcaggaagcagctgcggcagcagaagctgcaaggcaggcaagagaacagcaggaagcagctgacagggcagcagcacaggcggcagcgcaggcagcctcaaatgattcaagttcttcgaatgattcttcttcagacgattcatcaggcagctacgatggaggaggagccggagccggcggactcagtggggacaatgcagaccttacagaggacttaaacccttctacatcatcatctacttcaggaagtgatgtggtagcttatgcagagcagtttgtaggtggaagatatgtctggggtggaaacagccttacggacggagtagattgttcaggattcgtacatgaagtatatgaacattttggaatttctacacctagatattcacaggcattcaaaagtgtaggccaggctgtttcatttaacaatatccagccgggggatgtagtcgtttatccgggacatgttgcaatatatgccggaggtggaagaatcgttgaagcacagtctaccaaggcaggaattacagatggcagatcagtacagtgtcatacgatcctggcgatcaggcgtctgttataa

SEQ ID NO: 927 - DNA, 2595 bp, unclassified Eubacterium
atgaacagagaattacttaaaattacaattgatggcataaaaggaagaaaaaagataagcattttgtttgtaattatctttacggtatcgtttgcgtttggcattattacactttcgatcacgtcaagtatgaaccagacaaatgagcagtacaggatgaatacatatggggcatggagcggtgcggtgaagttttcagaggatgatccggtaaatgcttataacggaaaagtaattttgcctgaatgggcggaaaactatgggagtatcacgatatgtgcaaagctccagaccgacagcggagacgaatatatcggaacgatggatgaggcggtaaaagacgtaggaaaaatcgaaatggtcgatggacgtatgccgcaggggaatgatgaagtcgctatggaggcagatgtcttaagtgaacttggatatgattatacgctcggacagaagatctcgtttaatgtatcaggggaagttgagccgtctgaaacagaagaacctgtcaaggcggaatgtacatacacgcttgtcggcgtgataaaagagtatacaaaactttggaatataagcgatgataacggatatgaaccactgccatctgctgtcgtgtctgatgatggcggaatgaagcttatggattcattaaaagctggactggacgagcggctgaaggaatcgccggggcagatgatagagttaaaaccatttgataatatatggtttctatcaggcggggagctttatgattatgagaagattgcggcaaaacaaaaggactatgaggcatcacttaaaacattagaggctgatggttatgtagatgaatattggatgaatgatgcggcttttaagaacaaagatatgcttgaatataattatatatacacagcagtgatatttgtagtcatgttgtttgcaataatatgtatgtattctatctatatgcataggcagatacgccagacagcactttttagaagtatagggatcacaaaaaggcagcttggcgtgatgactttttacgaaaatatcgtgcttggcataccatcacttatatgcggagcggcgctcggagcagccggaacatggcttatacttagatttgcgctggctgagaatatagcagatgtaaaattatatattccgcataaacagcttcttgttatggcacttttgtggacagtcggaataatgatagcaagaatggcgataaatatagcagcgctccgtcagccgcttacagggaaaatgtatccggtgggaaaacgtgcaaagggcattatgattttaaagaaagccatgatattacagctttcggtactgctttgttttgttatgatatttgggatatttgaaagtctgtatccgtacagtcagatggagcattggaataatctgccgtcgtataagatatattcgggaaatttaactggaacggatgatatagagcagatagaaaatatggatagcagctttgaaaaacagcttacggctatacccggaataagatcaactgataagatggggatacttgaggcttatctgacatttgaggatatgtgggatgacggacttgcagtggatattttagcggggcaggacagtgcagatgacggaatacagataagcctttgtgtggtgcctgatgataaaatagatggtgctgatgttatcatgacttttccgacagatatggatggaaatatcacatacaacgataaaaaatatgggaaactggacgagtataccgatatattaggatcaaaaactgccatcgggataaaattaaaagggcagaagatacttacagataaattatccaatgcgtatgaggcacttaaagaacaaagacttaatatcgaaaaaataattgatataaagcagacggacaggcttcttgattccggaagtggagagttttatgagccatatacgatattatgttcacaaaaatacttaaagaacctgttaagcaaagtggaaccgggttatatgtgtagaacttatagaacaggtggtcaggatgaagaagaaaaggatagcggttataattttatggacgtatacacaaaacctgacgcaggatatctggcaacagactatgctgttgcggggcaatgccgcaggaacggattgcagcttataaacaatcgtgaaacctattacgcaaatgcacagcaatatatacaaaattttataatgcttttgtgcagcagtctttgtatagttatagttcttatacttataacgataaatataatcactttgcagatggaaaacgagaaaagaaaatatgagatacttaaaagcatcggaatgtcaaaccggcagataaaaaggaagatatcggcagaagcatttcttggcgcagttgtttcggctgtctttggctggggactatatcttttttaccttggaataaagagcgcaggaacactggagagattttcagacaagtttgtgtctaacctgtacggactgcgttcatatgggttaaatgctgtaacggcaggtatagttacggcggcagggatacttacagtatttatggtaagttttgtgataaggagaaagcaatggcagaaatcataa

SEQ ID NO: 928 - DNA, 1605 bp, unclassified Eubacterium
atgcctgtaaaatacgtgtttgtcactggtggagtagtatccggacttggaaaaggaattacagcagcgtcgctgggacgtcttttaaaagcacgcggatataaagtgacaatgcagaagtttgatccatacattaatattgacccgggaacaatgaatcctattcagcatggagaggtctttgtaactgacgatggagcagagacagatcttgatcttggacattatgagagatttattgatgaaagtcttacaaagaattcaaacgttacaaccggtaaggtttactggtcagtattacagaaggagcgccgtggtgattatggcggaggaacagtacaggtaattcctcatattacaaatgaaataaaaagcagattctacagggatttcacttcaaaagatacaactatcgcaataatagaagttggtggaacagtcggagatatcgagagccagcctttccttgaggcaataaggcagttccagcatgaagtgggacatgagaatgcaatactctgccatgtaacgcttattccatatattaaggcttcgggagaattaaagacgaaacctacacaggcaagtgttaaggaacttcagggaatgggaatacagccggatataatcgtatgtcgttcagagcatgagcttgatcaaggacttaaggataagatcgcactgttttgtaatgtgccaaattcccatgtactacagaatcttgatgttgaatatttatacgaggcacctctggcaatggaagcagagaatcttgcaaaagtggcatgtgagtgtctggaacttgactgtcctgaaccggatcttgctgactggaaacagatggttgatgatctgcgccatcctgacaaagaggttaaaatagcactcgttggaaaatatacggctcttcatgatgcatatatttctgtcgttgaggcattaaagcatggtggtattccggagcatgcaactgttgatataaactgggttgattcagaactattaaatgatgacaatgctgcagagatttttgatggaatccagggaataatcgttccaggtggatttggtgatcgtggagtagagggaatgatctctgctgcaaaatatgcaagagaaaacaatatcccatatcttggaatctgtcttggaatgcaggttgctattatagaatttgcccgtcatgtatgcagatttaatgacgcacacagtatagaactcgatcctaacactgcacatccggttatcgcattaatgcctgaccagaatggagtagaagatatcggaggaacactcagactgggttcatatccttgtgtacttgaaaaagactctaaagcatacgaaatgtacggaacagaaaatataaacgagcgtcatcgccatcgttatgaggtaaacaacgactatagagcagcgcttttagataacggaatgagactttgtggaacttcaccggatggtaggatcattgagatgatcgaacttccggatcatccttggtttatcgcaacacaggcacatcctgaacttaagtcgcgtccaaatcgtccacatccattattccatggatttatagaggctgctacaaagataaaacgataa

SEQ ID NO: 929 - DNA, 1074 bp, unclassified Eubacterium
atgttgaattttacagtaggaccggtaatgtcaagtgagaaggtttgtgaaataggcggcgagcaggtgccatatttcagaacacctgaattttcagatataatgttagaaaatgaacgcctgatgaagaaatttacaaaggccgacaaggacgcaagagttgtatttattacaggctcaggtacagcttcacttgaagcatgtgtagtcaatttctttacaccgcaggacaagctgcttgtagtcaatggcggaagcttcggacagagatttgttgatctgtgtgagctttatgaaatcccatatgacgcaataaatcttgagcatggtcattcattatcaaaagaaaaattatacgaatatgatggaaaaggctatacgggatttctggtcaacgttcatgaaacttctacaggagttcattatgacatagagatgatcagtgaattttgtaaaaagaacaatatatttttagttgttgatgccataagctcatttttagcagatgagtttgatatggaaaaactcggagcaggcgttatgatcacaggatcacagaaagcacttgcgtgtgcaccgggaatttcggtcatcgtattatcatcagatgcggtaaaacgtattgaaaacagtaatgtaaaatgcatgtatttaaaccttaaaaatgcattaaagaacggcgagagaggtcagactccattcacaccggcagtagggatcttaagacagataaatgccagacttaaagaaatagataaagcaggcggagttgagagcgagataaagcgtatcagtgagcttgcacaggatttcagggaaaagatcaaaggacttccatttgaaattgtttcagattcactttcgaatgctgttacaccgcttcatcctttaaatgcagatgcacataagatatttgagataataaaggatgagtatggaatgtgggtatgtccgaacggcggcgacatggcatcaacaatattccgtgtaggccatatcggggcacttacaaaggacgacaacactaaactcgtagacgcatttaaagatcttcaaaagagaggacttatctaa

SEQ ID NO: 930 - DNA, 1623 bp, unclassified Eubacterium
atgaaaaagagaacattagcaatcgttatgtcgcttacacttgcagccggaatgcttgcaggatgtggtgacgggaaaaaagaaaattcggagaatacgcaggtgagcaagtcagataaggcagaagtggatgatcagaaagctgctgacgaagttgcagatttaatcgatgcaatttatgtccaggagcgtaatgataaaactgatgagcagtgtaaagctgcaaaagaggcatgggacaagcttacagatgcccagaaggcactcgtagaaggaaataatgcagaccctgattattttggaagagatacaggtgatgcgtcaaaagatgatccgctcaatcaggatgatatcggagaaaatgaacttcttgttgtaagctttggaacatcatttaatgatagccgtgtggcagatatcagcggagttgagaaaaaacttcaggaatcttatcctgactggtcagtgcgcagagctttcacagcacagataataataaatcatgtacaggcaagagatgatgaaaagatagataatatggagcaggcacttgagcgtgcggtttcaaacggagtaaagaatcttgttgtacagcctacacaccttatgcatggtgcagagtatgatgaacttgtagatgtagtaaataactacaaagataaattcgagacagttacagttgcagagcctcttctcggtgaagttggaagcgatgcgacagctgtaaatgatgataagaagaatgttgccgaggcgatcacagcggaggcagtaaagacagccggatatgattcacttgatgcagcaaaagaagatggaacagcattcgtattcatgggacatggaacatcacattcagcaaaggtaagctacagccagatggctgcacagatgtcagagcttggttacgaaaacgtatttatcggaactgttgagggtgagccagaggaaactgcatgtgagaatgttataaataacgtaaaagaagcaggctacaaaaaagttgtccttcgtccactcatggtagtagcaggagatcatgcgaacaatgacatggcaggtgatgatgaggattcatggaagagccagtttgaagccagcggtgcattcgataaaatcgatacacagatagccggccttggagaaattgatgcgatccagcagatatatgtagatcacacaaaggcagcaatcgaatcacttggagattcagtaagtacttctgcaacagcagaagcatcagatgcgtcatcacttacagatggaacttacagcgttgcatttaatacagacagcagcatgtttcatgtaaacgaagcaaataatggacgcggagtgcttacagtaaaagacggaaaaatgacgatccacataagtcttgtttcaaaaaagatcgttaatctttttgcaggaacagcagcagatgcggcaaaagatggtgcagcagtacttgaaccgacaacagataaggttacatacgaagatggaacagtcgaagaagtttacgggtttgatgtacctgtagagtcattagataaagaattcgatcttgcgatccttggaacaaaaggtgagtggtatgatcataaagtaagtgtatctgatccacaggcacagaattag

SEQ ID NO: 931 - DNA, 1269 bp, unclassified Eubacterium
atgactattaataaatttcaagggacgacaaaagaagaggcaattgaaaaagcaaaggaacagatgggaaatgatgttgtcataatgaatgtaaaggaaataaagccaaaaggtttttttaaggtgtttaaatcatcaacatttgaagtgactgcatctgtagaagaaaaggagtcatcattttcacaaatgatggataagggaactatggttaaaagcaatattgactataaggcagatgaaaagatttctattccacctatatcaaaaaatgcttcgggagattttgataagcctgttcaaaaaaaagaggatactatgatccgaaaagaaaaaatactttcagagaatgataagaagcttgaagagagactggataatctttcaaatatcctcgaagaaaagcttggtgtcccaaaagctgaaccaacagaacaggcacgttcatatcagggaaaaggacatggtggtgaagaacttaaatttgtaaggatattatacaatacacttataaataacgaagttaacgaaagatatatcaaccagatcttagaagaaatagagagatttttaagacctggaaatagtgtagatacaattttatcaaatgtgtaccaaaagcttattttaaggtttggacagccgaatacgatcgatctgtccggtgcaaagccaaaagttgttttctttgtaggaccgacaggtgtgggtaagacaacaacaatagctaaaattgcatcaaagtataaggttgattatgagagaaaggtagcttttattacagctgatacatacagaatagctgcgacagaacagttaagggtttatgcaaacatactggatgctcctatgtcaattgtatattctaaagaagaattaaatgccgcaatagagaaactttcggactatgatatcgtatttgttgatacagctggattttcacataaaaatgcagcgcaatgcgaggaaatgaaaaagcttatagatggtgttgatgaagtattcgaaaaagaaacatatcttgttttaagcgcaacgacaaaatataaggatcttgtcgatattgttaacatttataatgacatagcaaaatacaaaattatttttacaaagcttgatgagacgacaacttatggaaatttattaaacattaaattatattcaggagcagatctgtcttatactacaaatggtcaaaacgttccagatgatatcgaactgtttgatacacaaaagatcgtcaaacagcttttaggaggaactaagtga

SEQ ID NO: 932 - DNA, 1758 bp, unclassified Eubacterium
atgaagaaaagagggatgagattgaaaaaaataacttcatacatacgtgattactggtattactatgtatttatcctggtgtgtatgtttattgcaataggactggatatgctatatccgcagataacgaaaataatagttaatgatatttttgtagggcaggattatgaaagactaccgatgctgcttgtggctatagtattgatcggagcgggcaggagtatatttggatatctaaaagaatttacggcagataagaccggtgcaagaatcggagccgagatgagaaaggaactgtttgctcacattcagggactttcaatggattatttcggtcaaacaaacaccggagaacttatggcgagggtaaaggatgatatagaccatgtgtggcttgcgatcgggtttatcggaacatttacgattgaagttgcagttcatgttgtgagcgtgctttattgtatgtttaatctgaactggaagcttacgtttctgccgctgatatgcatgactatatgtggtattgttgcaatcgtgcttgagaaaaagcttgataaggtttatgaagcgataagcgaagaaaatgctgaacttacaacgatagccgaggaaaatcttgccggtgtaagaactgtaaaggcatttgcaagggaaaaatttgaaatttcaaagtttctttcacataacaaaaggtactatgaccttaatatgtcagaagccaaaacgatggtaaaatatgatcctgtatttaatttcatgggagttcttcttccgataatgtgtactgtacttggtgggatttctgtaatgaaagggcagatggatataggatcacttgcagcatatgtcgagtacagcagaaactgcacatggccggttgaagcacttggctggcttgtaaacagtatttcatctgcagttgcatcacgaaagaagataagaaagatctttgaacagaaatcgtcaattgtggaaaaagcagagcctgttgttcttgactgtgtaaaaggaaatatagaattttcaaatgtgtcatttgatatcggaacaacaaacatattaagcgatataaatttttctgtggagcaggggaaaacactagggataatgggcgctactggttcgggaaaatcttcggtgataaatctgcttgaaagattttatgatactacagaaggaactgtaaaaattgatggtgtggatgtaaaggatctttcactttcacagataagggaaaatatttcggtagtaatgcaggatgtatttttgttctccgattctataaaagaaaacatcaagatgggaaaacgtgatgtacttgaatttgaaggggtaaaagaagctgcaaagaaagcaaaggcaagcggttttatcgaagatatggaaatggaatatgacactgttataggtgaaagaggcgttggtctatccggtggacagaagcagagaataagcatagcaagggccttgtcaaagaaatctcctatacttgtgcttgatgattcgacatcagcactcgacatggaaacagagcatgagatacagatcatgctcaacgaactgaaagatacaactaagataataattgcacatagaatatctgcggtaaggcatgcagatgagataatttacctcgaaaacggcaggattgtcgagagaggaacacatgaaaaactgcttgcacaaaaaggagcatactacaatacttatcgtgcgcagtatggtgcagtgcttgatgcaaaaaatgaaattgcataa

SEQ ID NO: 933 - DNA, 1467 bp, unclassified Eubacterium
atggagaaaaagatgaatttacctatagaatttgaaaaaaaaatgaaagatttcctcggggatgagtgggaggatttcctgtacagttatgataataaccgtttccaggcgctgcggtttaacactcttaaagttggaaaagataaaggcattgaacaagaaattgccggaataatggataaacttggcatacctatggacaaaaaagttacgtgggcggacaacgcatattattatgatgaggataagcgtcccggaaaacacccatatcatgagatgggactttattatatacaagagccgagtgcgatgtcggcagcagctcttttatcaccaaagcccggcatgagggttcttgatctttgtgcagcaccgggaggaaagagtacgcagctttctacatatttaggtgatagaggacttcttgtatcaaacgagataaacacgcaaagaagcaggatcttatcgcagaacatagagcgcatgggaataaaaaatgcgatcgtgacgaatgaggacagctttacacttacggcacattttccgaattttttccatgcgatacaggtggatgcgccgtgctccggtgaggggatgtttagaaagcttcctgaggctgtaaacgagtggagccctgaaaatgttgcaatatgtgccacacgccagaaggagatacttgacaatgcggcagccatgcttaaagccggtggaacgattgtctatagcacctgtacattctcaaaagaagaaaatgaagatgtaatagagtattttttgaatgagcatcctgattttacagttgaaaagatggagcgcttctggccacataagcaggatggggaaggacactttgttgcaaagctcgtaaggcggggagaacttctgttagatgaagatgcttatccacaggaaaaatcagatgttttgtcagaagatataacgggaaaaagaaagccatcaggtaaatgcgcaggtaagaaaaataaaagatcaaccgtcaaagaggcagggggaatttccaaagataatatggaattattaaatgagtttcttgatatgacactgacagatgatatggctgactggataagaaatggaaaacttatgatgtttggtgagcagctttaccgcctgcctgacatacaggtggacttaaaagggcttaaggtacagcgtgcgggacttcatataggagaattcaaaaagaaccggtttgaaccatcacactcgcttgcgctggctttaaagagcaatgaggcaaaaaatattgttgatcttgatattgatgacagccgaacctctggattctttaatggacagtcagttactcttggtgaagatcagacacaaaagtgcaaaaagggttggaccttggtatgcgtggatggatattcggcaggatggggaaaagtaagtggcatacaggtaaaaaatcattatccaaaggggcttagaaataaaatataa

SEQ ID NO: 934 - DNA, 1869 bp, unclassified Eubacterium
atggaaaagacatttaatatacaggaagaattaaaaaaactcccggatcaaccgggagtttatattatgcatgacaaaactgatgcgattatatatataggcaaagctaaaagccttactaagagagtgcaccagtattttcagccgagccatgatgagggaatcaagaaaagacagatggtagagcatatcgagtattttgaatatatcattaccgattctgaacttgaagctcttgttctggaatgtaatcttatcaaggaacattgtccaaagtataatacgatgctgcgtgatgataagacttatccgtatataaaagtgactgttggtgagacatttccgcgtgtaatgttctcaagacagatgaaaaaggatagatcgagatactttggtccttatacaagtgcaggggcggttaaagacacgatagaccttataaataaaatatatggtcttaggacctgcaacagaaaactgccccgggatatcggacttgacagggcgtgtcttaattatcatatccataagtgtgatgcgccatgtcagggatatataacaccggaggaatataacaataaggtaagcggtgtgcttgaatttttgaatggaaattatacaccggttataaaaatgcttacggaaaagatggagcaggcatctgaagaacttgagtttgaaaaggcagcggaatacaggaatcttctatcaagtgttaaacaggtggcacagaaacagaaaataactaatgcggatggagaggataaagatataatcgcccttgccaatgatgacacagatgcagttgttcaggtattttttatacgaggcggaaagcttatcggaagagatcatttccatgtccgtgtcggaaccgaacagtcggaagataatatactgaataactttgtaaaacagttttattcaggaacaccttttatcccaagagagataatgcttcaaaaaaagatagaggatatggaaatccttgaacaatggctttcggaaaagagggggagaaaggttatcataaaggttccacaaaaaggaatgaaggaaaaactagtggagcttgcaaagaaaaatgcacttcttgtgttaagtcaggataaggaacgcataaagagagaagaaggcagaacgatcggagcggtaaaggaaatagaaaagctgcttggccttagcaatttaaacagaatggaagcatttgatatatcaaatattaatggttttgagacggttggctcgatgatcgtatatgaaaagggaaagcctaaaagaagtgattacagaaaatttaaattaaagactatcacaggaccggatgattacggatcaatgcatgaggtacttacaagaagattcgtgcacggaatagatgaaaagaaacagctttccgaaaagaatcttccggatgaggtgggaagcttcaacagattcccggatgtaataatgatggatggtggaaaaggacaggttaatgtgtgtcttgaggttttatcggagcttggattgtcaataccggtctgcggtatggtgaaggatgatttccacaggacaagaggcctttatttcaacaatgaagaaataccgatcgacagacatggtgaaggatttaagcttatcacaaggatccaggatgaggctcatagatttgccatagaatatcaccgctcattaagatcaaaaagccaggtacactctgtactggatgatatcgatggaataggaccggcaagaagaaaggctcttatgagaagataccagtccatagagaaaataaaagatgcatctatggaggatcttgctatgacagaatcaatgaatgaggcagcggcagctgcggtatataaattttttcacccataa

SEQ ID NO: 935 - DNA, 1263 bp, unclassified Eubacterium
atgaagaatctgcatattttacaacaggaatctgtggatgaaggaaaattacaggtacggatcagacaaaaaaatttaggaacacctgtaagcggagcttctgtaaggatcagtttttcaggagatccagatggaaatatagaggaggctggcacagatgaatctggaaactcgcagatggtcacagttaaaaccccaccacttgagtactctatggagccgaatgaagcccagccatattcagaagttactgttacggtatcggcgcagggctatagagagattacggtctcaggagtagaggtacttccaaatgaaacttcaatacaggaaatagagctggaggctcttgatgctccggggaatccgatagataatattgtgatcccggctcatacactctatggggattacccggcaaaaattcccgaggcagaggttaagtctgtaaacgataccggtgagatcgtattaagccgtgtagtcattccggaatttgttatagtacacgatggagttcctactgatccaacagcaaaaaattattatatcagatatagggattatataaaaaatgtcgcatcaagcgaaatttatgctacatggccggatgctgctatcagagctaatgttcttgcaataatgtcttttacgctgaaccgtatttatacggaatggtatcgggggaaaggttacaacttcaatataacgtcatccacagcttacgatcacaaatttatatacggaagaaatatatacacgaacatatcaaaaattgtaaacgaaatgtttgaaaactatctttcgcggcctaatgtaacacaaccgatacttacacagtattgtgatggacagaaggtatcatgtccaacgtggatgacccaatgggggtcaaagaatcttggagatcagggttacagtcctatcgaaatcttaagacacttctacggaagcaatatgtatataaatgtagcggagggcatatcgggaattccggcatcgtggccaggatatgatcttacagtaggatcacgcggaaataaagtataccagatgcagcagcagctggcacgtatagcaaaatcatatccggcaattccagcgatcgtaccggatgggatatacggaaataaaacgaaggaagctgttgaaaaatttcaatcagtttttggtcttccggttacgggaattgtggattataatacatggtatgaaatatcaaatatttatgtggcagtcacaaggattgctgagcttatgtaa

SEQ ID NO: 936 - DNA, 1506 bp, unclassified Eubacterium
ttggcagaaggttttaacattttattggaggtttttatggctgacacaagagaggatttcgagaaacaggctgatgaatactatgaggaagcaagagagtgttttgatgatataaaagtatcacaggctgcgggtttactgcacaatgcggtaagcatgtacaaaaaggctgaatgtcaggaaaaagtggcaaacagtcttaatatgctgggtgttgtatatgctgctttgggcgatagcgggatgtctatggattgttatatagaagcactggatattgcattggaaaatggatacagtgatataatcatgcttttatataacaatataggctctaaatatcaggaaataggcagacacgataaagctattgtgtattttaaaaagtcgatcctggaactgaaaaaactcatagtacgtgaaaagaagtcatactacagatggcttttattctcaaatcttaacttatgtatttcttacaccggaatgggagaatatgatctggcagaaaagtatttaaatgaggcacttgcttacagcgagatcgaaaaagaccaagatagcatcttttttattgatatagcacaggcacagcttttctgggatatggggcgtgaggatgaagtgcggcagcatgtagatgagcttgttgaaggagcacttgcacatgtaggggtatcggactatgtgcttgaaataaaaaacctgtgcaatcttttcatggagatgggagaattcgatgcatgggctatggttgtatccagctttgagcgcaatatatcaacaatgggaaatatatattaccggatttcctgtgtagaaatgtggatgaaatattaccgtgcgatcggagaagtggataaatacaacgaactttgcatacaatatgtcaatctgcatatcgaacaggaaaattaccagacagagcgtatgtgcgagatgatagacttaaagcttgaacttcaggaaaaagagtttgaaaacaagaaagttatgtctgcagctaatactgacaggttgacaggttttggaaacagatatatgatgctggatgattttgaaaatgcgtttccgcaatgtacgcagaatggtggccttactataggtatagttgatattgatttctttaaagcattcaataaaaccaatggaaggatgacaagtgatgatgccataaaaatcatttcagatgcaataagaaacagcatagatggagtagggcagggttatagatttaacggagatgaattctatctgatattgaaaaataccgacaaaacacagataaaagctattgcggacaggataagtgagacagtaaagaaaaagaagatcataaatccgggttcgaaaatagataaatatcttacagtttcgcaggcttatataatagctgaggatcttgctgtgccagatgaatacggaagggtattcaacaaggttgacacagcacttgacagtgtaaaagaaaacggaagaaacgcatatataatcggtacatattaa

SEQ ID NO: 937 - DNA, 744 bp, unclassified Eubacterium
atggcagacgaactaaaaacgaaagtatgggcgcacagaggtgcatcaggatatgtgccggagaacacgctggaagcatttttgaaagcagcagagatgggagcggatggaatagagcttgatgtgcagcttacaaaagatgatgaaatggtagtgatacatgatgaaaccattgacagggtaagcggtgagagcggatttgtaaaagatttcactttgaaagaattgaaggcgcttgatgtatcaaagcatatgaaagaatatgacaagaaaacaacgataccaacacttgaagaagtgttcgagtgcttaaaagacacaaatatgatgataaatatcgaactgaaaaacggcgtgatattttacaaaaatcttgaggaaaaggttataaatctaatagataagtataaaatgatggatcggatatggtgctcatcatttaatcatgagtctatagtcagggtaaaaaagttatgtcctgatatgaaatgtgggctgctgttttctgacatagttgtaaatcctgcggaatatgctcataaccttcatgtggaggctcttcatccggcagtatatcatatgcaggatgaaaaatatatcgaaaaggcgcatggcagggatctcgaaacgcatatatggactgtaaatgataagaaatacatgaagaaacttgtaaaggccggggcagatgcaattatcacgaattatcctgatattgcgatcggggtagtgaaaaaaatataa

SEQ ID NO: 938 - DNA, 657 bp, unclassified Eubacterium
atggctgataagggtaaattagttgtattttctggattttcaggcgcaggaaaaggaacgataatgaaagaacttatgaaaaagttcggatcagattatgcattatccatttctgcaactacaagaaatccaagaccgggtgaagagcatggcagggaatatttctttgtcacaacagacgaatttgaagatatgatacaaaagggtgcgctgctcgaatatgcaaaatatgtaagcaattattatggaacgccaagatcatatgtagaagaacagttaaatgccggaaaaaatgttatacttgagattgaaatacagggagcattgaaaataaaacaaaggtttccggatacacttttgatgtttgtatgtgcgccaagtgcagatgaactgaaaaaccgtctaataggaagaggcacagagagtgaggatgtatgcaggcagcgtcttagcagggcatatgaggaatcgctcggaatagaaaattatgattatttagtggttaacgatgagatagataaatgtgtagaacttgtggatgacatcataaaaaatgatggattaagcaacaaaaacgataatcatcgtatatcatcaaatatagattttataaaagaaatgaaaaatgagcttttaagcttttcgaaaggagaataa

SEQ ID NO: 939 - DNA, 1212 bp, unclassified Eubacterium
atggctaaagagctagttgcaatgcttcttgctggcggacagggctcacgtttatacgcattgacacagaaactggcaaaaccggcagtaccattcggaggaaagtacaggataatagattttccactttctaattgtgtaaattccggaattgatacagtgggaattctgacacagtatcagccatttattctcaatgaatatataggtaacggacaaccttgggatctcgatagaatatacggaggggtgcatgttcttccaccatatcagaaagcatcaggttcagactggtataaaggaacagcaaatgcgatataccagaatattgcatttatcgaaagatatgatccggagtatgttattattttatcaggagaccagatctgcaagcaggactatagtgatttcttacgcttccacaaggagaaaaatgcagaattttctgttgctgttatggaagtcccatgggatgaggcatcacgttttggacttatggtagcagatgatgatgacaagatcacagaatttcaggaaaaaccgaaaaatccaaaatctaatctggcatctatgggtatatacatatttaattgggatatacttaaaaaatatcttattgaagatgaagcagatccggactcagagaatgactttggtaacaatataattccgaaccttttaaaagatggcagaagaatgtatgcatatcatttttctggatactggaaggatgttggaactattccttcattatgggaagcaaatatggaggtactcgatccggaacacagtggaatcaatctttttgatgagaactggaaaatatacagcagaaacagcggacatacaggccattttataggagaacacgcacaggtcaaagactcaatgataactgatggatgtgtgataaagggaaatgttgatcattccgtattattcagcggagtggttgttgaggaaggcgcatgtgtagaggatgctgttgtcatggggaacacagtgatcaaaagaggcgcaaaagttatgcattgtatcgttgccgagaatgcagtgataggtcaggatgctgttgtcggaatgaaatctgaagatggcaaaacaggagacgtagctactatcgcaccatatgtgactataggtgaccgcgcagtgatcggaccaaaggcaatggtctataatgatgtagaggagggacaggagcaatgttaa

SEQ ID NO: 940 - DNA, 1245 bp, unclassified Eubacterium
atggcaaattctgaagatagaaaaagatttataacgtttgcgattatttatacatgtatatgtgcggcagtcatttcggtggctgtcttttttcagtacagggcatatacaaaaaattataatttgaccgctgccaggatctgtgcccttgtacaggaaaaatatccgtatgtcacaggcagcagcatagcagaaattttaaatgataatgtatcagaaaaatatgatgataacggaaaagaattcatgcaaaagtatgggatagatatggagtctgattcagtgatcatggaaaacgacaaagaaatgaaaagatttataactatagatatagttgctgtagtatttatgtcagccggttttttggggtacatttttagtcagcgcagatattatgaaaaccagataagccatatgaccgcctgcttaaggaggataaatgagggcagttacatgcttaagatggacgacagcaaggagggggcagtttccatacttaaaagtgaattatataaaacagcggtaatgatgcgtgaggcggcagaaaatgaaaaagcagacaagataatgcttaaagattccctttctgatatttcacatcaattaaaaactccgcttacatcactttcaataaatcttgaaaatttagaagacaatccggatatggatgaggctttaaaaaacaggatactgcgcagggcaaagcatgatgtcgtaaatatttcacacatggtttcggcaatccttaaactgtcaaggcttgaagcggatgttgtcgagttcaatgaaaaagaaacaaagctttctgacataacagaaagcgcagcggacagagtgacggcactttgtgatcttaaagatataagtcttaagatcaaaaaagacagcgacagaaatgcagtggtttattgtgacagttactggcagacagaggcggttacaaacatagttaaaaatgcagttgagcatgcagcaaaaaacgtggcaataggatattatagttatgaaatgtatgatgagatcgttgtcgaaaatgatggcagggcgataagcgatgaggataagaaaaatatatttaagcgcttttacagggggcaggactttgctgcagacagcgtagggataggattatcacttgccgagtcgataataagacatgataatggatatgtaatggttgatgatctatttaatgaaaaaaaagaatgcgaaggaacacgctttgtggtaagatatttaagatag

SEQ ID NO: 941 - DNA, 801 bp, unclassified Eubacterium
ttgttacaatatgctggtgcaaaaatcagtcaaaaagtgaggctttcatatatggatatgacgattaaactgcaggtctttgaaggtcctttggatctgctgttatatttaatcgaaaagaataaagttaatatatatgatattccaatagtggaaataaccagccagtatatggaatatgtagcagagatgaaacgcagggatcttgatgtccttagtgagtttttagtgatggcagctacacttattgacataaaatccaaaatgcttcttccgaggaccgaaaaagaagaagaggaagaagaagatccaagggcagaacttgtacagcagcttcttgaatacaaaatgtataagtgtatggcatatgaacttaaagatcgtcagatggacgcagaaaggatcatgtttaaacagcctacgattcccaaagaagtgcttgcctatgaggaaccacttgatctggatgaactggtgtcggatgtcacgcttaagaagcttaatgatattttccagaatataatgaaaaagcaggctgataagatagacaaggtgagatcaaaattcggaaagattgaaaaggaagaggtatctttggaggataaaatggattatctgacaaattatgccactacccataaaaatttcagtttcaggaatcttttggagtcctcaagtggaaaaatagaagtgatagttacatttcttgcgattcttgagcttatgaagatgggaaggataaacatatcgcaggaacatatttttgatgacatacttatagaatcaagaattgctgcataa

SEQ ID NO: 942 - DNA, 1497 bp, unclassified Eubacterium
atgaagatatcgaataatatagatgataatataagagaatttaagagggtgtattctgattgttctgatataaaaatgcaggaaatgtatgtcggaaagaatggtaagcttaaatgctttcttgcttatattgaagtaacccttccaggtggtaagcttgcggacagtgcattttccaagctttcagattttctcatgacgattgatgaagaaaatgtaaaaagcacgattgaaaatgacaaagcatgtatatcggagcttgcactcaagtacacaatggaggaaagcgtacagataatgctgacaggcgatgcagtaatgtttgtcgatggctgcggatttgcaataaaaatcccgggaagtggatatcctgcaatgtctgtgcaggagaccgattcagagaaggtgataagaggatcaaatgaagggttttcggattcaataaagacaaacactgcgcttataaggaggaggctgcgaagcaccggattaaaatgccgtgaaataaataaaggagtaagaagccacacaaacgtggatctgctttttgtaaaggatctcgtaaaaccaggactagtaagccgcatacagcatctttttttacaatttgaaatagaccagatagcggattctggtgtcctcgaacagtttgcagagaaaaaatggtattcaccatttccacagatacagacaacaaaaagaccggatgtagcggtaatggctcttcttgagggcagggtagttgtcttaagcgataattcaccggttgcaataatccttccggcaacaatgaacaattttcttaaaactgctgatgattattataatagaacgatagcggcaagctttgcaaggcttatacgctatgtggctgcttttatgtcaatgacactgccggggctgtatcttgcggtcacaaattttcacacacagattctgcctacatcgcttctgatgtcattttatgaggcaaggcttggatgcccttttccacaggtgatagaagttcttatgatggagcttgcatttgaacttttgagggaagctgggataaggcttccgggagcaatgggaaatacaataggaatagtcggaggacttataataggacaggcggctgtggatgcaaaccttgtcagcccgatagttgttattctggttgcgtttactgcgctgtgttcatttgccataccaagtgaagaatttgcgttttcattcaggatattgaaatttgcagtgataataatgtctgcatggcttggatattttggatttctcataacgatatactgggttctgcttcatcttacgaagctaaggagctttggctatccatatatgatgccgtttgttggggcagaattaaatggatatgaggatgagaaggacagcataatacggtttccgcttagaaaattaaaaaaacgagcgatattcgctgatgaaaaccagagaacaaagcttaaattgaaaaacaaagaacgaagaaaagaatag

SEQ ID NO: 943 - DNA, 1455 bp, unclassified Eubacterium
ccggtcatagctgtcacatatgacaataacaatgcgcagaacgaaaactatttcaaagagacaaggactgcgacagtgaccatcacggaacacaactttgaaagcagcaggatgcagcttacaatgagtgcagcggacaacggcaatgccgtagaaacagcatcaataagcggctggtcagacagcggggatacacatacggcaacgataacgtttgcaaaggatgcggtatacacctgggcaatgtcatacacagacaaggcaggaaacaaagctgaagacctgtcaaaccagaacttctgcatagaccttacaaaaccatctgtaagcataagcggtatcacacctggctctgcaaacagctcacagggaaacatagggtttgtggtcgaatgcatggacacaaactttgacacatttacacctgtactttcagcagttgtatatgaaaacggaaaatttgtaaagaagacagttgagggaaatgtaacatccatcggaaacggccagagagtcgagtatggaaaccttgaggaagacggaatgtattcgttcacatgcagcgccgcagacaaggcgggaaatgtgtatgatacagtaaacataacagatgcacagggaaacgcaaagactttgaacctgcaggcaggtgatgatcttatggatttctcggtaaacaggaacggatcggtatttgcccttgatgattattcgatgggagtggtaaatgaccattacatacaggaacagacacaggatatcgtgcttgtggagacaaacgcagatccgcttgtaaactacagtatactgttaaacggaacgcagcttaacgagggaactgattatacggtggcaagatcaggccaggatgaaagctggaacagatatgagtaccatatagacagggatctttttgaggatgaaggagaatacaatatagtcgcacagtcagaggacaaagcatcatcagttgcatacagtgacttaaaaaatgtaaacgttgacttcattatcgacaaaactgcaccggtgtttacagtaagtggaatagaagacggcggaaactacaggggaacatcaagggatgtgacactgatgcctaaagatgacggcggaaagcttggcagggtgaaggtgacgatccttgactcagatggaaatgaggaggaagtcgtatcagacctcagtggggatgagcttacagactacctcagtaaaaacgatggaaaaataagattcagcataccggagggaatcaataagcaggtggcagtattatgcgcagactgctcaatcggtgcagacggaagcacaaacgtaaaagcatacagctataaggggataacagtatcctcaaatgcattgatactgttcttcgagaataagccgttattctacggagtagtaggaggaggtgcagcggctgcagtcggagcaccatctgttatgctattt

SEQ ID NO: 944 - DNA, 1449 bp, unclassified Eubacterium
atgtatgatgcagcaattataggagcaggcgttgttggaagcgcaatcgcaagagagctttcaaaatataacataaatgcctgtgttatcgaaaaagatgaggatgtatgcagcggcacatcaaaagcaaacagcgccattgtccatgccggctttgatgccaccccgggcactttaaaagcgcagttaaatgtagaaggaaattcaatgatggacaagcttgcagaagaacttgattttccgtttaagcgtaacggctccctcgtaatatgcaccgaaccttctaatcttgaaggactggaaaaattatatgataaaggccaaaaaaacaatgttcccggtctaaagatcataggccgtaaagaacttataaatatggagccaaatgtatcagatgatgcatgttttgcattatatgcgcctaccggcggaattgtatgtccattcaaccttacaatagcgcttgctgaaaacgcatatacaaatggaatcaaattcttactggacacaaaagtagacaacataacaccagcgtctgaaggatacgatattttagtgacaagaaaaagacgctttaaagaagtagtacatgcaagggcagtcataaatgctgctggtgtttatgcagatgagataaataatatggtaagtgcccataagctgcatataacagcaagaaaaggtgaatatatgcttctcgacaaaacagccggggatcatgtaaaacatacaatattccagcttccgggcaaaatgggtaaaggaatacttgtaactcctacagtccatggaaatctgcttgtaggtcctaccgctgtagatgtggacgataaagaagcaataaacaccaccgccgacggacttgaaacagttgccgcaaaatcatccctggcagttaaaaatgttccgctccgtcaggttataacctcttttgccggtcttagggcacacgaagcaggtgatgattttgtcataggggaagccagtgatgctgatctatttttcaacgctgccggtatcgaatctcccggactttcatccgcacctgctatcggtataatggttgcaaaaatggtcgctgacagattaggtcttactgaaaacaaaagctttgaccctatacgaaaaggcatattaaacccttcaagtctgagtatcgaagatcgaaatgcacttatcaaaaagaatcctgcatatggcaatattatctgccggtgcgaaatgataacagaaggcgagataatagattctatcagacgtccgctcggcgcacgttcccttgacggcataaagcgcagaacccgggctggaatggggcgatgccaggccggtttttgttccccacgtacaatggaaatattagaacgtgaggttcctatgagcatgtatgatatcacaaaatccggcggcgattctacttttatcgtcggacgtaataaggaactttaa

SEQ ID NO: 945 - DNA, 2847 bp, unclassified Eubacterium
atgaatctgatgaagacacttgtttataaaaacctcaggttaaataaaaaaagaaccatagtgacgatcgttggaattatacttgcaactgcacttctggctgcactcacaacgcttgtatcaagcttttattacagcataataaaatacgaaaaatcccagaggggcgattaccattattctttttctaatgtcagtacacaggagcttaaagattttgaaaataaccggagcatagaaagcttgtttgaaataaccggaataggatattcaaagcttgacggatgtaaaaatgaagataaaccatatgcgtatgtagaggccacagatgagaatggatttaaaaaggccggttttaatctgattgagggcagaatggcgcaaaatgataatgaaatagttataccgagacatttaaaaacaaatgggcggatcgattataaagttggagatgagataacattaaatatcggtgtaaggcgtgtttcagaaagcgctttgtcagatgaagaaagtaacggagataacgccctaacgtcaggtgatgacagcacacagtatgcagaaaaacaaccgggagatatactgggacaggacacaccatatttaaatgatggggaagaattaacggatacagtttccaaaacatataaggttgtcggtatgatcgaacgtccaaattatggatttgaagattacagtgcatgtggatatacctttatcacatatgggaagcaggggataacggaaaatgatgcatatggtatgactgtgtatgcacgttacacacaaaaaggcttaagaaaccgttatgaagtgacagcagcggttctgggtgtagataaggagctgtttaagagtgtaaatgatggaaatgctgacttttcaggtcagcagatagatgaataccaaaaacagcttaacaatgtaaaatatgttttgggacagaatgattcccttataagatatgaatgcttatatcctatggatggattatttaaggcactttttgtgatagctgcaattgttgcgtttataataatactcacttctgtatattgcataaaaaacagctttagtatatcaataactgagaagatcaggcagtatggaatgctttcaagcatcggtgcaacaaaaagacagataagaaaaagtgtaaaaacagaggccgcaatgcttggtattgtgggtatcccgattggaataggaagcggtgtacttgcagcatatgtacttacgaaggtcgcaaatataatattatcggaatggcttggagctgcgctggtctttaatatttctgtcccagcccttgtatttgcattgcttcttgcagtgattacaatatatttttctgcgatcgggagtgcacggaaagctgcaaaggttacaccacttgaggcgataagaaacacaaatgaaataaaattaaaggcagagaaatttaaaacacctcgatttatcggcaggatatgggggattggagggatcgtttcatacaaaaacataaaaagaaataatagaaaatacagaacaactattgtttcaatcgcaatatgttcagtcacatttattgtgacatcatattttatgtcaatggcatatcatcttgtggaaatgtcatatggaaagaaaaattataatatggacgtcaatattaccccggaaggaggggaaatgtctaatgatacgatcgtagatgcgataaacagtataagtggtgtaaaagattatgatgtaacaaaaacatattatttcgatgtagacgatccggatatgacaaaagaatacggagattactataaagaatactatatggctgacaattccaaagctgtaaatgcagttatagctgtcatggatgatgattcgtttgcggtttattcaaaaaatgcaggctttgatgatacggatggaaaggcaatacttataaacagagggcagatttcggtattaaatgaagaaacaaacaaatatacagataaggaaataaggctctttaactataaggccggggatacgatttcacttggatatacggcagataccacggaagatgaagtacaaaatactgagccggatgagaatgacacggatgagaatgcagctgatttgagtgaacagagtgatgaaggtataagaaaaactgtggatgtcacactcgcaggtgttacggatgaaagaccgcttggatatgaacagtcattcagttcaccggtaatggttatggatcagaaaacatttgaaagtctttggaaagatggaaaatgtgattacgagggcagaccgtatcaggtggcatatgtgaatgtggaggatgccgacaaatatcaggatgatctggaaacccttatgagtgatatgcaaaaaacgataagcttcagctataatatcacaaattacgatgcgataatgaaaaatgaaaaagcattttatatgctgatcggtatttttgcttacgggcttatcatagtgatctcacttataggaataacaaatataatcaatacgcttggaaccggaatggagcttagaaaacgtgagtttgcaacgctaagaagtattggaatgacagataaacagtttacaaaaatgatcagactggaaagtctttttatctctgtaaaagcacttataataggaattcctgccggacttataatatcatatatcatatgcaggattgaaaacaggctggatacagtcatcatatatgatccgccggccggtgctgtctgtgcatgtataatagttgtaatattgctcatttatgctatcatgtttttatctatggaaaagttaaaacacaacaacatcatagatacgataaaaaatgaaaacttgtaa

SEQ ID NO: 946 - DNA, 933 bp, unclassified Eubacterium
atggacaagaaaaaattcgaagagatgagcaaagatccgagctttacaatggaagtgaaaaatccggaagtagaggagatgcttgttgaatattcaaaggacaaatcagcagaaaatctcaataaattaataaacaaaattacaaagtgcagatttttagtacctgcaaatgtaaacgaacagaaacagccaatgccgcttgttataaaaaacagtaatggcgaatcctttttaccgatttatacatcaaaagagcagctgccaaagaataaaatatctccagctgtagtcaatatgccatatcttgcaataaacaatatggcttcaaaaaaagaaaccaaacttgacggagtagttttcaatccgttcagtaataatcttatttttaaaagaccacttgttgagaaaatagagacagttgagaaggccagaagagaaggtaaaaaggcgaaaactgtacagatgacagagcagcagtatgttatttttgagcggatccagttcgagcatgtatttttcccgacaaagatgtacgagggcggtcaggagttcatagacagactttctgacgaaaaagagcagtatattgatgaactttatgaggaatcatatcagcagaagagaatgtacccgtatcttgatgaggatttctctgtaatggtaatgcagatctcagatgatcttactgtggtaagtgtagacttcccaacaagggattttgcaccgggatgtgcgcagagagcatatcttgcatggaataaggcagataatgccggcagatattttactacagatcttacaagggaaaagacgatagagcttatagaaataggtgctgatcacagcaggataagccatggagaggctcctgtagagggggcagagcttcagacgattatcgatcttataagtgacggggaaaaacttaattaa

SEQ ID NO: 947 - DNA, 1674 bp, unclassified Eubacterium
atggataataaattaaaattacctgtcggaatcgaaaattttgaggagataagaaaatcaggcttttactatattgataagacaagacttatagagcagcttttgcaaaactggggaaaggtaaatttgttcacacgtccgagacgttttggaaaaactcttaacatgagtatgttaaaaagcttttttgaaattggaacagatagttcattgtttgagggtttatatatttcaaataatacagagttgtgtaatgaatatatgggaaaatatcctgttatttttctatcgcttaaaggtgtagatggattgacattttccaaatcaaaggaaatgctgtctgaaataattaaagaagaggcggacaggcattactatctgaaaaatagcgaaaaactgacacaggaagacagaataagctttcaaagtattctgactggaacagatgagaatatagaaaacagtctgaagacattatccagatttttgtataaacattatgacaggaaaacaataattataattgatgagtatgatgtgccgctggataaagcgtttcagaatggttattataaagagatggtcgcgttgatcaaaggaatattcggacaggcattaaaaacaaatgattttttacagtttgctattttgaccggatgtcttcgcatttcgaaagagagtatttttacaggacttaataactttgaggttttatcgattttaaatgtccagtatgatgagtgttttgggtttacggatgcagaagttagaaaaatactcaaagattatggactgtcggctcattatgcagatatgaaagaatggtatgatggttatagatttggaaatacggatatctattgtccatgggatgtaatacgatatagcaaaagtctgtgcatggatgaagaggcaaaaccggaggatttctggtctaattcaagtggcaatgccattgtccgcagatttatagacaaggcagatgcaagcacgaaaaacgaaattgaacgtctgatagccggagaatatatagaaaaagaaatttcacaggaactgacttacgaagaacttgatgataagattgaaaatctttggagtgtactttttacaaccggttatctgacacagcagggacgaactgatgatgatagatatcgtcttgcaattccaaataaagagatacgaaatctttttataaagaaagtcagagagtggtttcgtgatgcatcaaaaaatgacggaaaggcgcttgaggaattttgcaatgcatttattcaaaagaattcacagaagattgaacagctttttggcgattatctgtggaatactataagcatacgtgataccgcagtcgcaaaggaaaagaaggagaacttttatcatggtattttattgggactacttggctataagtcaaattggatcataaaatcgaatgctgagtccggaacgggatatagtgatatattgatagaagcaccagataacagaacagggatagttatcgaactaaaatatgctgaaaatggaaatatggataaagcatgcctggatgcaataaaacagattgaagaaaaagattatgttggaaggcttaaacaggatggcatgcgaaattttatcagctatggaatagcatgttataaaaaagattgcaaggttatgctgaaatag

SEQ ID NO: 948 - DNA, 1407 bp, unclassified Eubacterium
atgtgggattgtggaaaattatcctattttataagatatggagaacttttaatggatacagttattgaaaagtggaaagatatactacaaatggtgaaagaagaacatggtcttaccgatgtttcatttaacacgtggataaaaccacttgaggttttttccatagaaaacaacattatatacatacttgttccatctgagcagatgggtctaagttatataaataagaaatactacctccctcttaaggtagcgatcacagaaacaaccggtatcaactatgatattcagtttatattgccggatcaggctaaaaccatgaactttaattcaaaatcagcctctgaggaacctgttccttctaagggagatcattcaaatcttaatcctaactatacgtttgacacgtttgtcgtaggaaataacaatagatttgctcattcagcctcgcttgctgttgctgaatcacctggtgaagcatacaatcctctctatatatatggaggacctggacttggaaaaacccatttgatgcattcaatcggacactttattatagaccagaaaccaaacacaaaggttttatatgtaacatctgaggaatttaccaatgaagttattgaatctatccgtaatggtaattctacagcaatgacaaaattcagggacaaatatcgaactgttgatgttttgatgatagatgatatccaatttataataggtaaagaaagtactcaggaagaatttttccacactttcaatactcttcagacacagggaaaacagattattcttacatctgataaacctcctaaagagatggaaacacttgaagaacgtatccgttcacgtttcgagtggggtcttatggccgatatcggtgttcctgattatgaaacacgtatggcaattttacgtaaaaaggctgaaacagaccactttgatatagatgacgacatccttaattatatagcatcaaatatcagttcaaatatcagggagcttgaaggtgccttaaataaactgcttgcattccataatctcgaacatacatatataactatggatatagcggaacgtgagctttcaaacatcattacacctgataaaccaagagaaatcacagctcagcttataatagaagttgtttctgaacacttccatatatcagttgatcagatgatttcaaaaaaccgtagcagtgatattgctagaccaaggcagatagctatgtacctttgtaaaactatgacatctgattctctagatgttatcggacagcttttaggtggacgagaccactcgacaataattcacggaattaagaaagttacaaaggattacgaagaaaatgaatcaactaaaagccttattgaaactataaagaaaaaaataaatccaaactag

SEQ ID NO: 949 - DNA, 1191 bp, unclassified Eubacterium
atggaacacattttccctgattattacaataaatttcactgcatagctgacagatgcactataacctgctgccaggaatggaaaatcacagtcgatgatgacacaaaccgaaaatggaagaagattttaccacccgataccatatcagataagaggaaaaatttaaccgcatacacatgtaaaaaagatggtgcccgcgtgatcgggttagataaaaatcaccgctgtccttttctttcccaggataaattatgtcatctggtaacttcctatggggatagtgtgctatctgaaacgtgtacattgtttcctagagaaatccatgagttttcaacgcatactgaagcttcactcatgccatgctgcccggctgttattgacctgtggtgcgaaaaaaatattgaatttccaacagtctattcgatcgtggatcattcatctccaatgtttttaatccgtgataatctgatcaagttattacaaaataagaatctttctattgaagaagccttatttgaaggattctatattttattggaattatataaaaatcaacccgttacaatctcacagataaacgagtatttttcaaagcagactctttttgaactccattcagctctggcagatatcgatgtccctgctaatgatacttttaccgagtgcaatgaactgcttcaggatcttgcggtaaattatagtaaggaaggattgtatacaggatttttgcagccaatattagctgaagctgaaaaatatcctaaaggaactttttcaccggataaaccagatgacaggctgaccgatagcagtaccggcagtgaactttctggaatttggaatttattttgtgatatgatcaccgatcatgatatagtcttccgtaattttctttccaatgaactattttcagatctgataatccctggaagtagttccaaaataattgaacacatggtaatgcagtatcaatggatcattatggaatacacggctatacggcagagtcttttcctatggtgcagtattgatcccaaaagcccgcttacttatgaaactgtgcgcaactatatagtaataatctcacgcatgacaggctatgatgatggtgatatacgtacttatctggaaaacagctttgcaaagctcatatgggattggggatatgcggcattgatcattggggcataa

SEQ ID NO: 950 - DNA, 2454 bp, unclassified Eubacterium
atgacaaagaaagaattcagagaatatttaagtaaaggtgcaatagtactcgatggggccaccggaacaaatcttatggcagcaggaatgccgataggggtctgcccggaagcatgggttatggaacatcaggatgtactttatgatctgcagagtgcatatgtaaaggccggaaccaatatagtgtatgcgcctacttttacaggaaataggataaagctggaagagtatgggcttgaagaccgcatagaggagataaatacagagcttgtcagattatcaaagcgtgcagtggacggaaaagcacttgtcgctggggatatgacaatgacaggaaagcagcttttcccgcttggggatcttatgtttgaagaactggtcgatgtatataaagagcaggcatcgatccttgaccatgcgggtgcggatctttttgttgtggaaacgatgatgagcctgcaggaatgcagggctgcggtcattgcaataaaagaggtcagtgatcttcctataatggtaactctttcttataatgaggatgggcgtacattatttggaacgccgccggaaactgcagttgttgtattgcaatcacttggagtggatgcaataggaatcaattgctctacaggacctatggaaatggtagaacttgtagaaaaaatggcgcagtattcaacagtaccgatccttgcaaaaccaaatgcagggcttccggaactcgaggacgacaaaacagtatataagatgacgccgcaggaatttgcggatgctgcagttgcgttagtaaatgcaggagcttcaatcgtgggcggatgctgtggaactacacctgaacatataaaagcactttccgatgctgtaagagagcttccaatcagaaagccgcttgaaagacacagaagaatacttgcatcagaaagaaaaaatgttgagatagatctcgacggcggatttattgttgtaggagagaggatcaatcctacaggaaagaaaaaacttcaggctgaattaaaggaaggaaagcttgatcttgtgcgccagatggcaatggaacaggaagaaaatggtgcaaaaatccttgatataaatatgggaatgaatggaattgatgaaaaagaaatgatgaaatcggtaatatatgaggtatcatcaacggtggattgtccgctttgcattgattcaagtcatgtagatgtgatagaggaagcccttaaaatctatccggggcgggcgcttatcaattcaatatctcttgagagtgaaaagattgaaaaactccttcctgtagctgcaaaatatggagcaatgtttatactgctgccactttcagatgaggggcttccaaaggatgcagcggaaaaacatcgtataataaatactgtatatgataaggctatggcactggggatggctcacgaggatatagtggttgatggacttgttgctacgataggagcaaatccggatgcggcaaaagaatgttatgagactatttcatattgcaaaaatgataagaaacttccgactatatgtggtctttcaaatatttcattcggactgcctgagagaatgtatgtaaatacagcgttccttacgatggcaatatgtaatggacttacaatggcaatagcaaatccgtcacaggagcttctcatgaacgctgcattctcatcggatatgcttcttaaccgtccagatagtgatattgcttatatagagcgcatgaatatgcttgcggagaaaaaggcgcagtatgaaactgtcgttgtaaaaaaacagccggatagtgcagctggagacagcgcaggaacaaatacaaatggtggaaacgatgctatatttcaggcggttttaaagggcagcaaaggatcgatcctcgatgaggtaaaaaaggttatagatgcaggtaaaaaaccggatgaaataattaatgaaagccttataccggccatcaatgaagtaggcgagctttttaataaaaagaaatatttcctgccgcagcttatcggaagtgcaaatacaatgaaacatgcgatagattaccttgaaccgcttcttgaaaagaatgatacaggtgaaaatatgcctacacttgtaatcgcaacggttgagggagatatccacgatatcggaaaaaatctcgttgtccttatgctgaagaattatggatataatgttatagatatgggaaaagatgttccgtgtgaagatatcgtaaataaagcaatagaggaaaatgcagcagttatcggactgtctgcgcttatgacaactacgatgctccgcatgaaggatgtgatagaattgtgtaaagaaaaaggctgcagcagcaaagtgataatcggaggtgcctgcattacacaaagctatgcggatgagataggggctgatggttattctaaggatgcagcagaatgtgttaaacttgttgaaaaacttttacagaaatag

SEQ ID NO: 951 - DNA, 4320 bp, Bacteroides ovatus
atgagttcacgctttcctttatatataataggtatagtgttgtttgcctcttttttttcgtgcactgatatggtgccgaccaaagaggtgcgcctgattgattcattaaacgggaaagcgtatgcttatcgttatcgaagcctggattcttcttataaatatgccaatgaagcctatcggcaggtgaatttctacaagtcggggaaagcggaagcatccaacaatctggggttctgtgcttttatggctatggactttgaccgggcggaagcgttgcataaggaagtatataaactgactaaaaatgaactcgaactgttgattgccgacatcggactgatgaaaatctgtcagcggacggctatgaataaagaattttatgattatcgtaatagtgcgctcaagcgcatgaaacgtattcgtgaagagagtgatttgtttgccgaccgtcacgaggcgctacggctggattatgcattcaccgaatttttcatcgtttcttctatttattactactatctacagcaacggcaggaggccatcacatctctcaaccggattccggaagatgaagctttgacagatactaatcagttgctttattatcattatattaaaggttcggcttcgttggtggaagcaaccaagccggaagaccggaaaatgcgtgagttcgaccaactctatattacctggcggacggctgttcagactaatcatccttatttcgaaggaaatggtctgcaaggattggctaatctgatggtttcacctaataatttcgaactttttcggacgagaaggggatatgcgctggatcagtttgggtttcccgtagattcgcttttgcctttgcgaatggcacagcgtgcgcttgaaaaatttcgtgagtacaatgatttgtatcagattgccggtgcgtatgtgtctatcggtaaatatatgaatgagcacggacgttatacggaggcattggatacgcttgcaaaagcgttggattgtgtgaatcaacatcacatgctctattatcaccatgcggcggatacattggataaactacatgtttttgtagaaggagatacgacttataccggggttccatggatcatgcaggaagatgtgagaacggtacctgaatggatctcaaggattcgggagcaattgagtgtgtcgtatgcggggctcgggatgaagtatgcttctgattacaaccggaatatatatttggatattttaaattatacccgtcaggataaggagttggagagccgctatctttcattggaagccgattcacgacaaatgacgcttgtactttctttggttattgtcggacttgtattggtggttattctttggtggtttttcaataaacggtctaaaataaggaatcaggtagacgtggagcgtctgcaacggattctgactctttgccgggatataacttcgtccattccgatgaatgttccattaattcaacaaggtatcgatcaattatttgggaaaggacgtcttcaactggaaattccggaggaaggaaaagcggcactggttcctctgcatcggttgaaccgtgatgaaaaagcattggtgcatgtgcttgaaccgtatattgtttgggctgcggacaatgagcagatggtggaagcgttgagtgacgagcggatgcagttggaaaagcaacggtatgtttacgaacaacatattgcgggaaataaacgtcagaatcttataaagaaggcttgtctggccattgtcaatggtattaatccttatattgaccgtatcttgaacgaagtgcataagttgacggagcgggggtatattgataatgcgaagattaagaaagagaagtatcaatacattgatgagctggtaactacgattaatgagtacaacgatattctggctctttggattaagatgaagcaaggaacgcttagcctgaatattgaaactttcagtctcaatgaactgtttgagctgctaggcaagggaagacgtgcttttgaaatgaaaaatcagaagttggaaattgaaccgactacggttatggtgaaggccgaccgggcactaactttgtttatgattaatacgctggcggaaaatgcccgtaaatatactccggaaggaggaacaattaaagtgtatgcccgtattacggaggatgcgtatgtcgagatctctgtggaggataacggaagaggtatttccgaagaggatgtggcgcatatcattggtgagaaggtgtatgattcccgcgtgatcggaatgaagaatgcagccgatccggaagtgttgaaagaaaacaaaggtagtggtttcggattgatgaattgtaagggaatcattgagaagtataagaaaacgaatgatttattccggggatgcgtttttgatgtggagagtgaactggggaagggaagccgtttttattttcgtttgccttcgggagtgcgtaaagcaatgggggtattgttgctttgcttgttgcttccgttggggatggtttcttgtctgcatgatccgattcctcccatgttgcaggatggcgattcgattgtagtagttatggattctgcgtatgaggatttgctggatgtagcgtcggattatgcgaatgctgcctattttgctaatgtggatgaaaattatgagttggctttgcaatatatagattctgcaatgctttttctgaatgagcattatgaaaaatatgcgcgtccggatcgtccacatcggtatatgaagctggtaggtgagggaacacctgctgaaatcagttggtggaacgaattgtttgattcggattatcatgtaattctggatatcaggaatgaggcagcggttgcttttctggctttgaaacagttggatgcatatagttataataattcggcatttacggatttgtataagttgcagggagaggatcaaactctcgaagcatattgccggcagttggagcgttcgaataccaataagacggtagggattattttatgctttgttttattgattgtttcgttggttggatattattttctgtacatgagaaaacgtttgcagaatcgtttgaatctcgaacaggtacttgagattaaccagaaggtgtttgctgcatctttggtgagaccgcaggaacaggaaaatgcagaggcacttcaacgagaagagagtacgcttaaagaaattccgcagcggattgtggatgaagcattcggttcggtaaatgaattactgacgattgaccggatgggaattgccgtttataatgaaacgacacatcggctggaatatgcttctcgtcccggacaggaaatgccggagatggtagagcagtgttttagcgccggagaatatctttctgagcagcatcttcaggcaattccgctgatggtggaagcagggggcgagcatcaatgtgtcggtgtgctttatctggagcgcagagaaggaacggaacaggagacggatcgactgctttttgaactggtagctcgttatgtggctattgtcgtgtttaacgcagtggtgaagctggctacaaaatatcgggatatcgagtcggcacacgaagaaacacgtcgggcttcctgggaagacagcatgttgcatgttcagaatatggtgcttgacaactgtctgtcgactattaaacatgagacgatttattatccgaataaaatcaagcagattgtagggcggttgaatgcgcagaatctttcggaaacggaggagcgtgaagcggtggagactatgacggaattgattgaatactataagggaatctttacgattttgagttcgtgtgcttcccgtcaattggaggaggtcactttccggcgtacggtgattccggtacaggaacttttggatgctgccggaaaatatttcaagaagttgatgaagaatcggccggagaggatagaattggaaatagagccgatggaggcgaaggtgataggagacgtgaatcagttgcgttttctattggagaatttgattgatgaagcattgactgtacgtgaagatggagtgatacgtctgcaagcgcgcaaggataatgaatatattcgtttcctctttacggatacgagacgtgagaagagtgtggaagagttgaatcaactattttatccgaatctggcacgtatgacttccggtgaaaaaggggagttgaggggaacggaatatctggtatgcaagcaaattatccgcgaccacgacgaatttgcgggacgtaggggatgtcgtatcaatgccgagccggctgaaggcggcgggtttacggtttatttcactattccgcgccgataa

SEQ ID NO: 952 - DNA, 3363 bp, Bacteroides ovatus
atgaaaaagctactgctaagtgcatttgtcatctgtctagcagggacaagcattgcacaagaatctcctttatggatgcgccactgcgctctttctccagacggaaccaccattgcatttacctacaaaggagacatctacacggtaccgtcaaccggcggacgtgccacacaaatcaccaccaatccggcttttgatacggaaccggtatggagtcccgacagtaaacaaattgcctttgcatcggatcgcatgggaagtctcgacgttttcgtcgtatccagtgaaggaggagcaccccagcgactgaccactcattcaggcagtgagaaacctgttgcctacaaagacaacaaacacattttattcacagccaacattgctccctctgccgaagatgccgggtttccttccggccagttccagcaagtgtacgaggtagccgtgacgggaggacgccccgctatgttctcatccatgccaatggagtgcatctctattaataaagagggagtgatgctctatcaggacaagaaaggatacgaagactattggcgcaagcatcaggtatcccctattgcccgtgacatctggacatacactcccgggaaaaaacctgtttatcaaaaacaaactactttcggaggtgaagaccgcgaaccggtatggagtcctgatggtaaatcattctattatctaagtgaagagaaaggttccttcaatatattccaacgtactcccggaaccaccacttcccaacaaatcactttccatacaaagcatcccgtacgttttctaagcatttcaaccaccggcacactctgttatggttatgacggcgagatttatacacttactccgggcaaacaaccccaaaaggtaaatataagtatcctggcagacaagaatgacaaagatattatccgccaaatcaaatccaacggggctaccgacatcgctgtatctcccaaaggaaaagaggtcgcattcattatgcgcggtgatgtttacgtaacctccattgactacaaaacaaccaaacaaatcaccaacacacccgatcaggaacgtaacatcagtttcgctcccgacggacgcacactcgtctattcttcagaacgcgatggattgtggcagctttacacttccaccatcgtacgcaaagaggagaaacaattcacctatgccacagaattgaaagaagaacgtttgacaaactccaaagtcgcttctttccaaccacaattcagtcctgacggtaaagaggttgctttcctcgagaaccgtaccgctatccgtgtcatcaatctaaaaagcaaggctgtgcgcacagtgatggatgccaaatatcaatattcttatgccgacggtgaccaatggttccaatggagccccgacagccaatggattctatcagacttcattggcataggaggctggaataataaagacgtcgttttgctgaaagccgacggaaaaggcgaaatggtcaatcttaccgaaagcggatacagcgacagcaacgccaaatgggtgttgggtggaaaagcaatgatatggaacagtgaccgtgccggataccgtagccatggtagctggggaagtgaagacgacacctatattatgtttttcgacgtcgatgcctacaaccgcttcctgatgagcaaagaagatattgccttacttgaagaagcggaaaaggcagagaaagcagaaaaagaaaaagccaagaaagaaaaggcagagaagaaagaagacactaaagacagtaagaagaaaacgaaccagaatgagaatgcgaaaaaagacagtacggaagtgaaccctcttacattcgatttggagaatcgttttgaccgcatcgttcgtctaactgtaaattcttcccgcctgggtgacgctgttatgagtccgaagggtgatattctttattacctggcagcttttgaaggagactatgacctttgggagcataaactgaaagaaaatacgactaaaatattattgaaaggagttggcggcggctcactcataccggataaagaaggaaagaatatctttatgtgcacaggtggccgattgaagaaaatagagattgccggtagcaaaattacaccgatagaatttgaagcattcttcgattaccgtccttatgatgaacgcgcatacatcttcgaccacgtttgccagcaagtaaatgacaaattctatattgccgacttgcatggagtggactggaaaggatataaaaaagcatacgaacgcttcttgccccacatcagcaacaattatgacttcacggaaatgttgagtgaattgcttggcgaattgaatggttcccataccggagcccggtttgcagcaggaggcagcgcaatgcctaccgctactctgggagtcttttacgatgagtcatacgacggtgccgggttaaagatcaaggaaatcatgaagcaaagtcctttcacccagaaaaagacagaagtgaaggcaggttgcatcattgaaaaagtagacggcacagcgattgaagccggtgctgattacttcccgttatttgaaggcaaagtcggacgcaaagtagtacttaccgtatacgatccttctactaaaaaacgttttgaagaagcagtaaaagcaatcagctatgaaacccaaagcgacctgctttacaaacgttgggtagagcgctgcgccaagaaagtggaagagctttccggcggacgcattgcttatgtacatattaaaggtatggacagccccagcttccgcaagatctattccgaactactcggccgttatcgtaataaagaagccgtagtggtagatacccgccataatggtggcggatggctgcacgatgatgtagtcaccttacttagtggaaaggaatatcaacgtttcgtgccacgcggacaatatatcggcagcgatccattcaacaaatggctgaaagcctcatgcatgctaacttgcgaagacaattatagcaatgctcatggcactccttacgtatataagactctaggtattggtaaactggtaggcgccccggtggcaggcacgatgaccgccgtgtggtgggaacgccagatagatccgtctattgtattcggtatcccgcaggtgggttgtatggatatgcaaggcaactatctcgaaaatcagaccttgcaacctgatattctagtttataacgaaccggcagccagcctgaaaggagaagatgcacaactgaaagcagcagtagacttacaatcgccaaatcaaaaaattcccgaccgaaaaacaaaatgtgtcattaaaacacatattaacataaaacaaaatgtgatttttggtgcaaaattaaagcctgtttaa

SEQ ID NO: 953 - DNA, 1479 bp, Bacteroides ovatus
tttttaaccattatgaataatgtgttaattctgttggataatctggatgactggaaaccgtattatgagacaagtagtgtcctgactgtttccgactatctaaaaaacaagccggtggagaaagaccggaagttagttattaatcttagcaatgattacagctataactctgaagggtattactgttcgctgctagcccaaacgagaggacagaaagtcattccggatgttgatatcatcaacaaaatggaggctggaacgggggtgcggatggaccgtagtctgcaagccctttgttatcaatggatacagaagaatgacatcaaggatgatatctggtacctgaatatctactttggcaaatgccgggaaaaaggtatggaacggattgcgcgttttattttcgagaattacccttgcccattgttaagagtggctttgaatactcatcccagaaatcagatcgagggcattcattttcttcccctgaatcagcttaatgatgcagagcaggatttctttgccaatacgctggataactttaacaagaaaatatggcgtgcaccgaagtcggcaaaggcttcccgttacagtctcgctgtattggtcgatccacaggagaaatttcctcccagcaataaaggtgctctgcacaaattgacggaggtagctaagaaaatgaacatccatgtggagatgataaccgaagatgatgctatccgtttgctcgaatttgatgccttgtttattcgtactacaacgtcgctcaatcattatacattccatttgtcacagttggctgcacaaaacggaatggctgttattgacgatccgttgtctatcattcggtgtacgaacaaagtgtatctgaaagaactttttgagaaggaaaagatatctgctcctaagtctacattgatttttcaatccaaccatcattcgtttgaacagataagcgaactggtaggtgctccttttatcctgaaaataccggatggctcttattccattggtatgaaaaaagtgtcgaacgaagaggaactgcaagccagtctgaagatactgtttgaaaaatcggctatcttgctggcacaggcatttactccaacggagtttgactggcgtgtcggtctattgaacggtgtaccgctctatgcctgcaaatattatatggcgaaaggacactggcagatttactgtcactatgattcgggcagaagccgttgtggattggtagatacgattcctatttatcaggtgcctcgtgtggtattggatacagctgtaaaggctgccaatctgataggaaaagggttgtatggagtcgatctgaaaatggtggatgataaggcttatgtgattgaaatcaatgacaatccgagcatcgatcatggactggaagatgccattatcggtgatgaaatgtattaccgtttgttgaatcactttgaacaagtgctagaaacaaaacattattga

SEQ ID NO: 954 - DNA, 2205 bp, Bacteroides ovatus
aaaaatagaccatttatgtcaaaaatgcgtttttttgccttacaagagctttccaaccggaaacctctggaagttattgccccttccaacaaactctctgattattatggtagccacgtgttcgaccgcaagaagatgcaggagtatcttcccaaagaagcttacaaagctgtaaccgacgctatcgaaaaaggtacgcctatcagccgtgaaatagcagatttaattgctaacggtatgaaaagttgggctaagtcactcaacgtcactcactacacacactggttccagcctctgacagacggaacagccgaaaagcatgacggctttatcgaattcggcgaagatggcggagtgattgaacgcttctccggaaaactactgatccagcaagagccggatgcttcttctttccctaacggcggcatccgcaacactttcgaagcacgaggatatacagcctgggatgtttcttcaccggcattcgtagtagataccactctttgtatccccactatcttcatttcttatacaggtgaagcgttggattacaaaactccattgttgaaagcacttgccgctgtagataaagcagcaacggaagtctgtcagctattcgacaagaacatcacacgcgtatataccaatttaggatgggaacaggaatatttccttgtagactcctccttatataatgcacgccccgacctctgcctgacaggacggacactgatggggcactcttctgccaaagaccaacagttggaggatcattatttcggctctatccctccacgtgtcactgcatttatgaaagaactcgaaatcgagtgtcacaaactcggtattcctgccaaaacccgtcataacgaagtagctcccaaccaatttgagttggcccctattttcgaaaactgtaaccttgccaacgatcacaaccagctcgtcatggatttgatgaagcgtatcgccaggaagcatcattttaatgtactcctgcacgaaaagccatatagcggagtaaacggttcgggcaagcacaacaactggtcactctgcacagataccggtatcaatctgttcgctcccggaaagaatccgaaaggcaatatgctattcctcacatttctggtaaacgccttaatgatggtttataaaaaccaggatttattgcgtgcctccatcatgagcgccagcaacagctatcgtttgggagccaatgaagctcctcccgccatcctctcttgctttctgggttcacaactctcgtctactctcgacgaaattgtccgccaggtaggaaatgagaaaatgacgccggaagaaaaaaccacactgaagttaggcatcggacgtatccccgaaattttactggataccaccgaccgcaaccgtacttctcctttcgcattcaccggaaaccgtttcgaattccgcgccgcaggttcttcttccaactgtgctgcctctatgattgcaatcaatgcggccatggcaaaccagctgaacgaattccgggcatcggtagaaaagctgatggaagaaggagttggcaaagacgaagctatcttccgcctgctgaaagaaacaattatcgcctccgaaccgattcgtttcgaaggggacggttattccgaagaatggaaacaagaagctgcacgccgcggactgactaatatctgccacgtaccggaagccctgatgcactatattgataaccaatccaaatcagtacttatcggcgaacgtatcttcaacgagaccgaattgaacagccgtctggaagtggaactggagaaatacaccatgaaggtgcaaatcgaaggccgtgtattgggcgacctcgccatcaatcacatcgtaccaactgccgttgcctatcagaaccgtttgctcgaaaatcttcgcggactgaaagaaatattcccggctgaagaatatgaagtattaagtgccgaccgtaaagaactgattcgtgagatttcacaccgggtcacttctatcaaagtactcgtgcgcgacatgaccgaagcaagaaaagtagccaaccacatggaaaactacaaagaaagggcattcgcatacgaagaaaaagtacgcccgtatcttgaccaaatccgcgaccacatcgaccacctggagatggaagtggatgacgaaatatggccgttgcctaaatatagagaactgttgtttaccaaataa

SEQ ID NO: 955 - DNA, 2400 bp, Bacteroides ovatus
aaagttatgaactacgcggaaatttgtatcatcaaacgtgatggtaagagagaagatttctctatcagtaagatcaagaatgcaattagtaaagcattcagtgcaacaggtattcaggatgagcagcagttggtggctgacatcactatgaacgtaatcagtcagtttactactcctactattaccgtagaagagattcaggatttagtagaaaagtcgttgatgaaagtacgcccggaagtagcgaagaaatatattatttatcgcgaatggcggaatacggagcgcgataagaaaacccagatgaagcaagtgatggacggcatcgttgctatcgacaagaacgatgtcaacttgagcaatgccaacatgagcagtcacacgcctgccggacagatgatgacgttcgcttccgaagtaaccaaagattatacgtataaatacctgttgccgaaacgttttgccgaagcgcaccagttgggagatattcacattcacgacttggattattatccgacaaagacgacgacctgtatccaatatgatatggatgacctctttgaacgtggttttcgcaccaagaacggtagtatccgtaccccgcaaagcatccagagttatgctacgttggctactattattttccagacgaatcagaatgagcagcatggcggacaggcaattcctgctttcgatttcttcatggcaaaaggtgtggccaaatctttccgcaagcatctggcatcgttcatcaatttctatgtcgccatggaaaacggaaatcaggccgatgagaaatccatccgcacattgattaaagaatatcttccgtctatcaagactactgaagccgaacgcgaaacattgcgcattgctttggtggctttacagattattatagataaggaacaccttgcccgtatcgttgagaaagcttatcagcagactcgcaaagatacccatcaggccatggaaggatttatccacaacctgaacacgatgcattcacgtggcggtaatcaggtggtattcagctccatcaactacggtacggacacttctgccgaaggccgcatggtgatcgaagaattgctgaaagctaccattgaaggattgggtacaagaggtgaggtgcctgtattcccgatccagattttcaaggtgaaagacggagtttcttactcggaaaaagactttgagaaagcaatgaaagcggaaaatatcgaagaggcaatgaccgaccgttacgaggctcccaacttcgacttgctgttgaaggcttgccagactacggcgaaagcattgttcccgaacttcatgtttctcgacgcacctttcaaccagaacgagaaatggagagcggacgatccgaaacgttacatctacgaattggcgacgatgggttgccgtacccgtgtatttgaaaatgtggcaggagaaaaatcttctttaggtcgtggcaatctttcattcactacgctgaatatgccgagactggcaattgaagcccgcatcaaggcggaaaacctgatagaggatgaacgcaacaaggatgccattgaacagaaggcaaaagaaattttcatcgaatccgtacaccaaatgtccgtgcttgtagccgatcagctttacgagcgttatcagtatcagcgtacggccctggcacgtcagttcccgttcatgatgggaaataatgtgtggaaaggcggcggtgagctgaacccgaatgaacaggtgggtgatgcattgcgcagcggtacgctgggtatcggatttatcggcggacacaacgcgatggtggctctctacggacaaggtcacggccacaaccagaaagcatgggacacgctgtatgaagcggtgatggaaatgaataaagtggtaaacgaatataaagagaaatataacctgaactactccgttctggctactcctgccgaaggactttcgggacgtttcactaaaatggatcgtcggaaatatggaaaaatccccggagtgacagaccgcgactattatgtcaactcttttcacgtagacgtgaaagaaccgatcagcatcgttgagaaaatcaagcgtgaagctccgttccacgccattacgcgcggcggacatatcacgtatgtagaactggacggtgaagcacagaagaatgtacgtgccatcgccaagattgtgaaagtgatgcacgacgaggggattggctacggctctatcaatcacccggtagatacttgccataactgtggttacaaaggggttatcttcgataaatgtccggtgtgccagagtgaaagcatccttcgtatgcgccgtataaccggttacctgacaggcgatttgagttcctggaactctgctaaacgggcagaagaacaagaccgcgtaaaacacctgtag

SEQ ID NO: 956 - DNA, 2529 bp, Bacteroides ovatus
atgaataatcaattctcacaaagagtttccgacattatcgtctatagtaaggaagaagcgaatcggttgagaagtaggtatataggtcccgaacacctgcttctgggaatactccgtgacggtgaaggaaaagctatcgagatattgtctaaactcaacaccaatctggctgctataaagcaacagattgaagctcagctgaaggcagaagctgatgaaatgttattgcctgatgcagaggtgccgttatctaatgatgcggcaaagatattaaaaatgtgtattttagaagctcgtggaatgaaaagtaacatcgctgatacagaacatgtattattggctattttaagagaaaaaaacaatatggcggcttccgtacttgaagcaaacgatataaactacgtgaaagtactggagcaagctacattgcagccggatatcaattccggcatgggcttttcggaagacgatgaggatgacgaagaaatgtcttctcctcgttccggcagaggtggctcggatgaacgccaacaggcacaaaccgcttccaagaagccgtctaatgatacgccggtacttgacaatttcggtactgacatgacaaaagcggcagaagaaggacggttggatcctgttgtgggcagagaaagagaaatcgaacgtttagcgcagatattaagtcgacgcaaaaagaataacccaattctgattggtgaacccggtgtaggaaaatcagcgattgttgaaggtcttgcattgagaatcattcagaaaaaggtttcgcgtatcctgtttgataaacgagtcgttgctcttgacatgactgctgttgtggcaggaacaaagtaccgtggacaatttgaagaacgtatccgttccattctcaatgaattgcagaagaatccgaatgttatattattcattgatgaaattcacacgattgtaggcgcaggctctgcggcaggctctatggatgccgccaatatgctaaagccagcattggcaagaggagaaatacaatgtatcggtgccaccactcttgatgaatatcgtaagaatattgagaaagatggcgcattggaacgtcgtttccaaaaagtaattgtagaaccgactactgctgccgaaactctgcagattttgcgtaatatcaaggataagtatgaagatcatcacaatgtgtattatacagatgaagcattggaagcatgtgtcaagctgacagaccgctatatcacagatcgtaatttccctgataaagccattgatgctttagatgaagccggctcacgtgtacatcttactaatgtcaatgtacccaaagagatagaagaacaggaaaagctgatcgaagaagctaaaaacaagaaaaatgaagccgtaaaatcgcagaattttgaacttgcagccagcttccgtgataaagagaaagaactttctatccaattggatgagatgaaaaaagaatgggaagccaatctaaaagaaaacaggcaaactgttgatgcagaagaaattgccaatgttatctcaatgatgtcaggcattccagtacaacgaatggcacaggccgaaggcatcaagctagcaggtatgaaagaagatttgcaagctaaagtcatcgcacaagacacagctatagaaaagctggtcaaagccattttgcgaagccgtgtaggactcaaagatcctaataagcccattggcacgtttatgttcttaggtccgacaggagttggtaaaactcacctagcaaaagagttggccaagtatatgttcggttctgccgatgcactgattcgtatcgatatgagtgaatatatggaaaagttcactgtttcacgcttggttggggcacctccgggatacgtaggatatgaagaaggtggccagctgacagaaaaagtgcgccgtaaaccatactctattgtattgcttgatgaaatagaaaaagcacatccggatgtattcaatatcctgcttcaggtaatggatgagggtcgtctgactgacagttatggcagaatggtagatttcaaaaataccgttattatcatgacttccaatatcggaacccgccaactgaaagaatttggacgtcgtgttggttttgcgacacaaagccgcctggatgataaagaattctcgcgaagtgttatacaaaaagctctaaataaatcattcgcgcctgaattcatcaatcgtgtagatgagattatcacgtttgatcaactttctctggaagcgataacaaagattatagacatagagctaaaaggattgtacgatagaatagaatctattggttacaagcttgttattgaagataaggcgaaagaattcatcgctagcaagggatatgacatacaatatggcgcccgtcctttgaagcgcgcaattcaaacctatctggaggatggtttatccgagctcatcatttcctcgtctttaaaagagggagatactattcaagtaacccttaatgaagaaaaaggcgaattggagatgaaagttgtttctccggaatag

SEQ ID NO: 957 - DNA, 1260 bp, Bacteroides ovatus
ataagcattatgaagatacagacgggacggggaacaattcctcttattactttaattgccatctggtctatttcggcattgacttcattgccgggactggctgtttcacctatattgggtgatcttacgaagatatttccaaaagctacggatctggacatacagatgttgacttcgctgccatcactgctcattattccttttatattgctgggtggtaaactgacagagaaagtcgattatgtccgtgtattaaaggtcggactctggctttttgccgcgagcggtattttgtatctgatttccaatcgaatgtggcaattaattgtggtaagtgctttgctcggtatcggttccggtctgattatccctttatctaccgggttggtttccagatactttgtaggaacctatcgggtgaaacagttcggattaagctccgctattactaatttcacattagtgatagcaactgccgtaacgggctatcttgcagaagtcagctggcatctgcctttcctggtctatctcctcccattgatttccattctgctggtaggacatttaaaagaagaccggacgggagaagtcgcttttacaccttcttcttctgcagatactacaaaagacaacgaatcctccgaacaatctacttccatagatataggaggcagcaagtacggtattcacatcaaacatctgatagagttgatgctcttctatggcgtgataacatatatcgtggtagtggtgatcttcaatctacctttcttaatggaaaagcatcacttctccagtggcaattccggattgatgatttcgcttttctttctggccatcactgctccgggtttttgcctggacaagattgtagccctgctgaaaggacgtacaaaagcatacagcctgctgtcgatggcattgggattgttattaatctggatagctccgatcgaatggctgattattcccggatgtatcctggttggtttgggatatggcattattcaacctatgctttatgataagaccacccagaccgcactgccgcaaaagaccacattggctttggcgtttgtgatgatgatgaattatctggctatcttgctttatccctttattgtcgattttttccagtggatattccatacccaatcacaggagtttccttttatctttaatcttctgataactattgttactcttttctgggcatatcggcgccgtaatacctttttgtttaacgaccaattaaaatag

SEQ ID NO: 958 - DNA, 1761 bp, Bacteroides ovatus
atggaaataatctcctatccatcagaaacaagaatgaatacgaatattaataatctactctatatgaatgacgaaaataaaataattatctaccaagtattcacccgcctgtttggaaataacaacaaccactgtgtctacaatggagacattgccaccaatggttgcggaaaaatggctgatttcacgctcaaagcacttggtgaaatcaagaaattaggtgctacacatatatggtatacaggcatcatcgagcatgccactcaaacggactatcgccgttataatatcagtccggatcatcctgctattgtgaaaggaaaagcaggttctccctatgctatcaaggattattatgatgtagatcctgacttggctaacgacgtgcaaggacgtatgaaagaatttgagaatctggtacatcgcacacatcgcacaggtctgaaagtaattattgattttatacctaatcacgtagcacgccaatatcactcggatgcacaaccggacggtacgaccgaattgggagctaacgatgactccagccaatctttcagcccatataataatttctattatattccgcaagcggaactccatgcccagtttgatatgaaagacggtgcagcagagccttaccgggaattcccggcgaaagctaccggtaacaatcgttttgatgctactcccaatatcaccgactggtatgaaacagtgaaattaaactatggagtggattatcagaatggcggtacctgccacttctccccgactccggatacttggataaagatgctggacattcttcttttctgggcatcaaaagacattgacggtttccgctgcgacatggccgaaatggttcctgttgaattctgggaatgggctattcctcaagtaaaagaggcttatcctgaaatacttttcatcgcagaggtttacaatccaggtgaataccgtaactatctgttccgcggcaagtttgattacctgtatgataaggtagggctgtatgacacgttacgcaatgtagcttgtggatatgaatctgcatccgctatcactcattgctggcaaagtctgaatggaatagagaaaaagatgctcaacttcctggagaatcacgacgagcaacgtatcgcttctgatttctttgccggcaacccgcgtaaaggaattcccgcactgatcgtttccgcctgtatgaacactaatcctatgatgatctacttcggtcaggagtttggagaactgggcatggatagtgaaggatttagcggaagggacggacggactactatattcgattattggagtgtagacagcatacgacgctggcgcaacggaggtaaatttgacgggaagatgcttactgaagagcataaacacctctactctatctaccaaaaagtactgacgatttgtaatgaagagcaggcaatcagcaagggagtattctttgatttaatgtatgccaatataaacggatggcgtttcaatgagcataaacaatatacttttatgcgaaaatataaaaatgagattctgtttttcattattaatttcgacagtcaactggtagatgttgctatcaatatgccttcacatgctttcgactttttacagattcctcaaatggaatcttatcaggccactgatttgatgacgggcgctaaagaagaaatcagtctattaccttataaacccacggatgtttcggtaggaggctataacggaaagattttaaagattactttttaa

SEQ ID NO: 959 - DNA, 2532 bp, Bacteroides ovatus
caaatgaaaaaaggtttgaaaatcgcagctatcacagtaggagtcatcatcattctgatgttccttcttcctttcgccttccagggaaagatagccgacattgtaaaaacagaaggcaacaagatgcttaatgcacaatttgactttaagaaccttaacattagcctgttccgtaactttccacaggcttctgtcactctcgaggatttctggttaaaaggtactggtgaatttgccaacgacacccttgtacaggccggagaagttactgccgcagtcaacttattctctcttttcggagatagcggttacgatatttctaaaatatttattgaagatacacgtttacatgccattgtattgccggacggacgtgccaactgggatattatgaaaccggatacaacagcaacagccgaagctcctgtttcagaagaagaagcatcttctcctttcaaagtgaagctacaacgctttgttatcaaaaacatgaacctgatttatgacgatcaacaagggaagatgtatgctgatatccgcgactttaacgcagtctgcgccggagacttaggaagtgaccgcactactctgaagttggaagcggaaaccaaatcacttacttacaagatgaatggaatccctttcctggccaatgccaatatctccgcaacaatggatgtggatgccgaccttgccaataacaaatacacattaaaagacaacaccatccgcctcaacgccattcaggcaggtatcgacggttgggtagccttgaaagatccggctatcgacatggacttgaaacttaacacgaacgatatcgggtttaaggaaatcttgtcactgattccagccatttatgcaacggaattctccagtctgaaaacagacggaaccgctacgcttactgcaacggccaaaggtatcttgcaaggcgacaccgttcctgcattcaacattgatatgcaagtcaagaatgccatgttccgctatccggctttactggcaggagtggatcaaatcaatatcagtgccaacgtccagaacccgggaggaaatatcgacctgacgacggtcaatatcaatcctttcagtttccgtcttgccggaaatccgtttagcctgacggctaatgtaaaaacaccgatcagcgatccggactttaaagctgaagctaaagggattctcaatttaggtatgataaaacaagtctatccacttggagatatggagttgaacggtaccattgacgccgatatgcaaatgtcaggacgcctttcctatatcgaaaaagaggaatacgaacgtatgcaagcttcaggtactatcggactgacgggtatgaaactcaaaatgaaagatatgccggacgtagaaatcaagaagtctctcttcactttcaccccgaaatacctccagttgagcgagacaaccgtcaacatcggaaagaatgatatcacagccgacagtcggtttgaaaactatatcggttacgcattgaaaggtactacattgaaaggaaacctgaatattcgttccaactatttcaatctgaacgacttcatggccgcttctgcggatgaagcgactgcatcagaaactgcgtctaccgactccgtagctacagctgccacgggtattatggaagttccccgcaacatcgacttccaaatggacgctaacctgaaacaggtgttattcgataagatgtctttcaataatatgaacggcaagcttgtggtaaaagatggcaaagtggatatgaaaaacctctccatgaacaccatgggtggcaacgtggtcatgaacggctactactccactgccaacgtaaagaagccggaaatgaaagccggattcaaactctccaatatcggtttcgcacaagcttacaaagaattggacatggtgcagaagatggctcctatcttcgaaaacctgaaaggtaatttctccggaagtattaatatactgacagatttggatgcaaccatgagccctgtactgaatacaatgcaaggtgatggcagcctttccacccgtgatcttagtttgagcggagtgaaagcaatcgacgaaatagccgatgccgttaaacagccaagtctgaaagacatgaaggtgaaagatatgacactggatttcaccatcaaagacggacgcgtagaaaccaaaccgttcgatatcaagatgggagactacacattgaatctttccggtagcacaggcctcgatcaaaccatcgactactccggaaaagtgaagttgccgacatctgtaggcaatatctctaaactaatgactcttgacttgaagatcggaggttcatttacctctccgaaagtcagcgtcgatactaaaagcatggccaatcaagctgtcgaggctgtagccgatgaagctatcagcaaactcggacagaaactgggactggactctgccgctaccgccaataaggattcaatcaaacaaaaggtgacagagaaagcagcagaaaaggcactggatttcttaaaaaagaaactcaaataa

SEQ ID NO: 960 - DNA, 1575 bp, Bacteroides ovatus
atgtcaagcgaattaagatgtaaaacaaccatgttaagaaggctacgtattggaatatcagcacttttatttgtgctgatttctttcttttttctcgatttcgcagaaatattaccgaacagttttcatcggctggcacatttacaatttattccagccatcctttcactaagtataggtatcttattatttctcattgtgttaacgcttttattcgggcgtgtatattgttctacaatctgccctatgggtatcttgcaggatgtgactgcacgaatttccaaagcaacgggaaaaaagaaaaaaaaatatagttacagtcctgcaaaaaacaaattgcgctggggtgtgctcggactgacagtggtcgggtttctatgtggatttacatttattgttggtttgctcgatccgtacagtgcgtatggacgtgtagtagtgcacatattcaaacctatctatatgctggggaataatctgctggaatcactctttgccagatttgacaattatacattttatcaggtagacacctccatcttgagcatttcttcccttctcatcgctattattactcttgcagtcatctttgtaatggcatggaaacatggacggacatggtgcaatacgatttgtcccgtaggaacaatattggggttattgagccgattttcattattcaaagtccgtattgatactgccaaatgtaatggatgcgggctttgtgccaccaaatgcaaagcagcttgcatcaatagtaaagaacacgctattgattatagtcgttgtgtagattgtttcaactgtttgggagtatgcaaacaaaaagcattagtttacgccccttctttaaaaaaacagtctgatgtagaaactcctgcaccatcatcaccggatttggattcatccaaacgccgttttttggttgccggtcttgttactgccggagcaacccccaaactcatctcccaagccaaggaatctgtagcaagcttggaaggtaagaaggcatacaaaaaggaaaatccgatcactcctccggggtctatcagtcgggaacacttccaacagcaatgcacatcctgtcatctttgtgtcagcaaatgcccttctcatatcttgaaaccggcttttatggaatatggcttggcaggcatgatgcaacctactgttagctttgagaaaggattttgtaactttgactgtactgtctgtggagatgtctgtcccaatggagcaattcttcccataagtgtagagcaaaaacatcttacacaaatgggatatgttgttttcatcgaggaaaattgcattgtttatacagatggaaccagttgcggagcctgctccgaacactgtcccacacaagcagtagcgatggtgccgtataaggacggattgacgattcctcatgtaaataaagaaatatgtgtaggttgtggaggatgtgaatatgtttgcccagcccgtccattccgtgccatctatatcgaaggaaatcccgtacaaaaagaagcaaaaccattcaaagaaagcgaagagcacaaagttgagatagacgatttcggattctga

SEQ ID NO: 961 - DNA, 1815 bp, Bacteroides ovatus
atggaaaaacaagaacagatcattactacatatcagcaaatcattcagaaaacagaactggagttacagaatgcacggaaacgtatctattatatcagtcttctccgcctgatcttattcgtaggagctgtagcaaatgccattatcttttggtctgatgggtggctatgtctctctgctttcgctatcttaccttttatcttattcatctggctggtaaaacgccataatttctggttctaccgaaaagactttctgaaaaagaaaatagaaatcaatgagcaggagctacgtgccatgcaatatgacttttctgattttgatgatggaaaagaatttgttaatccatctcatctctacactcttgatttagacgtatttggcgaacattctcttttccaatacatcaaccgcactgcaacgcctattggcaaactgcatcttgcaaactggttcaatgcacatctggaaaacaaagaagctattgaacatcgccaggaagctatacatgaattgtccacagacttagaatatcgccaacaaatccgcttactcggcttactctataaaggaaaacctgccgataccaccgaaatcaaagaatgggcaaacagtccaagttattatcggaagcgtacacttctacgcatcctcccgacagcggtaacgatcattaatttcttatgtataggtctagccattttaggtattatctcggccagtattgcaggaggagtgtttgttggctttgtattattcagcactattttttctaaaggaatcactaaactacaaacgacctacggagaaaagctacaaattctttcgacatacgctgaccagattcttctcactgaacagaaagaaatgcaaagtcatatactgcaaaagttaaaaacggaacttacaagtcagaatcaaaccgcttctcaagcagtacgccagctttcaaaactgatgaacgcgctcgatcaacgaagcaatctgctaataagcacgatactcaatggactgatattctgggagctgcgccaagtgatgcgaatcgagaagtggaaagaaatccacgcatctgaccttccccgctggatagaaaccatcggagaaattgacgcttattgttctctggcaacattcgcatataatcatccggattacatctatcctaccattgctgctcaatctttccatctgcaggctgaagctttggggcatcctttaatggatcgcaacaaatgtgtacgcaacggaataaacattgaaagacgtcctttctttattattatcacaggagccaatatggcaggaaaaagcacgtatttacgtactgtaggagtgaactatctactagcatgtataggggctcccgtttgggcaaagcggatggaaatatatccggctcgcctcgtcaccagccttcggaccagtgactccttagccgacaacgaatcttatttctttgccgaactcaagcgacttaaattaatcatagacaagcttgaagcaggagaagaacttttcatcatccttgatgaaatattgaaaggtacaaactctatggataaacagaaaggttctttcgccctcatcaaacaattcatgcacatgaacaccaatggcatcatcgccactcatgacttgttgctaggaactttagtggactctttcccacaaaatatccggaattactgtttcgaagctgacatcacgaacaacgaactcaccttctcttaccaaatgagaaatggagttgcgcaaaatatgaatgcctgctttttaatgaagaaaatggggatcgccgtcattaacgactaa

SEQ ID NO: 962 - DNA, 1500 bp, Bacteroides ovatus
gcaaaaacgaatatggcacaaggttcccgtcaaatacaatctcaggcgcaacagcaggtacagacgctctcgccccagcagattctggtcgtgaaactgttggagcttcccgcagtagagttggaagaccgtatccatgctgaactgcttgaaaatccggcacttgaagaaggtaaagaagagaatgctacggataatgaatattccgataccgagaatgcagaggatggcatggatagcgatgccaatgactatgattctttgagtgactatctgacagaagacgatattcccgattataaattgcaagagaacaaccgttcgaaagatgaacaagcggaggatattccattttccgactccacctctttttatgaaatcctgaaagaacagttgcgtgaacgcaacctgacagagcaccagtgtgacttggtggaatacctgatcggttcattggatgatgacggattgcttcgcaaatctttggaaagtatctgcgacgaactggcgatttatgccggtatcgaatcgaccgaagaagaactggaagaagcattgaacatcttacaggacttcgatccggcaggtatcggtgcgcgtagtcttcaggaatgtctgttgatacagattcgccggaaaaaagaagaagagaaaactcccagtcctatcttgaatctggaagaaaggattatcagagaatgttacgaagaattcacccgtaaacattgggagaagattataaagaaactggatattgatgaagagactttccaggaaaccattactgaaataaccaaactgaatccacgtccgggtgcttctttaggagaagcaattggcagaaatctccaacaaatagttcctgactttattgtggaaacgtatgatgacggaaccatcaatgtaagtctcaataaccgcaatgttcccgaactccgtatgagtcgtgacttcacggaaatggtggaggagcatacaaaaaacagggctaaccagtctaaggaatctaaagaagcgatgatgtttctgaaacagaaaatggatgcggcacaaggatttatcgatgctgtccgtcagcgtcagaataccttgatggttaccatgcaggcgattatcgacctgcaacgtcctttcttcttggaaggagatgaatcgctattgaaaccgatgattctgaaagacgtggcggaacgtacgggattggatatttcgacaatctcccgtgtgagtaacagtaaatatgtacagacgaattacggtatctatccgctcaaatactttttcagtgacggatataccacagaagatggcgaagagatgtctgtccgtgagattcgtaagatcctgaaagagtgtattgaaggcgaggacaagaagaaacccctgaccgatgatgaattggcggatatattaaaggagaaaggttatcccattgcccgcaggacagtagccaaataccgtcaacaactgaatattcccgtggcgagactgcggaaataa

SEQ ID NO: 963 - DNA, 2013 bp, Bacteroides ovatus
atggaaaagacacttaatctcgtaaaaaacgatccctggctggaaccttttgccggtgctatcaccggacgccatcagcatgtattagacaaagaagctgaattgacgaataagggaaaacaaaccctttcagattttgcatcggggtatctttattttggattgcatcgcaccgataaggggtggactttccgtgaatgggctcctaatgctactcatatttatatggtgggtacatttaataattgggaggaaaaagctgcctacaagctgaaaaaacaaaagaatggtatttgggaaatcaacctgccggcggatgccattcatcatggcgatctctacaaactgaatgtatattgggaaggcggacaaggcgaacgtattcctgcgtgggctacacgtgtggtacaggatgaacagaccaaaatattcagtgcacaagtctgggctccggagaacccctataaattcaagaagaaaacatttaagcccgacacgaatccgctgttgatttatgaatgtcatatcggaatggcacagcaggaggaaaaagtgggcacatataacgaattccgcgagaaaatacttcctcgtattgctgaagaaggatataattgtatccagattatggctattcaggaacatccatattatggaagcttcggctatcatgtatccagtttctttgctgcctcttcgcgttttggtacccccgatgaactaaaagcattgattgatgctgctcatgagatgggtattgctgtgattatggacatcgttcattcacatgcagtgaagaatgaagtagaaggactaggaaactttgccggtgatccgaatcagtatttttatccgggcgctcgtcgcgaacatccggcttgggactctctctgctttgattatggcaagaatgaagtgatccacttcctgttgtcaaactgcaagtactggctggaagaatataaatttgacggattccgttttgatggagtgacttctatgttatattacagccatggactgggtgaagctttctgtaactacggagattatttcaacggtcatcaggatgataatgcaatttgttacctgacgctggctaatgaagtgattcatcaggtaaatccaaaagcgataaccattgccgaagaagtttccggtatgccgggactggctgccaaagtagaagatggcggttacggcttcgattatcgtatggccatgaatattccggactactggatcaagacaatcaaagaaaagatcgatgaagactggaagccttccagcatgttctgggaagtaaccaaccgtcgccaggatgaaaagaccatttcgtatgcagaaagtcatgaccaggcattagtaggagataagacgattatcttccgcctgattgatgccgatatgtactggcacatgcagaagggagacgaaaattatgttgtcaaccgtggtattgctttgcataaaatgatccgcctgctgacctcttcgactatcaacggaggttatctgaactttatgggaaatgaattcgggcatcccgaatggattgacttcccgcgtgaaggtaacggatggtcgtgcaaatatgcccgccgccaatgggatttggtggacaacaaaaatctgacctatcactatatgggggattttgataaagaaatgctgaaagttctcaagagtgtgaaagatttccaggcaacacctgttcaggaaatatggcataatgatggcgatcaggtattggcatacgaacggaaagaccttatatttgtctttaactttaatccaaagcagtcattcactgattatggattcctggtaactccgggagcttatgaagtgatactgaacaccgacgatgtagcatttggaggaaatggtttggcagacgactctgtcgtgcacttcactattaccgatccgctgtacaagaaggaaaagaaagagtggctgaaactctatattcctgcccgtaccgctgtagtacttagaaagaaaaaataa

SEQ ID NO: 964 - DNA, 2310 bp, Bacteroides ovatus
gcaagctataaactcaaaaagaaaattatgaagaaatgttggttattatttttagtgcttagttgcacgtttcttgcccagtccaaagactggacacaatacgttaatccgttaatgggaacacaatcatcttttgaattatcaacaggtaacacctaccctgccattgcccgcccttggggaatgaatttctggaccccacagaccggaaaaatgggagacggatggcaatatgtctatacagccaataaaatccgtggattcaaacaaactcatcagcccagcccatggataaacgattacggacagttctccattatgccgatggtgggtaaacctgaattcgacgaagaaaagcgggctagctggttcggacacaaaggagaagaagcaactccttattactacaaggtgtatctggccgaatatgatattgtcacggagatgtctccgaccgaacgtgctgttctcttccggttcactttcccggaaaacgcacattcgtatattgcagtcgatgcatttgacaaaggttcttttattcagattatcccagaagaaaacaaaattatcggttatagtacacgcaatagcggaggagttcccgaaaacttcaagaactattttattattcaattcgataagcctttcacctataaagccactgtaaataatggaaatattcaagaaaatgcaaccgaacagacaactgaccatgcaggagccattataggttttaaaactcaacgtggagaacaagtacatgcacgcatcgcctcttcctttatcagcttcgaacaggctgcaagaaatatgaaagaattaggaaatgacaatctggagcagataaaacaaaagggacagaaagcatggaaccaagtactgggaaaaatcgaagtggaaggaggaaacctcgatcaataccgcactttctactcctgcttataccgttcgttacttttcccccgaaaattctacgaactggacgaagccggaaaacctgttcattacagcccttataacgggcaagttctaccgggatatatgtttaccgacaccggattttgggataccttccggtgtcttttcccattactgaatctgatgtatccgtcgatgaataaagaaatgcaggaagggctcatcaatacctacaaagaaagcggattcttccccgaatgggccagccccggacacagagactgcatgataggaaataattcggcttccgtactggcagatgcttatttaaaaggtattaaagtagaagatgtgaaaactttgtacgaagggttaatacacggaacaaagaacgtacatcccaccgtatcttccacaggaagacgcggatacgaatattataataagttaggctatgtcccttatgacgtaaaaatcaatgaaaacacagccagaactttggaatatgcctacaatgactggtgtatctatcaattagccaaagaattaaagcgaccggaaaaagaaatacagctctttgccaaacgggcgatgaactataagaatgtattcgataaagactccaagctcatgcgaggaaaaaatgaagatggaacattccaatctccattctcaccattgaaatggggagatgcatttaccgaaggaaacagctggcactactcatggtctgtattccacgatccacaaggattaattgacttaatgggaggaaaagatatgtttatcactatgctggattctgtattttccgtacctcctgtctttgatgagagttattacgggcaggttattcatgagattcgtgaaatgacaatcatgaatatggggaattacgcgcatggcaaccaaccaatccaacacatgatctacctatacaactatgccggtcaaccctggaaagcgcagtattggctacgccaggtcatggatagaatgtacacaccgggccctgacggatattgtggagatgaagataatgggcagacttcggcatggtatgttttctccgcattaggtttttaccccgtatgtccgggaaccgacgaatacgtcgttggagctcctctttttaaaaaagcaaccttacatcttgaaaacggtaacagcctcatcatccatgcaaccgataacaacaagaagaatatgtatattcaaacaatgaatctgaacggcacagaatataaaaagaactatctacgccatgaagacttattaaaaggaggaaacattaacttccaaatgggaagccagcccaatttaaacagaggaacggaagaggaaagctttccttactccttctctaaagtcctaaaaaagattcgttaa

SEQ ID NO: 965 - DNA, 1563 bp, Bacteroides ovatus
ttgtttccatcatctaataatgtgaataaggaaatgaaaagaaaattagtttatgtttgtctgctggcaatggttgcgggaggaatgatgtccttttcctatgacatacccgaaaaacaggagacaggcggccgggaagatcgagtgatctcttttcccggagctgaaggacacggtagatacacgacaggcggccgtggtggtaaagtgtatcatgtgatttctttggaagacgatggttcgcaggggactttacgttgggctttgaaacaaaatggacctaaaacgattgtctttgatgtggcaggtacgattcatctgaaatcggaattacgaacagggaaagatcatctcaccattgcaggacagacttctcccggaggaatctgtctggctgattatggcttttctattaattctaataatgtaattatccgttttcttcgtttccgccccggagaagccagtgggaaagaacccgatgggttgggcggctgtgataagaaagatattatggtagaccattgctctgtcagttggagtgtagatgaatgtctttccgtttatggtatggaaaactctacggtacaatggtgtattggctctgaagcattaagaaaagcgactcatgtaaaaggggcacatggatatggaggcaattggggaggacataaagcttcttatcaccataacctgatcgctcactgtgagagtcgcgtgcctcgtctgggccctcgtccttctacattagctcttggcgaatgtgttgatatccggaataatgttttctacaactgggctggaaacggctgctatggcggggaagatcagcatgtcaatatcgtcaataactattataaaccgggaccggcaacaaaacaggcttccaaacaggtgcaatatcgtattgccaaagtcggagtttatccgcaagcttatgtttacgttgatggagaacccaaaaagaacttagcttttcaaccttacctgcagaaatggggaactttctatattgatggaaataagatagaaggtaacaacaaagttactgccgataactggacggacggagtctatgcccagttgaagaatgatgaaaaagtagatttcctctggacagaagatgccaaagaatctatccgtctgaaagaacctcttgattttggagtaatcactacttattcggctgacaaggcttatgaacaggtgatgaactatgcaggttgctgtaattatcgtgatgaagtagacaaacgtatcatctccgacacccggaaaggaacggcaactttcaccggagaaggaaataaacccggatttatcaatagccccaaagacacaggcgattctccctggccggaattatcaatagcaggtctttcggcaccggtagattcggacggtgatggcatacctgatgagtgggaaataaaaaacggacttgatccgaataatcccgtagatggaaatacaaaaacgaaagatccgaatggacaatatacgaatcttgaggtatatttgaatagtttggtgcaacatatagtcgatgcacagaacaaatag

SEQ ID NO: 966 - DNA, 2004 bp, Bacteroides ovatus
aatatggatataaaagaaaaaatagaggaattgcgtgccgaacttcatcggcataattataattattatgtgttgaatgctcctgaaatctcggataaagagtttgacgataagatgcgtgaacttcaggatctggaacaagcacatccggaatataaagatgaaaattcacccactatgcgcgtggggagcgacttgaacaagaattttacgcaagtggctcataaatatcctatgctgtcattggcaaatacatattcggaagcggaagtgacggacttctacgatcgtgtccgtaaagcgctaaatgaggatttcgagatttgttgtgaaatgaaatatgacggtacttctatttcgttgacctatgaaaatgggaagttggttcgtgccgttacccgtggagatggagaaaaaggcgatgatgtgacggataatgtgaaaacaatccgttctatcccgcttgtattacatggtgataattatcctgcttcttttgagatacgtggggaaattcttatgccatgggaagtgtttgaagagttgaatcgggaaaaagaggcacgtgaagaaccgctttttgccaatccaagaaatgcggcgtccggtacattgaagttgcaaaattcttctattgtagcttctcgcaagctggatgcttatttatattatttattgggagataatctgccttgtgacggacattatgaaaatcttcaggaagcggcaaaatggggctttaaaatctctgatttgacgcgtaagtgccagacattggaggaggtctttgaatttatcaactattgggatgtagaacgtaaaaatctaccggttgccacagacgggattgttttaaaggtgaacagtttgagacaacagaaaaatttgggttttacggctaagtctcctcgatgggctattgcctataaattccaggcagaacgtgcattgacccgattgaataaggtgacctatcaggtaggaagaaccggagcagtcactccggtagctaatctggaccctgtacagctttcgggaactgtcgtaaaacgtgcatccttacataatgcggatatcatcgaaggacttgatttgcatatcggagacatggtttatgtggaaaaaggtggtgaaattattcctaagattacgggagtagataaagatgcacgtagttttatgcttggggagaaggttcgattcatcgtcaattgtcccgaatgtggtagtaaattagtcaggtatgaaggggaggccgctcattattgccccaatgaaacagcgtgtcctcctcaaatcaaaggcaaaatcgagcattttattagtcgaaaggctatgaatattgatggattgggaccggaaaccgtggatatgttctatcgtttgggattaattaaaaatacggccgacttatataaactcacagctgatgatatcaaaggtttggatcgtatgggagaaaaatcggcggagaacattataacggggattgcacaaagcaaaaccgttcctttcgagcgtgttatttttgctttgggaattcgttttgttggtgagactgtggccaaaaagatagcaaaatcgtttgagaatatagatgatctgcaacaggcagatcttgaaaaattggtaagtatcgatgaaatcggagaaaaaatagcccagagtatacttgcatattttgcgaatgagtctaatcgtgagttggttgccaagctaaaagaggccggactgcagctttatcgcaccgaagaagatttaagcggatatacggataagttagcgggacagtctatcgttatcagcggtgtgtttgttcatcattcacgtgacgaatataaagagcttatcgagaaaaacggagggaaaaatgtaggaagcatttctgcgaaaacaagttttatactggctggggacaatatgggacctgcaaagcttgaaaaagcaaaaaaacttggaataaccatattaagcgaagacgaatttctgaaacttatatcgtaa

SEQ ID NO: 967 - DNA, 1416 bp, Bacteroides ovatus
acagtaataatgaagaacttcatggacgaaaacttcttgctgcaaacagaaactgcgcaaaagttgtatcacgagcatgcggctaaaatgccgatcatcgactatcactgtcaccttatccctcaaatggtagctgacgactacaagtttaaatcactgactgaaatctggttgggcggtgaccactacaaatggcgtgcaatgcgtacaaacggtgtagacgaacgtttctgtacgggaaaagataccacagactgggaaaaatttgaaaaatgggcggaaacagtaccttacactttccgcaacccattgtaccactggactcacctcgaattgaaaactgcatttggtatcaataaaatattgaatccacaaaccgcacgtgaaatttacgatgaatgtaacgagaaactgtctcaacccgaatattcagctcgtggaatgatgcgtcgttatcatgtagaagccgtttgcacaacggatgatcctatcgattcattggaatatcatatcaaaacacgcgaaagcggatttgaaatcaagatgttaccaacatggcgtcctgataaggctatggctgtagaagtccctgcagatttccgcagttatgtagaaaaactggcagaggtaagtggcgttatcatctccaactttgatgatatgatcgctgctttgcgcaaacgtcatgacttcttcgcagaacaaggctgccgtctgtctgaccatggtattgaagaattctacgcagaagattatacagatgctgaaatcaaagccatctttaataaggtatatggtggcgcagaattgaccaaggaagaaattctgaaattcaaatcagcaatgcttgtgatcttcggtgaaatggactgggaaaaaggatggactcaacaattccattacggcgctattcgtaacaataacacgaagatgtttaaattactgggtgctgatacaggtttcgactctatcggtgaattcacaactgccaaagcaatggctaaattccttgatcgcctaaacactaatggcaaattgactaaaacaatcctctacaacttgaacccatgcgccaacgaagtaattgcaacaatgctgggtaacttccaggatggttctatcccgggaaaaatccaatttggttccggatggtggttcctcgatcaaaaggatggtatggaaaaacaaatgaatgctttgtcagtactcggtcttttgagccgcttcgtaggtatgttgaccgactctcgttcattcctatcctacccgcgtcatgaatatttccgccgtacattgtgtaacctggtaggacgtgacgtagaaaacggagaaattccggcatctgaaatggatcgtgtaaaccaaatgattgaagatatcagctacaacaatgccaagaacttcttcaagttctaa

SEQ ID NO: 968 - DNA, 2151 bp, Bacteroides ovatus
tgcggcacccgatccggaggcgatgattcgtcagttgcacgaactgtaactcatctgttgagtactttttacatccatcgatatccctatatacgcctgattatcccttggataacaggcgttttttgtggagatcatttttttgaccgttcatgggaacctttttggagtgttctagcctttggactttgtattgctttattgtttgttctttatttcctgaaacgccattcattgcgatggtgctttggattagcagtctctatcctttgttttataggaggatggcttggaataacttggcaattacaacacgctgtctactcttttccggaagaagaaacagtgtatcgggttttaataacggatgcacctcaagcgaaagaacatacctacctctgccagacattattaaaggaacgtcgtgatactgccggcacatatccgatagaacgtgctgtaattctttatctacagcaagattcggtcgttacccggttgaaaagtggagatgaactgctgatttctgcccgtatttctccccctctcaacaatcggaactttgatgaatttgattatgcccgcttcctgatgcggaaaggaatcagtggaacaggatatgttgcatccgggaaatggacaaaacaggacgggatgaataaccttgatctcaaaagtatagccagctcttgccgaagaaggatgatttcactttatcagaaactgggattttccggtgatgaactggctgtactttcagcactgaccataggagacaaaacggaattaagtgattcggttcgtgagagttattcggtggccggtgcaagtcatattctagctctatccggtttgcatatcgggcttttatatacactgctctttttcatactgaaacctattgcccgaagaggaaatataggtagagctatacgttctgttcttcttcttatcctattatgggcttttgcctttttcacaggactttctccttcggtagtacgctcggtcagtatgttttcaattttagcaatggcagatatggttggtcgccaaccgctatctctaaatacattggcggcagctgcatggttgatgctattctgtaatccggcatggttgtttgatgttggtttccagctctctttccttgctgttgcttccatcctattgattcaaaaaccaatctatcacctgattacggtgaaaggtagaataggaaaatatatttggggactgatgagtgtgtctgttgctgcacaaataggaacggctccgcttgttatgttttatttttcccggttctctgtacattttctattgacgaacttggttgttattcctttcattacgattatcctgtatgctgctgtcattatgcttcttctgactcctctttcgtggcttcagatcgtagtggccgaaggtgttaagaaactattggaaggacttaacttcttcgtccgatgggtggaacagcttccttacgcttctatagatggaatctggctttatcagtcagaaatattgggtatctatatcgttggctttttgttaacctattatttcatgaaccgtcgataccggaatttattgatttgtcttttttctatcttattactggggacttatcattcaacattatattggctagatcgtccccggacaagcctggtcttttataacgtgcgcggttgccctgcagtacattgcattgagagcgatggacgttcctggataaactatgtagatactatctccaatgaaaaacgtctgaagcgcatggctgctaactattggaagcatcatcatcttctgcctcccaaagaaataactgccgattgccggtatatggaacttaatcgtcagcagcagattatatcctatcatggctgtcatatttgtgtaataaatgataaccattggcggaacaaaaccaccgtttctccgttatatattcagtatctttacttatgcaaaggatatgacggacatctggaagagctcacccgaatcttttctttctcttacgtcatattggacgcatctctctcggaataccgcagacacctccttgaaagcgaatgcaagcaatccggtctgcggtttatctcgctatccgacgaaggttctgtccgctttttgctctaa

SEQ ID NO: 969 - DNA, 3156 bp, Bacteroides ovatus
atgttttctaagttttttatcaaccgaccgatatttgctactgtccttgccctgcttattgtagtagccggtctggtcacactcaatatattgcctgtggcgcaatttccggagatcacaccgccaacggtgcaggtctctgccgtttatcccggggcaaatgctgaaactgttgctcaaacagtgggtattcctatcgaacagcaggtgaatggtgtagacggcatgctttatatgtcttccaattcttcatcttcgggagcatattctctgactattacattcgctgttggtacggacatcgatatggcaactgtgcaggtacaaaacagggtaagtatcgcacaatcatcgctgccggaaccggtggtggtgcaaggggtcactgtgcagaaacaatcttcaaacattgtgatgtttttgacaatgacttcgcaggactctgtgtacaacagcctgtatctgactaattatgccaaattgaatttagtggaccagttgacacgtgtgcccggagtgggtgctgtgaatgtgatgggagcaggggattattcgatgcgcatctggctcgatccggaggctatgcgtatacggaatatttcaccgcagcaagtctatcaatccatccagtcgcagaatgtggaagtatctgccggatatatcggtcagcctatcggacaggataataataatgcttttcagtatacgttgaatgttcagggacgattgaaatctccagaacagttcgggaatattattatccgccgtgagcaggacggggcgatgcttcgtctgaaagatattgcacgcattgatttggggtctgcttcatacagtgtagtgtcgcgattgaatggaaaacctacggctgctattgctatttaccagcaaccgggttccaattcgctggatgtttcaaaaggagtgaaagctaagatggaagaacttgcagaaagtttcccgtcaggagtggcctataatgtcactttggatacgactgatgttatccatgcttccattgatgaagtgatggttactttctttgaaacaactttgctggtgatactcgttattttcttgttcctgcagaattggcgggcagtgattattccttgtattactatcccggtatcgttgatcggtacatttgccgtaatggcggcatttggtttctctatcaacacattaacattgttcggactgattttagcagttgctattgtggtggatgatgcgatagtggtggtggagaacgcttcgagattattggaaactgggcagtactcacctcgtgaagccgtgacaaaagcgatgggagagatcacgggcccgattgtcggggtggttctcgtattgcttgccgtgtttattccaacaatgatgattagtggaatttcaggtcagctgtataagcagtttgcgctgactattgccgcttctaccgtattgagcggtttcaattcgttgacattgactcctgcgctttgcgcactgtttcttgaaaagagtaaaccttctaacttctttatatacaaaggtttcaataaggcttatgacaagacacaaggggtatatgacaaaattgtcaaatggttgcttcaacgtccgggaatggctctcgcttcttatggcgctttgactgttattgctctattgctttttatgcattggccgtcaacttttatcccggacgaggatgatggatattttattgctgttgttcaacttccgcctgccgccagccttgagcgtacgcaagcagtgggagaaaagataaacggtattctggattcttatccggaagtaaagaattatattggtatttccggcttttctatcatgggtggtggcgaacagagtaactctgcaacttattttgtggtgctgaaaaactggagtgagaggaaagggaaggagcatacggctgctgccatagtcaaccgttttaatggtgaagcgtatatgactattcaggctgcggaagtatttgccatggttcctccggctattccggggttgggtgcatccggtggtttacagcttcagttggaagaccggcgtaatctggggccgacggaaatgcagcaggccatcaatgccttgcttgcttcttatcattcgaaaccgactttagcatctgtatccagtcagtatcaggcaaatgttccgcaatatttcttgaatatcgaccgtgacaaagtccagttcatgggaattgccttgaacgatgttttctctacattaggctattatatgggagcggcttatgtgaatgattttgttgaattcggccgtatttaccaggtgaagatcgaggcgcgcgatcaggcacaacgcgtgattgatgatgtcttgaagttaagtgtgccgaattcggcaggagagatggtgcctttttcttctttcaccaaagtagaggaacagttaggccaggaccagattaaccgctataatatgtactcgactgcttctctgacttgtaatgttgctccgggaagtagtaccgggcaggctattcaagaagtggaagcattgtttaaggaacagctgggagatgagtttgggtatgaatggacttccgttgcctatcaggaaacccaggctgggaatacgactaccattgttctgattatggcgttaattgttgcattcctggtacttgctgcacagtatgaaagttggactagcccggtagcagccgtcatcggattgccggtagccttattaggtgccatgattggctgtctgattatgggaactccagtcagtatttatacgcaaatcggtataatcctgttggttgcactttctgcaaagaacggaattttgattgtggaatttgcccgtgatttccgtgccgagggtaattcaattcgggaagctgcctttgaagcgggacatgtccgcttgcgtccgatcctgatgacttcttttgcttttgtattaggagtgatgcccttgttattcgccaccggtgcaggtgcacaaagtcgtatagcattgggggccgctgtggtatttggtatggccatgaacactttattggctaccatttatattcctaatttctacgaatttatgcagaaattacaagagcgattcagcaaaaagaaaggaaatgaggatggtgggaaagatgctgcaatgcaaaaataa

SEQ ID NO: 970 - DNA, 1068 bp, Bacteroides ovatus
gagaagatgaagaaaataaaaacaatctaccctgttatcctgttgacattgcttttgctggtttcctgtaagtcgaaaaagaatatggtggctaccttgccacgccctgttttaaattcagattctatttatccggatacggctaatgccatagccgggttattctcccccgaccactcgcaactcaaagagctgaatgtttccaaaaacaaaaagcagaatacaaaggaaaagacttctaccgatacacacgaatcgtcggatctggtactgcggggaacaaaaatcacttcttccagcgtagatgtatcttctgtctataccggagtggaccgtgtagtaaaatatgactttacacaccgcgatgttcccgaagcctttgaaggtttccgtatcgctttcatttccgacttacactacaaaagtctgctgaaagaaaaaggcctgaacgaccttgtccgcctactgattgctcaaaaggctgatgtgcttctaatgggtggtgactatcaggaaggttgtgaatatgtggaacctttgttttccgcactggcacgcgtaaaaacaccgatgggcacttatggggtaatgggcaataacgactacgaacgttgccacgacgatattgtgaatacaatgaaacattacggcatgcgtccgttagaacatgaagtagatacgcttcgtaaagacgggcagcagatcattatcgctggagtgcgcaatccttttgatctggggcgcaacggagtatcgcctactctggcactctctcccaaagattttgtcatcttactggttcatactccggattacatagaagatgtttcagtagctaacaccgaccttgccctggcaggacacacccacggcggacaagtccgtgtattcggagttgccccggcacttaactcacactatggcaatcgtttcatcaccggactggcatataattctgcaaaaatacctttgattataacaaacggaataggaacctccaaattaccaatccgtgttggtgctccggcagaaatcatcgttattactcttcatcgattgacggagtaa

SEQ ID NO: 971 - DNA, 2022 bp, Bacteroides ovatus
attgtaaatagtaaaatagtaaatagaatgactgctcaaagtaacataactcctgaaagcattgtgagtgatctccgttacctgcaactgctttcccgaagttttcctaccattgctgatgccagtacggaaataatcaacttagaggctatcttaaatctacctaaagggacggaacatttcctgactgatattcatggagaatatgaagcttttcagcatgtactgaaaaatgcttccggtgcggtaaaacgtaaagtaaatgaaatattcggcaacactcttcgtgaagctgaaaagaaagaaatctgtactttgatttattatcccgaagagaaactgcaattggtgaaggcccgtgaaaaggatctggatgattggtatctgattacgctgaaccaactggtgaaagtctgtcagaacgtgtcttccaaatatactcgttcgaaggttcgtaaatcactgcctgccgaattctcttatatcattcaggagttattgcacgaatcgtctatcgaaccgaataagcatgcttatattaatgtaattatcagcacaattatcactacgaagcgtgccgacgatttcattatcgctatgtgtaatctgattcagcgcttgactattgattctcttcatatcgtaggtgatatttacgaccgtggtcctggtgcgcatatcattatggatacattgtgtaattaccacaatttcgatattcaatggggaaatcatgatattctctggatgggagcagcttccggtaatgatagttgtatcgctaacgtgatacgtatgtctatgcgctatggtaatctggggacacttgaagacggatacggaatcaatttgcttccattggctacttttgcaatggatacgtatgccgatgatccttgcacgattttcatgccgaaaatgaactttgccgatgctcattataatgagaagactttgcgtctgattactcaaatgcataaagccattaccattatccagtttaagctggaagctgaaatcatcgaccgccgtccagaattcggaatggctaatcgtaaacttctggagaagattgattttgaacgcggcgtctttgtatatgaaggaaaagaatatgctttgcgtgataccaatttcccgactgtagatccggcagatccttaccgactgactgaagaagaacgtgaattggtagaaaagattcattattcatttatgaatagtgagaaattgaagaagcacatgcgttgtctgtttacctatggcggcatgtatctggtttcaaactcgaatcttctttatcatgcttctgttcctctgaatgaggatggcagctttaaacatgtcaaaatacgtggtaaggaatactggggacataaattgctggataaagccgatcaattgatccgtaccgcttatttcgatgaagaaggagaggaggataaggaatttgctatggattatatctggtatatgtggtgtggcccggaagctcctttgtttgataaagataagatggcgacttttgagcgttattttgtagaagataaagagttgcataaagaaaagaaaggctattattacacattgcgtaaccgggaagatatttgtgaccagattttgacagagtttggagcttcagggcctcattcgcatattatcaacggtcatgtgcctgtgaaaacgattcagggggaacaacctatgaaagccaatggcaagcttttcgttattgatggcggtttttcaaaagcttatcagccggaaacgggaattgcggggtatacgcttgtttatcattctcatggtatgcaactcgtacagcacgaaccattccagtctcgtcagaaagccattgaagaggggcttgatatcaaatcgaccaacttcgttctcgaatttaattcgcaacgaatgatggtgaaagataccgataagggaaaagaactagtgactcaaatacaggatttgaagaaactgcttgttgcttatcgtactggtctgataaaagaaaaagtgtga

SEQ ID NO: 972 - DNA, 1320 bp, Bacteroides ovatus
atgaagaagaaaatcaccgatatatggaagtttcttacgtatgacatctggcgcattacggaagacgaagtgacccggaccaagttctcactctacaatattataaagaccgtctatctttgtatcaatcggtttaccaaagaccggatggccaataaagcttctgcacttacttatagcacattgcttgccattgtaccgatacttgccatcctgtttgccgtagcgcgtggtttcgggttcgacaacctgatggaacatcagttccgcaacggttttggaggaaatacagaaacaacggaggccattctctcatttgtcaattcctatctttcacagaccaaaggaggtattttcattggagttggtttggtaatgttgttatggacggttatcaatctggtcagtaatattgaaatcaccttcaaccgtatctgggaagtgaaaaaagcacgatccatgtatcgcaagattacggactatttctccatgttcctgctgatgccgattctgatcgtggtatccggaggactttctctgtttatgagcaccattctcaagcagatggatgatttcgtcctgctcgctcctgttatgaaattcatgatacggcttattccttttgtcctgacatggctgatgttcaccgggctgtacatcttcatgccgaacacgaaagtgaaattcaaacacgctctcattgcaggtattctggcagggtctgcttatcaggcttttcagttcctgtacatcaacagccagttgtgggtgtcaaagtacaatgccatttatggtagttttgccgcacttcccttatttctgctttggttgcagatatcctggacaatctgtttgtttggagccgaactgacgtatgccggacagaatatccgcagctttagctttgaccaggacacccggaacatcagcagacgataccgggattttatatccatcctgattatgtcactcatagccaaacgattcgaaaagaacgaaccgccctatacggctgcagaaatatcggaggagcatcagatccccatccgactgacaaatcaggtactttatcagttacaggaaatagaattgattcacgaggttgttaccgacgaaaaaagcgaagaaatcggttaccagccttcaatggatatcaatcaactgaatgtggctgtcctgctggaccgtttggacacatacggctccgagaatttcaaaatagacaaagacgaagaattcaacgacgaatggaaggtgctgaccgaatccagagaagaatactataaaaaagcaagtaaagtattactgaaggatttgtag

SEQ ID NO: 973 - DNA, 1176 bp, Bacteroides ovatus
ttgatggaaacatttacattcaatactgtcgaactgattcttttatcggtggcaggtattctttttatcatccagctcatttattatttcggcctgtacaatcgaatacatgtccacaataaagctgtaggcaaagaagaggtgcatttcatacgagaactgcctccactttccgtgattctctgcgcacgcaatgaggctgaaaatcttcgtaaaattctacctgccattctggaacaggactatccacaatttgaagtgattgtcatcaatgatgcttccacagatgataccgaggatatactgggagtgatggaagaaaaatatcctcatctttatcatagttttacgcccgaaagtgcacgctatatcagtcataagaaactggctctaacgttaggcatcaaagccagcaaacatgactggctcgtatttacggaaacaaactgtatgcccgccagcaaccagtggctaaaactgatggcacgtaatttcactccgcagacccaaattgtgttgggatatagcggatacgaccgcacaaagggatggttgcacaaacgtactgcattcgatactttgttccagtctttgcgctatctgggattcgcgctagccggaaaaccttatatcggtatcggacgcaacctagcttaccggaaagaactattctttcaacagaaaggtttctccaaatacctgaatctgcaacgtggagaagatgatttattcattaatgaactagctacctccgccaacacccgtgttgaaacagacttcaacgctaccacacggatacagcccgtatatcgctacaaagattggaaagaagaaaaggttagttatatggctactgccagattctaccacggaatacagcgttacctcctgggatttgagacattctcccgtttgttattctatattgcctgtatagcaggtatcgtattcgggatacttaatttccactggctagtagcaggcatcgcattcctgatgtggttactgcgctttacagtacaagctgtcattatcaaccgcacggcaaaagaaatgggtggaggacgaaaatactatttctcgttacctgttttcgaccttatccaacctgtacagtcattgaagttcaaactctgccgtttcttccggggaaaaggagatttcatgagaagataa

SEQ ID NO: 974 - DNA, 1782 bp, Bacteroides ovatus
gacgtaggggtcgggcgttcgagtcgcctcattccgacaaagcaaagggtaactttctggagtacagcaagttaccctttatctttatttagttaccgggacgaaatcgggacggctatacaaaaaacactaacccattatatcatgaaaaacagaatttatctctttacagtagcagtagcttcttttatgtgcatcagttgtacaaagactcaaactaccctctccgagaatgaaaagacagtcaatcctcccatcatgggatggagttcatggaatgcatttcgcgtagacatcagcgaagacatcatcaagcatcaagccgacctgatggtaaaaaaaggtctgaaagatgccggatatcattatgtcaatgttgatgacggctatttcggaaagcgcgatgacaacggaattatgcatacccacgaacaacgtttcccgaatgggatgaaaccgattgcggattacgttcacggcctgggaatgaaagccggtctctataccgatgcgggcaacagtacatgtggctccatgtgggacaatgatgcagcaggcgtaggagctggtatctatggacacgaaccgcaagacgcccaattatactttggcgactggggtttcgactttatcaaaattgattactgcggaggagatgcgctgggacttaatgaaaaggaacgctacacttccatccggaacagtatagacaaagtaaacaaagatgtttccatcaatatttgccgatgggccttcccgggcacttgggctaaagatgcagcaacttcctggcgtatcagtggagatattaatgcacattggggatcattaagatatgtagtcggaaagaatctctacctgtcggcttatgccggaaacggacattataatgacatggatatgatggtcatcggattccgcaacgacagtaaagtaggtggacaaggtcttactccgacagaagaagaagctcatttcggtttgtggtgtatcatgagctctcctttgcttatcggatgcaatctggaaaacatgccggattcttcgctcgaactgctgacaaataaagaactgatcgccctcaaccaagatccgctgggcttacaggcttatgtagctcaacatgaaaatgaaggttatgtactcgtaaaagatattgaacagaaacgtgggaatgtacgtgcagtagctctttacaatccttccgataccatctgtagtttttccgtgccgttctcttcactggaatttggaggaaacgtaaaagtacgtgatctggtaaaacatagcgatttaggaaacttctccggtaccttcgaacaaacgcttcctgcacacagtgccatgttcctccgcatagaaggcgaaacacgtctggaaccgaccctctacgaagcggaatgggcttacctacctcttttcaatgaccttggcaaaaatcctaaaggtattatttatgcccatgataaggaagcctccggcaaaatgaaagtaggtttccttggcggacaacctgaaaactatgccgaatggcgggaagtatatagcgaaaatggcggacgctatgatatgaccatccattatttatatggcaaaggacgacaaatagaactggacgtaaacggtatcattaccaaaatcgactctttgggagaggataacggtcataaccaaatcacagttcccgttgaattaaaagccggatacaacactattcgcatgggtaatagttataactgggcaccggacatcgactgcttcactctgacaaaagcattgtaa

SEQ ID NO: 975 - DNA, 2904 bp, Bacteroides ovatus
atgaaaaacatatcaactctatatatcatgaaacgacttttagtaagtattgctatcgtatttatctccatactgaccgtagcgggacaaaatcactctttcagtttatccggcaaatggaatttccagatagaccgggaagataccggcgtcaaggaacaatggttcaaaaaatccctcgacgattctatcaacctacccggctccatgcccgaaaaattgaaaggagatgaagtgaccgtccgtacccaatggaccggaagcctctacgacagttcttactacttcaacccatatatggaaaaatacaggatagagggacaagtaaagctacccttctttctgactcccgacaaacattatgtaggtgtggcctggtatcaaaagaaagtgacaattccggctgactggaaaggagaaagaatcactctttttctggaacgtccgcacatcgaaactactgtatgggtaaatcagcaggagcttggtatgcaaaacagtctttgtgttccccatgtctatgacctgactgctgcaaccacccccggaaaaacgtacctgattaccatccgtatcgataatagaatcaaagaaatcaacgtaggtccagattctcacagcatcaccgaccagacacaaggtaactggaacggtatcgtcggacgaatcgaattacaagccactcccaaagttcatttagaagatattcaggtatatcccgatttaagcaatcagaaagcgctggttcgcatgaatatacggtctgcttcttccaccaagggagagatcaccctttccgctgcgagctttaacacggacattcagcacaaagtggctcccgtacatcaaagtttcaacatccgtccgggagataatccggtggaaatggaacttccgatgggaaaagagtttctgacgtgggatgaattcagtccggcactttataaactgacggcaaaattgaccaacggcaagcaaactgacacacaacaagtacagttcggtatgcgtgatttcaagatagaagggaaatggttctatgtaaatggtcgcaaaacgatgcttcgcggtacggtggaaaactgtgacttcccattgacaggctatgcgccgatggatgtagcttcctgggaacgggtgttccgcatttgtcgtaactatggtctgaatcacatgcgcttccactctttctgtccgccggaagcagctttcatcgctgccgatctggtcggtttctatctgcaaccggaaggaccgagctggccgaaccacggtccgagactgggtaacggacaaccgattgacaaatacctgatggacgaaaccattgcactgaccaaggaatatgggaattacgcttcttactgcatgctggcttgcggcaatgaaccttccggtcgttgggtggcatgggtcagcaagttcgtggattattggaaagcaaccgatccgcgtcgtgtatacacaggagcctccgttggaaacagctggcaatggcaacctcacaatgagtatcatgtgaaagccggcgcacgcggacttagttgggcaggtgcgcaaccggaaagtgaatcggattatcgtgcaagaatcgacacggtgaaacaaccgtatgtatcacacgaaacaggtcaatggtgcgtattcccgaatttcaatgagatccgtaaatataccggagtcaacaaagcgaagaactttgaaatcttccgggatattctgaacgataaccacatgggaagccagagtcacgactttatgatggcttcgggcaaattgcaggcactctgctacaaacatgagattgaaaagaccttgcgtactccggactatgcgggattccagttgctggctctcaatgattattccggccagggaactgcattagtcggtgtactggacgtgttctttgaagaaaaaggatatatcaacgcagaacagttcagacgcttttgcagtccgaccgtacctttggcacgtattcctaaatttgtatatgccaacaatgaaacattccatgccgacattgaagtatctcatttcggagctgctcccttagaaagtgcaaaaacagtatataccattaaggataaattcggaaaagtatatgctcatggaactgtcggcacccatcacattcccatcggaaatctttattctctgggtagtgtagatatgactctggaaggaatcgatacacagcagaaactaaatctggaagtacgtatcgaaggctgtgatgccgtaaacgactgggatttctgggtatatccggcacaagtggaactggtacaaggaacagtatataccaccgacaccttggacgccaaagcattggcagtgttgcaggacggaggaaatgtgctgattacggctgccggaaagatacaatacggcaaagaagtcaaacaatacttcactcccgtattctggaatacttcctggttcaagatgcgtccgccgcacacaaccggtattttcctgaatgaatatcaccctcttttccgcgaattccctaccgagtatcatagcaacctgcaatggtgggaactgctgaacaaagcgcaggtgatgcaattcaccgacttcccggcaacattccaaccaacggttcaaagtattgatacctggtttatcagccggaaaattggcatgttgttcgaagcaaaggtattgaacggtaaattgatgatgaccagtatggacattacttcccaaccggaaaaacgaatcgttgcccgccagatgcacaaagcaatcctgaattatatgaattcggatgctttccgtccggcagacaagatagctccggagctaatacaagcattattcaccaaagtggcgggagatgtgaaatcttataccaaagattctcctgacgagctcaaaccgaaaattaactaa

SEQ ID NO: 976 - DNA, 2124 bp, Bacteroides ovatus
attcacatgaaaaaagtaactttattaatgagtggaatcatggtgatgtcatgcgctccccaacagaaaaagctagtctaccccgagacggcaaaggtagacaccgtagacgtgtacttcggtacacaagttcccgacccttacagatggctggaaaatgacaccagtgcagctactactgcctgggtagaagcacaaaacaaagtaacgaatgagtatctaagtcagattccattccgggaaaacttgttgaaacgattgaccacactggccgattacgagaagatcagtgcgccaatcaagaaacatggcaaatattacttcagtaaaaatgatggcctgcaaaaccagagtgtattctacgtacaggattcactggacggcgagcctcgcgttttcctcgacccgaacaagctctcggacgatggcacagtggcactgaccggtctttacttctcaaacgacggcaaatataccgcttacagtatctcacgcagcggatcggattggtctgaaatatttgtcatggacactgaaagtggcaagttattggaagagcacatcgaatgggccaaatttaccggtgccgcctggcagggagacggcttctactacagcgcctacgatgctcccgccaaaggaaaagaattctccaacgtaaacgaaaagcacaaaatctattatcacaaaataggtgaaccgcaatcgaaagataaactgatttatcagaatccggcttatccgaaacgtttctatacagccagcaccagcgaagacgaacgtattctcttcctcacagaatccggtgccggaagaggcaacaacttatttataagggacctgaaaaagccgaattctccttttatccaactgactaccgacctcgactaccaatactacccgattgaagtgatcggcgatcagatgtatatttatactaactatggcgcaccgaaaaaccggatcatggtagccgacatcaaccgtccgaaactggaggactggaaagaactcgttcccgaatcggaagccgttctttcaaacgcagaagtgatcggtggcaaactgttccttacttacgacaaagatgcttcgaatcatgcatacgtttacggcctcgacggcaaacaaattcaggagattcaactgccgtcactcggttccgtaggctttagcggcaacaaagacgataaagaatgtttctttggattcacttcattcaccattccgggtgccacttacaaatatgatatggaccagaacacctacgaactataccgtgcaccgaaagtacagttcaactcggatgattttgtgacggaacaagtattctttgccagcaaagacggtgtaaaagtcccgatgttccttacctataagaaagatctgaagaaagacggcaaaaatcctgtattcctctacggatacggtggtttcggcatcagcctcaacccgggtttcagtgcaatgcgcatcccattcctcgaaaatggcggtatctacgcacaagtcaacctgcgtggtggcagcgaatacggtgaagactggcacgtagccggaactaagatgcagaagcagaatgtattcgacgacttcatctctgctgccgaatatcttatcaacgaaaaatatacgaataaagacaaaatcgccattgtaggtggctccaacggtggtctgctggtaggtgcctgcatgacacagcgtccggacctgttccgtgtagcaattccgcaggtaggcgtgatggatatgcttcgctatcataaatttactatcggttggaactgggcaagcgattacggaacaagcgaagacagcaaagaaatgtttgaatacctcaaaggctattctccattgcacaacctgaaaccgggcacgaaatatccggcaacactagtgaccactgccgaccatgacgaccgtgtggttcccgcccattcattcaagtttgccgctacgctgcaagcagacaacgacggtacaaacccgacactaatccgcatcgacagcaaagcaggtcacggtgcaggcaaaccgatggcaaaagtacttgaagaacaggcagacatttacggtttcatcatgtacaatttggacatgaagccggattttaagaagtaa

SEQ ID NO: 977 - DNA, 2577 bp, Bacteroides ovatus
atgcttgaacaagacagaattataaagattaacatcgaggaggaaatgaagtcatcgtacattgactactccatgtcggtcatcgtttcgcgtgcccttccggatgttagagatggatttaagcctgttcaccgtagaattttatacggaatgatggaattaggcaatacttcagacaaaccttataaaaagtcagcgagaatcgtgggtgaggtacttggtaagtatcatcctcatggggattcttctgtttattttgcaatggtacgtatggcgcaggaatgggcaatgcgttatcctttggtagatggacagggaaactttggttctgtggatggtgatagccctgctgctatgcgttatacagaagctcgtctcaataagttgggtgaagcaatgatggatgacctgtataaggaaaccgttgattttgagccaaactttgataatacgctggtggaacctaaggtgatgccgacgcgtatcccgaaccttctggtgaacggagcatccggtattgctgttggtatggctaccaatatgcctcctcataatctttcggaagtgattgaagcatgtgatgcatatattgataatccggaaattacggtagaggaactgatggaatttgttaaagcaccggatttccctactggcggatatatatatggtgtgagtggtgtacgcgaagcatatttgacaggtcgcggacgtgtaattatgcgtgcgaaagctgaaattgaaagcggacaaacacatgacaagatcgtaataacagagattccttataatgtaaataaggccgaactgattaaatatattgctgatcttgtaaatgataagaagatagaaggtatctcaaatgccaacgatgagtctgaccgtgatggtatgcgtattgttattgacataaaacgtgatgcaaatgcaagtgtagtgttgaataaactctataaaatgacagctttgcagacctcttttggcgttaacaatgtggctttggttcatggacgtccaaaaacgttgaatctaagagatttaattaaatatttcattgggcatagacacgaagttgttattcgtcgtactcagttcgatcttcgtaaggcgaaagagcgtgcgcacattcttgaaggtttgattattgcttcagataatattgatgaagtaattcgtatcattcgtgctgcaaaaactccgaatgacgcaataacaggcttgattgagcgatttaacctgacagaaattcaggctcgtgcaattgtagaaatgcgtttgcgtcagttaaccggtctgatgcaggatcagcttcatgcggaatacgaagaaataatgaagcagatagcttatttggaaagtattctggctgatgatgaagtatgtcgtcgggtaatgaaagaggaattgttagaagtcaaagcgaaatatggagatgtacgtcgctctgaaattgtttattcttcagaagaatttaatccggaagacttctatgcagatgatcagatgattattacaatttctcatatgggttatattaaacgtacaccgttgaccgaattccgtgcacaaaatcgtggtggagtaggttcgaaaggtacggaaacccgtgatgaagactttgtagagcatatttatcctgctaccatgcacaataccatgatgttctttacacaaaagggtaagtgttattggctgaaagtatatgaaatacctgaaggaacgaagaattctaagggccgtgctattcagaacttgttgaatattgattcggatgataatgtaactgcatacttgcgtgtgaagagtttagaggattccgagtttatcaatagccactatgtattattctgtactaagaaaggtgtaataaagaagacattgcttgaacagtattctcgtcctcgtcagaatggtgtaaatgctataactatccgcgaagatgatagcgtaattgaagttcgtatgacgaatggaaataatgaaatcatcattgcaaaccgcaatggtcgtgcaattcgtttccatgaggcagcagttcgtgtaatgggacgtacagcaacaggtgtacgtggtattacgttggataatgatggtcaggatgaagtagtaggaatgatttgtatcaaagatttggagacagaatctgtaatggtagtttccgaacaaggatatggtaaacgttctgaaattgaagactatcgtaaaacgaaccgtggaggtaagggtgtgaagaccatgaatattaccgaaaagacaggtaagttggtaacaatcaagtcggtaaccgatgaaaatgacttgatgattatcaataagtctggtatcactattcgtttgaaggtagcggatgttcgtataatgggccgtgctactcaaggcgttcgtctgataaatcttgaaaaacgtaacgaccagattggttcggtatgtaaggttatgacagaaagtcttgaagatgaaattccggcagaagaggcagagggtacaatcgtgagtgatccgaatgctgatgttcctgatattgatgatgcagcggacgtaaatgaaaacgaaagcaataacgaaattgaggaatag

SEQ ID NO: 978 - DNA, 1269 bp, Bacteroides ovatus
atgtcatcactggcgattattgttataatagttttgttagctgccttcatctatatgtgggcaaagtgccagtcactccagaaagaggtgcattcgaaggaaaacaaagagaatgaacttaaaaagttggctctggttttgcagaacatcaatgcttacttcttattgattgacaaggattttgtggtttgtgacaccaattattattctttaaaccgtcttccgattcaggtaggtggagttaccaaaagagtcggggatttgctgcattgtagaaatgcgattgcagccggtgaatgtggtcagcatgaacaatgcaaactatgttgtatccgtgcgtctatcggaaaagctttttacaagaaagcaagttttaaaaatctggaagcttccatgaagctattaagtgaggatgaaacgaaggtgaccctttgcgatgtatcggtatcgggtacttatttgaatattcatggtgaagattatatggtgttgactgtttatgatgtgacggagctgaaaaatgtgcaaaggctgctgtctattgaaagagaacattccatttctgctgataaattgaaatctgcctttattgctaatatgagtcacgaggtacgtacaccgctaaatgcaattgtcggattttccggtttgatggtatcggcttccagtgaagaggaacgaaaaatgtatgctgatgttattgcagagaataatgaacgcttgttgcgcctggtgaatgatattttcgatctttctcaaatagaatcgggaacagtagattttgtttatacggagtttgatgccaatgatttgctaagagagttggagggaatttttaagacgaaattgaataactcgtcggtggaattggtttgtgaggcacacatacaacctataatgatgtattcggaacgggaacgtatcattcaggtattgtctaacctgttacataatgcaatgaaattcaccgaatcgggtgaaattcgtttgggttgcagcctgaaaggaacggaagaggtttgctttgttgtgtccgatacaggcattggcataccgaaagaggaacagaaaaaaatattctcacgtttcataaaacttgatcgtgaaatgcaggggacaggacttggactgactctttcgcaaacgatcatccaaaatctgggtggaaatcttgaacttgattcggaaattaaccggggatctactttcagctttgtgttgccacgggtgataaaaccggaactaataaagtcacaggcaataaagtaa

SEQ ID NO: 979 - DNA, 1554 bp, Bacteroides ovatus
tgtatttttgggcatcaattaataaaattagatattatgataacgacacaggacaaagagttgcttgccaagaaaggcatcacggaagagcaaattgtagaacaattagcatgcttccagacgggtttcccctttttgaagctggatgcggcagcctccatcgaaaagggaatattagctcccgatgcagaagaacagaaggcttatttggccgcctgggatgcatataccaacacagataagactgttgtgaagttcgtgcccgcctccggtgcagcgagtcgtatgttcaagaacctgttcgagttcctgtctgccgactatgaccgaccgactaccaagttcgaacagacattcttcgacggaatcaagaattttgctttctatgatgacctgaatgtagcctgccagcgtatcgacggaaaagatattcccggactgatcgaagacggcaactataaagcagtggtatccgccctgctcgaaacagccggactgaattacggcgcactaccgaaaggtctgctcaaattccataagtatcccgaaggttcacgcacgccgatggaagaacatctcgccgaaggagccttgtatgctgccggaaagagcggtaaagtaaacgtgcacttcacggtatctaccgaacaccgtgaactcttcaagaagctggtagccgaaaaggtagacgaattttccaaacgctatggagtagactattacatcaccttctccgaacaaaagccgagtaccgacacgattgccgccgacatggacaaccaacctttccgtgacaacggcaaactgctgttccgtcccggtggccacggcgcactgatcgagaacctgaacgacctcgatgcagacattatcttcatcaagaacatcgacaacgtagtgcccgacagactgaaagccgacaccgttacttataagaaactgattgccggagtgctcgtgactttgcaagaacaagtattcgaataccttaccctgctcgacagcggtaaatacacccacgaccagatgatggaaatgcttcaattcctgcaaaagaaactcttctgcaagaatccggagacgaaagacctcgaagattccgtactcgccatctacctgaaaaacaagttcaaccgcccgatgcgcgtctgcggaatggtgaagaacgtaggcgaacccggtggcggcccgttccttgcttacaacagcgacggaaccatctccctgcaaatcctcgaaagctcacagatcgacatggacgatccggaaaagaaagaaatgttcgagaaaggcacacacttcaatccggtagacctcgtatgcgccgtgcgcgattataaaggacataagttcgacctggtgaagtatgtagataaagcaacaggcttcatctcctacaaatcgaagaacggcaaagacctgaaagctctcgaacttcccggcttgtggaacggagcgatgagcgactggaataccgtctttgtagaagtgccactttccactttcaacccggtaaaaacagtgaacgacttgttgcgtgagcaacatcagtaa

SEQ ID NO: 980 - DNA, 2310 bp, Bacteroides ovatus
ttgatttgggttatgagaaagatttttttagtgttcattactttatggctgattatcccggctatccatgcccaaaaagtaggacttgtattaagcggtggtggcgccaaaggaatgacgcacatcggcatcattcgcgcattggaagaaaacaacatccctattgactacattgctggtacttccatgggagccattatcggctccttgtatgccatgggatactctcctgatgacatggtagaactactcaaatcggaggactttaaacgatggtattccggagaagtggaagagaaatacgtatatcatttcaaaaagaatcttcccactcccgaatttttcaatattcgtttttcattcaaagattcactgaagagtttaaaacctcaattcctgcctaccagtgttgtcaacccgattcaaatgaatctcgtgtttgttgacctatatgcacgtgctacggccgcttgtaagggagattttgataaactttttgttcctttccgttgcattgcgtccgatgtgtacaataaaaaacagttagtcatgaaggaaggagatttaggagatgccgtcagagcttccatgagcttccctttcatgtttaaacccattgaaatagacaatgtactggcctacgatggaggtatctataataactttcccacggacgtcatgagagatgattttcatccggatgtcattataggaagcgttgtatccaccaatcccactaaacccaaggaaaatgacctcatgagtcaaattgagaatatggtgatgcagaaaaccgactattctattccggactctatggggattttaatgacattcaaatatgacaacgtcaacctgatggattttcaacgcatcgacgaattacatgatataggatataatcgaaccatcagcatgatggattctatcaaaagccgtatccatcggcgtgtgaatctggacaatattcgtttaaggagaatggtataccgtagtaatttcccggaactacgttttaaaaatatcatcattgatggagctaatccacaacaacaggcatatatgaagaaagaatttcataagtcggataacaaagaattcacctatgaagatttaaagcaaggttattttcgattgctatcagataaaatgatttcagaaatcataccgcatgcaatttataatccggaagatgacacctatgatctgcatttaaaagtcaaactggaaaacaactttgctgtacggctgggaggtaacatatccacctccaattcgaatcagatctacctgggacttagttatcaggacttaaactactatgccaaagagtttattcttgacgggcaacttggaaaggtatataacaacgtgcaatttatggcaaaaatagactttgccactgccattcctacctcgtatcgtcttataggttcgatcagtactttcgactattttaagaaggacaaacttttttcgcgaaataacaaaccggcctttaaccagaaagacgaacgtttcttgaaattacaggttggattacctttcctttcgagcaagcgagcagagtttggagtaggaattgcaagaatagaggataaatattttcaaaaaagtgtcattgacttcggaaatgacaaatttgataaaagccgctatgatttatttggtggatcaattagttttaatggaagtactcttaattccaaacaatatcctacacgtggatacagagaagcccttgtagcccagattttcgttggaaaagaacgattctatccgggcgaaggaagtacgaccagtaacaacaaagatcatcactcctggctgcaattatcttatatgaaagagaaatatcataatatgagtgaacattgggttttaggatggtatttgaaagccctgtatgcctccaaaaacttctccgagaactatacggccacaatgatgcaagctggagagttttctcctacattacatagcaaattgacttacaacgaagcctttcgtgccaatcaatttgtcggagccggcattcggcctatttaccgtttaagccagatgttccatcttcggggagaattttatggttttatgcctatttatccaatcgaaaaaaactcgttgaataaagcatattacggaaaagctttctccaagtttgaatatttaggagaaatttctgttgtatgtcaattgccttttggagatatctctgcatatgtaaatcattatagctcaccgaaaagggagtggaatgtcggactaagtataggtttacaactattcaattatcggttcatagaataa

SEQ ID NO: 981 - DNA, 2148 bp, Bacteroides ovatus
atgagaaaagattttaaaaacatcgatatatatgccgcatttcagccgactaatggtgctgaatggcaaaaggctaacggtatctccgctgactggaaaacaccggaacacattgaagtgaagcctgtttatacaaaagaagacctcgaaggaatggaacaccttggctatgctgccggacttcctccttatctgcgcggtccgtattcagtaatgtacactcttcgtccctggaccatccgccagtatgccggattttctaccgccgaagaatcaaatgcattttatcgccgtaatttggctgccggtcagaaaggtttgtcagtggcattcgacttagctactcaccgcggttatgaccccgatcacgaacgtgtagtgggtgacgtaggtaaagccggtgtatctatctgttcattggaaaatatgaaagtgctgttcgatggtatcccattgaacaagatgtctgtgtctatgacaatgaatggagctgtacttccgattatggcattctatatcaatgccggtctggaacaaggtgctaaattcgaagaaatggccggtactatccagaatgatattctgaaagaattcatggtgcgtaatacttatatttatccgcctgcattctctatgaagattatttctgatattttcgaatacacttcgcagaagatgcctaagttcaactctatctctatctccggttatcacatgcaggaagcaggcgcaaccgcggatatcgagttagcttatacattggccgatggtttggaatatcttcgtgcaggaacggcagcaggcattgatattgatgcatttgcaccgcgtctgtctttcttctgggcgattggaaccaatcactttatggaaatagccaagatgcgtgctgcacgtatgttgtgggcaaagattgtgaaacaattcaatccgaagaacccgaaatcactggcgttgcgtactcactcgcagacttccggctggtcactgaccgaacaggatccgttcaataacgtaggacgtacctgtattgaggctatggctgcagctttggggcatactcaatctttgcataccaatgcattggatgaggctattgctcttccaacagatttttctgcacgtattgcacgtaatacacagatttacattcaggaagaaacttacatctgcaagaacgttgacccatggggtggttcttactatgtagaatctctgacgaacgaactggcacacaaggcttgggagcatattcaggaaattgaaaaactgggtggtatggcgaaagctatcgaaacaggtattccaaagatgcgtatcgaagaagctgctgcacgtacacaggctcgtatcgacagtggtcagcagacaattgtcggtgtgaacaagtatcgtctggaaaaagaagctccgattgatattcttgaaattgataatacagccgttcgtcttgaacagattgaaaacctgaaacgtttgaaagatggacgtaatcaggctgaagtggacaaagcattggcagcaattaccgaatgtgtgaagactggcaagggtaacttgttggaattggctgtggaagcagctcgtgttcgcgcaacattgggtgaaatttcttatgcttgcgaacagatagtaggacgttataaagcaataattagaacgatatcaggcgtgtattcatcagaaagtaaaaacgatagcgacttcaaacgtgcttgtgaactggccgagaagttcgcgaagaaagaggggcgtcaacctcgtatcatggttgcaaagatgggacaggacggtcacgaccgtggtgctaaagtcgtagcaaccggttatgctgactgtggcttcgatgtggatatgggaccgttgttccagactccggcggaagctgctcgcgaggctgttgaaaacgacgttcatgtagtaggtgtttcttcactggctgccggacataagacattggttccgcaaattattgaagaactgaagaaactgggtcgcgaagacattgtagtgattgccggtggtgttattcctgcacaagattacgatttcttgtataaggcaggtgtagctgctatcttcggtccgggtactccggtagcgaaagctgcttgtcagattctggaaatcctaatggatgaagaataa

SEQ ID NO: 982 - DNA, 1068 bp, Bacteroides ovatus
aataatccattccatctgaacgatgctgtggtgaaaatgactaattttgaggctttaatagataaaaggacgatgaaaaagaaaactatgatagtattaatgagtgcctttttgttattatcagcattctcttgcggtggaggtaacaaggcaaatagtacgagtgaacaagacgaaaagacagttgtgaatgtacctcagtttgatgcggatagtgcttatttgtatgtaaagaatcaggtagatttcggacctcgtgttcctaacactaaagaacatgttgcctgtggcaattaccttgccagtcaattagaggctttcggtgctcaagtgactaatcaatatgctgatttgattgcttatgacggtacgctgttgaaagcgagaaacattatcggttcttataagccggaaagtaaaaagagaatcgctttgtttgcacattgggatacacgcccatgggctgataacgatcctgacgagaagaaccataaaactccgattctgggtgcaaatgatggtgccagtggggtaggagctttgctcgaaatagctcgtctggtcaatcagcaacaaccggaattggggattgatatcattctgttggatgcagaggactatggtgcgccacagttttatacaggaaagcataaggaggaattctggtgtctgggatcgcagtattgggcacgtaatcctcatgtacaaggatataatgcacgttttggtatcctgctcgatatggtaggaggtgaaggcagtgtgtttatgaaagaagggtattcggaagaatttgctccggacataaataagaaggtttggaaagcggcaaagaaagcgggttacggaaagactttcatggatggaaacggaggatttgtaacagacgaccatctgttcataaatcgtctggcacgtattaaaacgatcgatatcattccctacaatcaggaaggtgattttaccccgacatggcatactgtcaatgacaatatgaaacatattgataagaatacgttgaaagcagtcggtcagacggtattggaagtgatttacaatgagaaataa

SEQ ID NO: 983 - DNA, 1467 bp, Bacteroides ovatus
atgaaaactatttatccattcatgggattagccctgtgcagcgtgacagcgcaggcccaagaaaagcccaatttcctgattatccagtgcgaccatctgacacaacgcgttgtgggagcttacggacaaacacaaggctgcaccctccctattgacgaagtcgcttcacgaggagttatcttctccaatgcttatgtaggctgccctctcagccaaccctcacgcgctgctttatggagtggcatgatgcctcatcaaaccaatgtacgttccaactccagcgaacctatcaacccacgtattcccgaaaatgtaccgacattaggaagtcttttttctgaaaacggttacgaagccgtacacttcggaaaaacgcatgacatgggttcacttagaggattcaagcataaagaaccagtagccaagccattcactgatccggaattcccggtcaataacgacagcttcctggatgtaggaacatgcgaagacgctgttgcttatctaagtaatccgccggaagaaccattcatctgtatcgcagattttcagaaccctcacaatatctgtggatttgtaggagcgaacgaaggagtacataccgaccgccccattagcggaacccttccggaactaccagccaatttcaatgtagaagactggagcaatatccctaaacctgtacaatacatctgctgcagtcatcgccgcatgacccaggcctctcattggaatgaagagaattaccgtcattacattgctgctttccaacactataccaagatggtttccaagcaagtagacagcgtattgaaagcactttactccactcctgccggaaaaaacacaatcgttattatcatggctgaccatggtgatgggatggcttcacaccgcatggtgaccaaacacatcagcttctacgatgaaatgaccaacgtaccgtttatctttgcaggtcccggcatcaaacaacagaaaaagcccatagaccaagtattgacacagcctacactggatcttctgcctaccctttgtgatttggcaggaattcctgttccggccgaaaaaccgggaatcagccttgcacctatattaaaaggagagaaacagaaaaaaactcacccttatgtcgtttccgaatggcatagcgaatatgaatatgtcgttactcccggacgtatggtacgcggaccgagatacaagtacactcactatctggaaggtaacggagaagagctatatgatatgaaaaaggatccgggagaacgcaagaatctcgccaaagaccctaaatacagtaaagtcctcgccgaacaccgtgccatgcttgatgattacatcgcccgcaccaaagacgattaccggagtttgaaagtagatgccgatccacgatgcagaaaccatactcccggctaccccaaccacgagggccctggggtacgagagatactcaaaagaaaataa

SEQ ID NO: 984 - DNA, 1566 bp, Bacteroides ovatus
ccaatgaaacaacctttcattctaacccttgtatcctctgttgcctgtgctgcaacagccgccaataaagcaccggaaaacaccacaccgacaaagtcaaaaacacccaacgttgtatttatctacgccgacgatctcggctacggcgatctggaatgttacggagctaaaaacgtacagacacccaacgtcaaccgactggcaaaatcgggaatccttttcaccaatgctcatgcaacagccgccaccagcaccccttcccgctactccatgctaaccggagaatacgcatggcgcaaagaaggaacggatgtagcggcaggaaatgccggaatgattatccgtcccgaacaatacaccatggcagatatgttcaaaagtgtcggttacaccactgccgcagtaggcaaatggcatctgggactcggagatcaaaccgccactcaagactggaatgctccgttaccgtgcgcactgggcgatttaggtttcgactatcattacattatggcagccacagccgaccgtgtaccctgtgtatacatcgaaaacgggaaagtagccaactatgatccgagtgctcccatcgaagtcagttatcaaaagaacctcgagggtgaacctaccggaaaaagtaatcctgaattactttataacctcaagccaagtcacggtcacgacatgtcgatcgttaatggaatttcacgcatcggttttatgaaaggcggtggaaaggcgctctggaaagacgaaaacattgctgattcacttaccacacacgccattcaattcatcgaggaaaaccaaaacaaacctttctttctctactttgccaccaatgacgtacatgtgccccgctttcctcacgaccgtttcagaggaaaaaatccgatgggattaagaggcgatgctatcgtacagttcgattattgtgtcggtgaaatcctgaatacactcgaaaaactgggattaagagaaaatacactcattattctttcaagtgacaacggcccggtagtagacgacggatacgatgacaaagcagaagaactactcaacggtcatagtcctgcgggaccactacggggcaacaaatatagtgcctttgaaggaggaacccgtattcctgccatcgtcagctggcctgcaggagtaaaaaaaggaatgacttcagacttattggtttcacaagtggactggctcgcctctctcgcttccctgaccggagctacgatgcctaagaataccgcaccggatagttacaactatctgggaagttggctgggtaaagaaaagacagaccgcccgtgggtaatagagcaggcttctaatcacacgctttctgtccgcaccaaagactggaaatacatcgaaccgaatgacggaccgaaaatgattcaatggggaccgaagatagaaaccggaaactctaaagaaccccagctttataagatgaaagaagtgaaagaggtaaccaactatgcaaagaatatgccggagaaagtggcagaactgcaaagtatccttcaaagcgtacgcgaaggaaaggacttaatcgggaaataa

SEQ ID NO: 985 - DNA, 1458 bp, Bacteroides ovatus
atgaaaaagataaaatatatagctttaggtgcctttgcaaccttattgagtagttgcggaaatgattggttggatttgcaatcttccacagctatagaaactgatggttcattgatcgaattaagagattttgaatttgtgctgaacggtgcatacagcagtatgcagtcatccagttattatggagcagatatgttctgttatggtgatttgaggggagatgacatgaaatcttataagtcttccagcaccaatgtcagtttctatacattcaagtacaataagacgaatggacctagtggtttctgggggatgtactacggtattggtaagaacctgaacattttattccgggatattgaaaagataaagcttgttcccgatcgggaaattacaactccgaaactggagaagctgacagagcaggagtattataatgacttgaaaggagaggctttggcaatacgtgccttgttgctgttcgatatgacacgtatttacgggtatccttatctgaaagataacggggcatcactggctgtgcccattattgataaagtggtagaagataagaatatcaaaccttcccgcaatacgaccgcccaatgttataaggccatcacagacgacctgacagatgcggtgaagctgcttcgtccggtaaagaaagagggtaagatcaataaatggggggcaatgacattattaagccgggtttatctctatatggggaatgacaaagaggcatacgatgtggctgccgaagctatcaaaggtgcggaaaaacaaggctataagttgtggaccaatgatgaatatgccaagatatgggctactccgttcaatagtgaactgttgttcgaaattgtgaatctgacaactgatagtccgggaaaatcatccatcggttatcttagcaccaaatataatctgatagctaccgaaaagtattggaaagactacatgaaagacaattccgatgatgttcgtagtcagatggtgtctacggcaagtagcagtaaaccttattgcttgaaatatccggcccaaggttctaaatcgtatgaagatgccaatatcccggttttccgtctgtcggaactctatctgaatgcggctgaagctgcgattaagaggaatgatatacctaatacgcgcaagtatctgaaacctatttatgcacgtacgggtaaggatctggatgccgtggcagatgaagatataaatctggatctggtgcttgaacagcgtcgcattgaattctggggagagggacaacgtttctttgatttacttagaaataacaagaaagtgatacgtgaagattatttgagcgaagttcccaatgaagcggtagagtttgattggagttattataaaatcgttcttcctgttcctaaccacgaaatggagtacaatgagaatatggttcagaatccggaatatgaattgcattaa

SEQ ID NO: 986 - DNA, 1407 bp, Bacteroides ovatus
tatatacaatatgattcattgaaattcattttttcgttcgctccgacaccctacttttgcaccggaaacaaaaaaaatagcattatgaatttcaaagaaaaactgtcgccttcggcccaaaagaaactttccgatttactctttatcctttatgcgggaggagcggcactgctatcctattcattaggctacgcactacgcaaaccgttcaccgccgccacgttcgacggcatggaactatttggtatggactataagatagccaccagcatcatccagatattcggatatatggtatccaagtttatcgggatcaaacttatttccgaactgaagagagaaggccgcctgaaattcattcttgtttctattttagtggccgaactctctttggttcttttcggatgcctaccccgcccgttcaatgtgttggcgttgttcttcaacggactgtcgcttggctgtatgtggggagtcatcttcagcttcctcgaaggacgccgggtgacggatctgctcgcttcccttttcggacttagtatcgcagtcagtagcggcacagccaaatccatcggacttttcgttgtcgacaccctgcatgtcagtgaattctggatgcctgcactgatcggtgcggtagcattgcccttgctggcaggactgggctatatcctcgatcacctgcccaaaccgactgccgaagacaaagcactgcgtgtggaacgtgtcactctcaacaaacaacaacgctggaacctgttccgcagctttgctcccatattgacactgcttttcttcgccaacctctttctcaccgttttgcaagatgtcaaggaagactttctggtgaaaatcatagacgtcaatgccgccggactttccccgtgggtattcgccaaagtggacggtgtagtcacactgattatcctggccattttcgccaccctggcagtgatgaaaagccacatcaaagtactttccgttctattgacccttgtcattgcgggagcaatcacacttagcactgtggcattcaactaccataccctgcaactttctccgctcgtgtggttatttatccagagcctctgcctctatttttcttacttgagctttcaaaccatcttcttcgaccgcttcatcgcctgtttccgcatcaagggaaatgtaggtttcttcatagcgatggtcgattccatcggctacacaggcacagtggtggtattggtagtgaaagaatgtttcaacccggatttaaattggctggaattctacaatacgatggcagggacagtaggaatcgtctgcacctttgcgttcaccttagcaatgatttatctgacacaaaaatacagaaaagggaaacagggtgaaatacgcgggaacgaatcttgccccgtcccctcc

SEQ ID NO: 987 - DNA, 2652 bp, Bacteroides ovatus
atgaaaaacaaaactacattttctatccatagaggcttaatagctttctttttcggaatactgttctgttttgccccattgtcagggcaaaacgtacaagatacaattattgcgtattttaatctactggaaaaagtcccacaggagaaactctacttacatctggacaagcccttttatggggcaggagaaaaaatatggttcaagggatatctggtaaactctgttacacatcaagataatacacaaagcaacttcatcattacagagcttgtcaaccgttccgactctattgtagaacggaaaaagatccgtagagattcattgggttttcataatgctttcaccctccctcccactctccctgcaggtgattattatttgcggggatatagcaactggatgcttaatcaggaaccggaattcttttattcacgcaatctgaaaatcggtaattcgattgataatacgattgtttcaaatattgagtatcagcaagaagacgaatcacattatacagccaaggtaagatttaccagcaatacccaagaggctttcggaaatactgccatccgctaccgctacattgaaaacggaaagattaaagataaaggtaaaagaaagacagacgagaatgggttgatttctatttccctgccggatttgaagcctattgccacacgccacattgaagtagagttcgatgatccccaatatatttataaaaagactttctatctgccttcgtttacaaaagactttgatgttaagttcttcccggaaggaggtgctctcctgaccgttgctcatcagaatatagctttcaaggctcaaggatcggatggcttttctacagaaatagaaggattcctgttcgatgccaacggagacacattgacagctttccgctcggagcatgacggcatgggagttttcacactgaatccgactgtgggaaactcttactatgtgattgccaaatccggtgacggtatcagtaaacgattcgacctcccagctgtagaagaaaaaggaatcacactttccatgacacattataaaaaggaaatccgttacgaaatccagaaaacagaagctaccgaatggcctcaaaagttattcttgattgcgcacactcgtggaaagctggtcatcctgcagccagtcagtatcgacaggacttttggaagaatgaacgacagtttattcaacgcaggcatcacccatttcatgctgatcgaccaacagggcaacgcacttagcgaatgcctggttttcatacccgaccggaatccgcatcaatggcaaattcttgcagataagccgacatacggaaaaagagaaaaggtatccctgcaaatttcagcaaaagacgataacggtactccggtagaaggtagtttttccatcagcattaccgacagaaagagtatccgcccggattcgcttgctgacaatatcgtatcgaattttctattgacctccgacttaaaaggatatgtagaaaatcccggatattattttttgcagcaagacctccggactctccgcacggtagacttcctgatgatgacgcacggatggcgcagacaccatatccagaatgtactgactgcaccttcaatgaacctcaccaactatatggaaaaggggcaaactatcagcggacgtatcaaaggtttctttggaggtaacgttaagaaaggacctatttgtattctggctcccaaacagaacatcatcgccactaccaccacagacgaaaaaggagagtttatcgtgaacacatctttcagagatagcacgactttccttgttcaggcacgtaccaaaagaggatttgccggagtggacatcgtgattgacactcctcaatacccggcaacttcgcacaagtctcctttccatgatggaacagcaacgtttatggaagattatttgctcaacacccgcgaccaatattacatgaaaggtggaatgagagtgtacaatctgaaagaagtggtagtcactggaagtcgtaaaaaggccagttcagaaagtatttacacaggaggtatcaacacctacacgatcgaaggggacagactggaaggattcggtgcgcaaacagcttttgatgcagttaccagacttccgggcattagcgtgacaaacggaaatgaaatacatatccgcaacaatcccgagcaacctgtcattgttgttgacgacgtggtgtatgaagacgataacgacatcttgaccatgatacaaaccagtgatatgtcgagcttgagccttcttcgcggtgccgatgcagcgatcttaggttcccgcggttcggcaggtgctatcgttattacgctgaaagacggcaaagatatcccggcaagaccggcacaaggtattatcacgtgcactccactagggtacagcgactcggtcgaattctaccatccgacttatgatacgcccgaaaaaaagaatgaccaacgctcggatttacgaagtacgatctattggaatcctacccttcaactggatgccaatggaaaagcaactatcgaatactatactccggacagcactgcaccggaagatataaccatagaaggtgtggataaaaacggaaaggtatgccgaatcatacagacaataaacaacagataa

SEQ ID NO: 988 - DNA, 2493 bp, Bacteroides ovatus
atggcaaagaagaaattagataaggaggcggaacgtactccctcttcccccagtaaaattttggctgtatttaagaatgaaaccattcattttgtaatcggattgatgctggtcatcttttccgtttacctgttgttggctttttcttccttcttcttcacgggggctgccgatcaaagtattattgatagtggcagttcggcagatttggcagctgttaataatcaagtgaagaattatgcaggttcacgcggagcgcagttggccagttatctgattaatgactgtttcggcgtttcctctttcttcatacttgttttcctggcagtggcaggattgaagttaatgcgtgtacgtgttgtacgtctgtggaagtggtttatcggctgcacactcttgctggtctggttctccgtattcttcggatttgcctttatggatcattatcaggattccttcatttatttgggaggtatgcacggatataatgtcagtcgttggctgatttcgcaagttggagtacccggtgtgtggatgatcctgttgataacggctatctgtttcttcatatatataagtgcacgtaccgtcatctggttgcgtaaactcttcgcattgagtttcctgaaacgcgaaaagaaagaagaaaaggagaatgttccggaaggagaaggagatccggaatttacgacctcccaaccgcaagaagtggagttcaatttgaaacggacgtataaacagacacctcctccggcaccagtgatggatattcaggctgaagaacctgaagacgactttcctattaataaaccggaaaaggaagatacttccgtatctgacgaaagtgaaggagtgactatggtatttgaaccgactgtttccaatcctgttcctattgtgcaggaagactctttggaagaggcggaacccggatttgaggtggaaccggcagcttcggaagaagaataccaaggacctgaactcgaaccgtataatcctactaaggacttggaaaactaccgtttcccgactatcgatttgatgaagcattttgaaaatgatgatccgacgattgacatggacgagcagaatgcaaataaagaccgcatcatcaatacattgcgcagcttcggaatcgaaatcagtacgattaaagcaactgtgggacctacggtaactctatatgaaattactccggaacagggagtacgtatttctaaaatccgtggtttggaagatgatatcgcattgagcctttccgctgatggtatccgtattattgctccgataccgggtaaaggaaccatcggtattgaagtaccgaacaagaatccgaagattgtttccggacagagtgtgatcggaagcaagaaattccaggaatccaaatatgacttgcctattgtattgggtaagacgatcacgaacgaagtctttatgttcgacctttgcaagatgccgcacgtattggtggcaggtgcaaccggtcagggtaaatcagtcggtttgaatgccattatcacttccttattatataagaagcatccggcagaattgaagtttgtactggtcgacccgaagaaagtagaattcagcatctattcggtgattgaaaatcacttccttgccaaacttcctgatggaggcgaaccgattattacggacgtaacgaaagtagtgcaaaccctgaactcggtttgtgtggagatggatacccgttatgaccttttgaagatggcacatgtgcgtaatatcaaagaatataacgagaaatttatcaaccgccgcctgaatccggaaaagggacataagtttatgccgtatatcgtagtggtgattgacgagttcggagatttgattatgaccgccggtaaggaagtggaacttccgattgcccgtattgcacagttggcgcgtgctgtcggcatccacatgattatcgctacacagcgtccgactactaatattattacaggtacgatcaaagccaacttcccggcacgtatcgcattccgtgtatctgccatgatggactcccgtactattctcgaccgtccgggtgctaaccgtttgattggtaagggggatatgctcttcttgcagggagccgatccggtgcgtgtgcagtgtgcctttatcgatacgccggaagtggaggaaattacgaagtttattgcccgtcagcaaagttatcctactccgttcttcctgccagagttcgtgagcgaagatggtggtagtgaagtaggagatattgatatgggacggcttgatccgttgttcgaagatgcagcccgactggtagtgatccatcagcaaggttccacttcgttaattcagcgtaaattcgctatcggttacaaccgtgccggacgtattatggaccaactcgaaaaagcgggaatcgtaggccctacccagggaagcaaggcacgcgatgtcttgtgcatggatgataatgatcttgaaatgcgattgaacaatttacagtaa

SEQ ID NO: 989 - DNA, 2040 bp, Bacteroides ovatus
gatttaactatgaattatgaactaacatcagcttataaacctaccggagatcagccggaagctatagcacaacttactgaaggggtccttcagggagttcccgcacagactttattgggagtgaccgggtcgggaaaaacatttaccattgccaatgtgatcgccaatatcaataaacctacgttgattttgagccataacaaaacactggctgcccagctctacagtgagtttaaaggttttttcccaaacaatgcggtagaatattacgtttcttactatgattattaccagccggaagcttatctgccgaacagtgatacatatatagagaaagatctcgccatcaatgacgaaatcgacaagctccggctctctgccacttccgccctactctccgggcgaaaagacgtggtagtggtttcttccgtatcttgtatctacggtatgggaaatccttcggacttctacaaaaatgtcatcgaaatagaacggggacggatgatggaccgcaatgtgtttctacgtcgtttggtagacagtttgtatgttcgcaatgatatcgacttgaaccgtggcaatttccgggtcaagggcgacacggtggatatttatctggcttataccgacaacctgctccgcgtcaccttctggggggatgaaattgacggcatcgaagaggtagaccctatcacaggagtcactatcgcaccatttgacgcctataagatttatccggccaacctgttcatgactaccaaagaggctactctccgtgctattcatgaaatagaggatgatttgaccaagcaagtagctttcttcgaatctatcggcaaggaatacgaggccaaacgattgtatgagcgagtaacttacgatatggaaatgattcgggaattgggacattgttccggaattgagaattattcccgttatttcgacggccgtgctgccggtacccgcccctattgtttgctcgatttctttccggatgatttcctgatcgttatcgacgaaagccacgtaagtgtaccccaaatccgtgcaatgtacggaggagaccgtgcgcgaaaaatcaatcttgtggaatatggtttccgattgcctgccgctatggacaatcgcccgttgaaatttgaagagtttcaggagatggcaaaacaagtaatctacgtcagtgctacaccggcggattatgaattgattcagtcggaaggaatcgtcgtggaacaggtgattcgtcctaccggtctgcttgatcctatcatcgaagtacgtccgagtctcaatcagattgacgatttaatggaagaaatccagctccgtattgaaaaggaagaacgcgtactcgtcactacactaaccaaacgaatggcagaagaactggcagaatatcttcttaataataatgtgagatgtacctatatccatagtgatgtcgacacactggaacgtgtgaagattatggatgatctccggcaaggagtttatgacgtacttatcggggtcaacctgcttcgtgagggtctcgaccttccggaagtgtctctcgtcgctattctcgatgcagacaaagaaggattcctccgctcccaccgttcgttgacacaaactgcgggacgtgccgcgcgtaatgtgaacggtaaggtaatcatgtatgctgataagatgacggatagtatgaaactgacgattgatgaaacgaaccgtcgccgcgaaaagcagttggcatacaatgaggcaaacggaattaccccgcaacagattaaaaaggccagaaacttgtctgtattcggtaatgcaaaagaggcagatgagctgttgaaagaaagacatgcttatgtagaaccttctactccgaatatcgcagcagatccgatagtgcagtatatgagtaaagcgcagatggaaaagagtatcgagcgtacccgcaaactgatgcaggaagcagccaagaaacttgaatttatcgaagccgcacaatatcgtgacgaattattgaaactggaggacttgatgaaagagaaatggggataa

SEQ ID NO: 990 - DNA, 1575 bp, Bacteroides ovatus
gactctcttttaattattttcgtcgaactcacgttaaatatgaaaaccaaaagcatctttcccctgttcctattggcaggcacacttttgacagcagcttgcgccaccccaacggctaaacaggcaggaaacaacagcttcgaatgggggcaagtaccgcaacaaccggatttgtcatgggccgatagtgtaggcagccggcaaatgcccggaaaccatgtaattttatccgctaattcttttggcgcagtagcagacagcacggtgcttagcacggaagctatccagaaagcaattgacagttgtgccgtcatcggtggaggaacggtagttcttcagccgggatattatcagactggcgcactgttcataaaaagcggtgtcaacctgcaactggacaaaggggtgactttactggccagcccatccattcatcattatcccgaattccgttcgcggattgcaggaatcgagatgacatggcccgcggcagttatcaacattgtcaatgaaaagaacgcttccgtcagcggagaaggaacgctggactgccggggaaaagtattttgggataaatattgggaaatgcggaaagaatacgaagcaaaaggattgcgctggattgtggattacgactgcaaacgggtacggggcatcctcatagaacgtagctcggacattacattgaaaggatttaccctgatgcgtaccggtttttggggatgtcagattctttactccgattattgcacgatagacggattgaccatcaacaacaatataggtggacacggtccgagcacggacggtatcgacattgattcttcctgcaatatcttggtcgaaaactgcgatgtagactgtaacgatgataatatctgtatcaaatcgggacgggatgcagacggactgcgggtgaaccttcctacggaaaatgtggtcatacgcaattgcatcgcccgcaaaggtgccggacttatcacctgcggaagcgaaacttccggtagcatacggaatgtattgggatataatctggaagcaatcggcacctccgccgtgctgcggttgaaaagcgccatgaaccgtggagggacaatcgaaaacatttatatgaccgaagtaaaagcggaaaacgtccgtcacgtgctggcggcagacttgaactggaaccccagttacagttacagcactttacccaaagagtatgaagggaaagaaatcccggaacactggagaatcatgctgactccggtaacgcctcccgaaaaaggttatccgcgtttccgcaatgtctacgtatcaaaggtaaaagcggaaaatgtggacgaatttatctccgcttcgggatggaatgactcgttacgtctggaaaatttctatctttatgccatcgaagcgcagaccgacaaaccgggcaaaatctgctatacgaagaatttcaacttgtctgaaattacattaaagacagaagaaaagaatgtcattgaactaaaagagaatgaacaaagtaatatcaacttcaactatgttaagacatctcctgaccatcgtactgctgggaatcttgctcattga

SEQ ID NO: 991 - DNA, 3183 bp, Bacteroides ovatus
aaatcaatgagaaaaaatgctagatttaaaataattagttatttttgcggcgtgatgaacaaacaatattttattatatcattgaaaaaagaagtttttgtgagttgcttcttaataggcctgttttttctggagggaggaaattgttatgcttcggagcaacaagtgttaagagggacgatagaagttccttctgatcataataccgtgagagggcgtgtaattgatatctatggtgaaccactgatcggtgctacaatacgcgaaaaggggggagccaatggtactgtgaccgatattgatggaaaattctttttgtctgtgccggatagtgctgtcttacaagtttcttttgtgggttataagactgtagaagtcaatgtggcaggtcggaatgtgcttgaaatacgtcttcaggaagatgcggtgatgcttgaacatgtcatcgtaacggccttgggacttgaaaaggatgaagctacattggcctattctgtgcaaaaaatcaagggagaagaactgaaccgtgtcaaagaagtaaatatgattgctgccctggcaggaaaagctgccggtgtgcaaatcaacaaaaactcttccggtatgggcggttccgcaaaagttagtctccggggaatccgttcggtatccggtgataatcaaccgctttatgtaatagatggagtgccgatgtcgaacacctcttccgaacaggcttattcggctattggtggtacggcgaatgcagggaatcgtgatggaggagacggaatctctaatctgaatccggaagatgtagaaagcatcagtatcctgaaaggtgctcctgctgccgctttatatggtagcatggctgctaacggagtgattcttattacgactaaaaaaggcaactctgtcggacaaaggaatattaatttctctacaggactcactttcgagaaagcattcagtatgcctaaaatgcagaatcgttatggtgtcagtgatgtggtagacagttggggagagaaagagaatctgatggcttatgataatctggatgattttttccgtaccggattgacatcgatgacttccgtatctatcagttatggaaatgaaaacctgcaaacttatttctcctatgccaatactaccggaaaggggattatcgacaagaataaactgaaaaagcataatataaacttgcgtgagacggctaccatgttcgacaaacgtctgaaactggacggtagtgtgaatgtgatgaaacagaccgtcgagaataagccggtgtcgggaggtttctatatgaatccgttggtagggctctatcgttttcctcgtggggaggatttgtcttattataaagatcattttgaaacctatgacgaagaacggaaactgggtgtgcagaattggcatacgtttaccgaagacttcgaacagaatccatactggataacgaaccgcatacaaagtaaagaaacacgtacacgcattatcctttctctttcagcaaactttaaggtaaatgattggctgacgattcaagcccgtggaaacatggattattgggcggacaagttacgccagaaattctatgcgtctactgccaccgccctgtgtggagcgaacggacgatatatcgagatggattatcaggaaacccagatgtatggtgatgtcatggcgatggtgaagaaaacctggggggattttacactggatgcggcgattggtggtagtataaatgataaagtcgttaattctacccgatatgattcgaaaaatgcatctttgaagtttgctaatgtgtttaatattgccaatatcgtcatgaacagttctgccagtattgaccagcgaatagatcaacgccgtcagttgcaatctatattcggtacggcacagatcggttataaggaaaaattgtttcttgatttgacggcccgtaatgactgggcgtcaaccttgtcttataccagccatgaaaaatccggattcgcttatccttctgtagggctttccatgctacttgataaatgggtgaagttacccgaatgggtttctttcgcaaaattgcgtggcgcttatagtaaagtagggaatgatattcctccatttatcactaatccctcttcgcagatcaatgccggtggcgagatacaggcgaatgacgccgcacctttcaaggaaatggagccggaaatgactcatgccatcgaatttggaactgaatggcgattctttcaacaccgtttaggggttaatctgacttattatcgtaccaatacttataatcaattcttcaaacttcccgcacttgcaggtgataagtatgcttaccgatatgtaaatgccggaaatatccagaatcggggatgggaattgacactgaatggaactcccgtattaactcctgatttcaactggaaaacttctgtaaacttctctaccaataagaataagatagtgaagttgcacgaagatctgaaagaaatgatttacgggcctaccagtttttcttccagctatgccatgaaacttattaaaggcggttctatcggtgatatatatggtaaggcttttgtgcgtgatgatgcaggcaatatcgtttacgaaacagagggtgataataaaggacttccattggtggagggcgatgggaatacggtgaaagtaggaaatgccaaccctgtctttatgatgggatgggatcatacattctcttacaaaggcttcaccctttattttctgcttgattggcgctacggaggtgaagtcctttcgcagacacaggcggaaatggatctttatggagtatctgaaataacggccgatgcgcgtgacaggggatatgtaatgctcgacggtcagcgtatagacaatgtgaaaggattctataaaatagtaggcgggcgtgccggggtgacggaatattatatgtatgatgctacgaatttacggttgcgtgaagtatcattgagctataatttctccaagaagtggatacagaaaacgaaggtactgaaagatgttcagctttcgtttgtagctcgcaatctatgtttcttgtataagaaagctccttttgatccggatctggtactttctaccggaaatgataatcaaggaattgaagtgttcggaatgcctacgacccgtagtctgggctttactctgaaatgtgaattttaa

SEQ ID NO: 992 - DNA, 1440 bp, Bacteroides ovatus
atgaaagcattaaacaaagaaactgctcctaaaacacaacgtccggagcgtattatccaatttggcgaaggtaactttttgcgtgcatttgtagattggattatttataacatgaaccagaaagctgatttcaacagcagtgtagtagtggttcaaccgattgataaaggtatggtcgatatgctgaatgcacaggatgatctttatcatgtaaaccttcaaggattggataaaggagaggctgttaacagcttgacaatgattgatgtaatcagccgcgctttaaacccatatactcaaaatgacgagtttatgaagttggcagagcaacctgaaatgcgttttgttatttcaaacactacagaggctggtattgcttttgatccggcttgtaaacttgaggatgctcctgcttcatcttatccgggtaagctgactcaattactctatcatcgttttaaaacattcaatggtgataagacaaaaggtttgattattttcccttgcgagcttattttcctgaatggtcataagttgaaagaaacaatttatcaatatattgaattgtggaacctgggtaatgagtttaaaacttggtttgaagaagcttgtggtgtatatgcaacattggtagaccgtattgttccgggattcccgcgcaaggatattgctgctatcaaagaaaaactgcaatatgatgataatctggttgttcaggctgaagttttccatttgtgggttattgaagctccgcaggaagttgcaaaagagttcccggctgacaaggcaggcttgaatgtattatttgtaccgtcagaagctccttatcacgaacgtaaggttactttgttgaatggcccgcatactgttctttctccggttgcctatctctcgggagtgaatattgtacgtgatgcttgccagcacgaagtgattggcaaatatatccacaaggtaatgtttgacgaactgatggaaactttgaacttgccgaaggatgagttggagaaatttgcaaatgatgtattggaacgcttcaacaatccgttcgtggatcatgcagtaaccagcatcatgctgaattctttccctaaatacgaaactcgtgatttgccgggattgaagacttatctggaacgtaaaggtgaacttcctaaaggactggtacttggtttagccgctatcattacttattataaaggtggtgtacgtgctgatggtgctgaaattgttccgaatgatgctcctgaaatcatgaacctgctgaaagaactttgggcaacaggttgcacaaagaaagttgccgaaggtgttctggctgcagattttatctggggagaagatttgaataagattccgggattgacagaagccgtaaaagctgatttggattctatccaggaaaaaggaatgcttgagaccgttaaaggtattctgtaa

SEQ ID NO: 993 - DNA, 1581 bp, Bacteroides ovatus
aataattccagatatgaaacactgaaacgcttttattttaatgacaacaatatcatgaattatcaatcaatcccgttgataggcagtgccctgctcctatctaccctatctgccaacggacagaaaaaaaatacccagcccaatatcctcttcatcctttgtgacgatatgggatatggagacttaggatgctacggtcaaccatttatccgtacccctcatatagacgccatggccggtgaaggaatgcgttttacgcaagcatacgcaggaagtcccgtcagcgccccttccagagcttcattcatgacaggacaacattcaggccattgtgaagtacgaggtaacaaggagtactggaaaaatgcaccgatcgtggaatatggacagaataaagaatactcaatagtggggcaacacccttatgatcccgaccacgtaatcctgccggagataatgaaagataacggctataccacaggtatgttcggtaaatgggccggaggttacgaaggttcctgttccactcccgacaaacgggggatagacgaatactacggttatatctgtcagtttcaagctcatctttattatcccaatttcctgaaccgttatagtaaagcattgggtgacaccggagtggtacgtgtagtgatggatgaaaacatccaatatccgatgtatggtcccgactacctgaaacgtccgcaatattcggccgacatgattcaccagaaagcattggagtggctggatcagcaagacggcaaacaaccgtttttcggcgtattgacttacaccttacctcatgcggaactcgttcagccggaagattctatcctgaatgaatacaaagctaaattcaacccggataaagaatttaagggaagcgaaggctcacgatacaacgccatcacgcatacacacgcccaatttgccggaatgattacccgcctggactattacgtgggcgaagttttgaaaaaactgaaagaaaaaggactggacgaaaacacattggttattttctccagtgacaacggccctcacgaggaaggcggagctgatcctactttcttcggcagagacggaaaactacgcggactgaaacgtcaatgtcacgaaggaggaatacgtattccatttatcgcccgttggccgggacacatacctgcaggcgaagtaaacgatcacatctgtgcattttatgatttaatgccgacgttctgcgaagttatcggtatcaaagactacgaaaagaaataccgcaataaggaaaaagaagtcgattatttcgatgggatttctttcgctcctacactgctgggtaaaaataagcaaaagaaacatgactttctgtattgggaatttgatgaaacagaccagattgccgtacgcatggatgattggaaaatggtagtgaaaaaaggaacaccgttcctctataatctaaaaacagatattcatgaggatcatgacataacactccaacatccggatatcgtggaaaagatgaaggctatcatctttgaacaacatactccgaatcctcatttttcggtgacgttgcccaaacggtaa

SEQ ID NO: 994 - DNA, 972 bp, Bacteroides ovatus
aaatctaacgttatggaacctattctaaattttgcccagttaacggctcatcttaaaaaactaaaccatagaaaacgaattgccgtggtctgtgcgaacgatcctaacactgaatatgccatctcccgtgctttggaagaagggattgcagaatttctgatgattggagattctaccattctgaagaaatatcccacgctcaaacaatatcctgaatacgtaaaaaccatccacatagaaaatccggatgaagcggcgcgcgaagctgtccgcattgtgcgtgaaggaggagcggatattttgatgaaagggattatcaatacggacaacttactgcatgccatactcgacaaagaaaaaggtttgttaccgaaagggaaaatcctcacgcatctggcagtaatggaaattcctacttaccataaactgcttttcttctcggatgccgccgtcattccgcgtcctactttacagcaacgtatagaaatgatttggtatgctatctgcacctgccgtcactttggtatcgaacaaccgcgtgtcgcattgattcactgcacagaaaaagtgagtgccaagttccctcattcactagattatgtgaatatcgtagaacttgccgaagcgggagaattcggaaatgtgattattgacggcccgctggatgtacgtactgcctgcgaacaagcaagtggtgatattaaagggattgtatctcctatcaacggacaggcagatgtcttgatattcccgaacattgaatcgggtaatgcattctacaaatccgtctctttgtttgcacaggcagaaatggcaggattgctgcaaggtcctatttgccctgtagtacttccatcgcgtagtgattccggcttgtccaaatattacagcattgcaatggcatgcttacaagtgtcaggagattgcaaatgcagaaaacaagtcagccaagtcaccggctcatcattctaa

SEQ ID NO: 995 - DNA, 1143 bp, Bacteroides ovatus
atgaaacagttgcataacatagtagctccgttgattctgttctgcctcatggcggcagtcagcttgccggttcttgcacaggaacaggagggggaagcggtgtcacaacagacgcaggacgagattactccgaaagaggaacaggagaacacggtggatgtgaaagaaattgtgttcggtcatatcggcgactcctacgaatggcatattacgacgtggggtaacacgcacattactataccattacctattattgtttatagtagcactacaggttggcacacgttcctttcttcccgtctcgaagagaatggagggacttatgaaggactttccatcgctcccgaaggaagtaagtacgagggcaaactggtagagtataatgcggcaggcgaacaggtccgcccgtgggatatttccatcacgaaagtgacatttgctttgctgttcaacagcgtgttgttgctcatcatcgtattgagcgtgtcacactggtacagaaaacgtccgcaaggagcgaaagcgccgggaggatttatcggattcatggagatgttcatcatgatggtgaacgacgatattatcaagagttgtgtaggacccaactaccggaagtttgcaccgtatctgctgacagcgttctttttcatctttatcaataacatgatgggattgattccgttcttccccggaggtgcgaacgtgacgggaaatatcgctatcactatggtgcttgcagtctgcacattcctggcagtgaatatcttcggttcgaaacattactggaaggatattttctggcctgatgtaccttggtggctgaaagtgcctataccgatgatgccattcatcgagttcttcggaatctttacgaaaccgtttgctttgatgattcgtctttttgccaatatgctggcgggacacatggcgatgctggtgcttacctgcctgatctttatctcggcaagcatggggcctgcactgaacggcacgctgacggtggcttctgtattgttcaacatctttatgaatgcgcttgagttgttggttgctttcatccaggcttacgtatttacgatgttgtcggcagtgtttatcggtctggcacaggaaggtgccaaagtgaaagctgaagaaaattga

SEQ ID NO: 996 - DNA, 2637 bp, Bacteroides ovatus
atggaattagcaagtaagtacaatcccgctgacgtggagggaaaatggtaccagtattggctggaccatcatttattcagttcgaaacccgatggccgtgaaccttacaccatcgtcattccgcccccgaacgtcaccggtgtgttgcacatgggacacatgcttaataataccattcaggatattttagttcgtcgtgcccgtatggaaggcaagaatgcctgctgggtaccgggaactgaccatgcttctattgctactgaagctaaagtagtaaacaaacttgctgctcaaggcatcaagaaaaccgacctgactcgtgacgaattcctgaaacatgcttgggattggacagacgaacacggaggtatcatcctgaaacaacttcgtaaactcggtgcatcctgcgactgggatcgtactgctttcactatggacgagaaacgcagtgaaagtgtactgaaagttttcgtagacctgttcaataaaggattgatctaccgtggtgtccgtatggtaaactgggacccgaaggcattgaccgctctttctgacgaggaagtgatctacaaagaagagcacggaaaactatattacctccgctataaagtagaaggtgatccggaaggacgctatgccgtagtggcaactacccgccctgaaacaatcatgggtgacacagcgatgtgtatcaacccgaacgacccgaaaaacgaatggctgaaaggcaagaaagtgatcgttccgctggtaaaccgcgccatccctgtgattgaagatgattatgtagacatcgaatttggtacaggttgcctgaaagtgactcctgctcatgacgtaaacgactatatgctgggtgaaaagtacaacctgcctagcattgatatcttcaacgataacggtacattgagcgaagctgccggtatgtatatcggcatggatcgtttcgacgttcgtaaacagatagagaaagacctcgaagctgccggactgctggacaagacagaagcctatacaaataaggtaggttactcggaacgtaccaacgtagtgatcgaaccgaaactatctatgcaatggttcctcaagatgcagcattttgcagacatggcattgcctccggtaatgaacgatgaactgaagttctatcctgcaaaatacaagaatacctaccgtcactggatggagaacatcaaagactggtgtatcagtcgtcagttgtggtggggacatcgcatccctgcttacttcctcccggagggcggttatgtggtagctgctacagcagaagaagcattggcaaaagcgaaagagaaaaccggcaatgccgccttgacaatcgaagatctccgtcaggacgaagattgtctggatacctggttctcttcctggttgtggcctatctctttgttcgacggaattaacaatccgggtaacgaagaaatcaactattactatccgaccagcgaccttgtgacaggaccggatattatcttcttctgggtagcccgtatgattatggcaggctacgagtacgaaggacagatgccgtttaagaacgtttacttcacagggatcgttcgtgataaactgggacgtaaaatgtccaagtcactcggtaattctcccgacccgttggagttgatcgagaaatacggagccgatggagtacgtatgggtatgatgctttctgctcctgccggaaacgatattcttttcgatgacgcactttgcgaacagggacgtaacttctgcaacaagatatggaatgctttccgtctgattaagggctggacaaatgctaaaggtactattgagattcctaccgatgcacatctggcagttcagtggtttgaccaaagactggatgcggcagctgttgaagtggccgatctcttctccaaatatcgtttgagcgaagcgttgatgctggtttacaaactgttctgggatgaattctcttcttggctgttggaaatcgtgaaacctgcttatggacagcctgttaatggctttatttatagtatggttcttagctctttcgagcgtctgcttgaattgctgcatccttttatgccatttatcacagaagaattgtggcaacaactgcgtgagcgtgaaccgggtgaaagtttgatggttactcaactgtttgaaccggtcggagcaaatgaacaattcctggcagagtttgaagtagctaaggaaatcatcagtaatgtccgtagcatccgtttgcagaagaacattgctctgaaagaagaactcgaattgcaggttgtaggcactcatccggtagagaaattgaatccggtgattatcaagatgtgtaacctgtcttccgtaacagtggtagaaagcaaatcagaaggtgcttcttcttttatgataggaacgaccgaatttgccgtgccattgggtaatatgattgacgtggaagccgaaatcgcccgtatggaagccgaattgaagcataaagaaggattcttgcagggagtgatgaagaaacttagcaacgagaaattcgtcaataatgctccggctgccgttcttgaactggaacgtaagaagcaagccgatgcagagagcatcattaattctttgaaagaaagtattgcggctttgaagaaatcataa

SEQ ID NO: 997 - DNA, 1536 bp, Bacteroides ovatus
ctagtacagaaaatgatagctgacaaaagtataaatttagatacccttcataaagtattgtttgataatgagaagctggaactctctgaagaatgtattcgaaaagtagaggaaagcttcgattttctgcaatccttttccagcgataagattatttatggtatcaatacggggttcggcccaatggcacaatacagaatagaagatcagtcattgatcgaccttcagtataatatcatccgaagccattccaccggtgccggcaaaccgcttcccgaactttatgtaaaagcagctatgattgcccgtttgtacacttttctacaagggaagtcaggagtgcatctggaactggtttctctcctctgtgaatttatcaaccgcggaatttatccgttcatacccgaacacggaagtgtaggtgccagcggcgatctcgtacaactggcccatatcgccctgacgttaataggggaaggggaagttttttatcagggtaaattgtgtaacgcagctacggtgcttcaggaaaacggcctgaaacctttttccatgcgtattcgtgaaggtttatccgttacaaacggtacttctgtaatgacaggcatcggtattgtcaatctgatttatgcaaaaaaactactccgttggtcggtggctgcctctgtaatgatgaatgagattgccgcctcttatgatgattttatggcacaggcattaaacgaggccaagcatcataaaggtcaacaagagatagctgctatgatgagagaatgggtggcaggcagtaaatgcgtgcttcaaagagagaacgagctatacaaccaggtgcataaagagaaaatcttcgaacacaaagtacagccctattattccttgcgatgtgttccgcaaatactcggtcctatttacgatgaactggagaatgcggaagaagtattaataaacgaaataaattccgcctgtgacaatccgattgtcgatccggatacacaaaatatttatcatggcggcaacttccacggagattacatttctttcgaaatggacaagttgaaaattgccgtgaccaagctgactatgctttgcgaaagacagattaactatctgttccacgaccgtatcaatggcatcctgcctccgtttgtaaatttgggagtgcttggattgaactatggtttacaggcttcgcaattcactgcaacctccaccacagcggagtgtcagacattatcaaatccgatgtatgtacacagtatccccaacaacaatgataatcaggatattgtcagcatgggaaccaactcggctctattagcaaaaacagtcattgagaattcttatcaggtgatggctatccagttcatgggaatggcacaagctatcgactacctgaaaatacaggatcgcctaagttccaaaagcaggcaggtttatgaagaaatacgcagtttcttccctgtatttaccaatgacacacctaaatataaagagatagaaatgatgatagactatctcaaaaaagaagataaataa

SEQ ID NO: 998 - DNA, 1152 bp, Bacteroides ovatus
atgcagaacaggagagattttttgaaaacggcagctttggctgctttcagttcggggttagtagcccgtcaggcactagccggagaatcgttgctttctaccattcatataaataagctcggtttgggagggaagatgaaaatgacttttttcccttatgaattgaagttgaggcacgtgtttacagttgccacttattcgcgtacaacaactcccgatgtgcaggtagaaatagaatatgaaggcgtgacgggatatggagaagcctctatgcctccttatttgggagaaacagtagagtctgtgatgaatttccttgggaaagtgaatctggaacagtttagtgatccttttcagctagatgacattttgtcatacgttgacagcctctcgccaaaggatacggcagcgaaagctgcggtagatatcgcccttcatgatctggtagggaaactattaggcgctccctggtataagatatggggattgaacaaagaaaagacaccttccactacctttacgataggcatcgatgcgccggatgtagtgcgggcgaaaacaaaagagtgtgccgatcagtttaatatattaaaggtgaaactgggacgggacaatgataaggagatgattgaaaccattcgttcggtaacagaccttccgatagcgatagatgccaatcaaggatgggcagaccgccaatacgcgctcgatatgattcattggctgaaagaaaaaggcgttgtgatgatagaacagcccatgcctaaggagaagctagaggatattgcctggataacacaacagagcccgctaccgatatttgcggatgaatccttgcagcgtctgggagatgtagccgctttaaaaggcgctttcacgggaatcaatataaagctgatgaagtgtaccggtatgcgtgaagcatggaagatggtgacattggctcatgcactcggcatgcgtgtcatggtgggctgtatgacagagacttcctgtgctatttctgcagcttcacagttctcgccattagtggattttgccgacctggatggcaacctgcttatctctaatgatcgctttaaaggggtggaagtggtgaaaggaaagatcactctgaatgacttacctggaatcggtgtcatgaaaatctga

SEQ ID NO: 999 - DNA, 1551 bp, Bacteroides ovatus
atgatgatgaaaagaagcctgttgttgggatgtatttctctctttgtagtcgcggtctttgcacaggaagatccggtattgatgcgtgttaacggaagagagatactccgttcggaatttgaatatgcataccgccgttatgcggaacgttcaaatgccagactttcgtccaaagagtatgcggcacttttcgctcaatcgaagttgaaagtggaagcagccagggctgccggacttgatacgacctctgtttttcgtaaacaacaggagaaatgccggaccgagttggtggaatcttatctgatagacaggcaagtgatggatagttgtgcccgtgctatctatcagaagatgggattgaaagcacgtagcggcagggtacaggtgatgcagattttcaaacgtttgccacagacaatcacttcccggcatttagaagaagaaaaaacgcggatggattctatataccggatgatacagaatcagccggatttgaactttaaccgtttggtcgaaatatattcggatgataagcaaagtagatggatcgaatgtctggaaacaacgagcgagtttgagaatgttgctttctctctggcaaaaggtatggcatcgcagccctttttcactcctgaagggattcatatcttgaaagtgatggatcgggaggaaacagctgcttacgaaaatgtcagtgccaggttaatggaacggttacggcgcaaggagattttggacaaaggtacaggcgcggtgctcgaacgcttgaaaaaagcatggcagtatgctcccaatcaggcggcaatggaagaactgctggcgaaaggccgtacagaacaaaccctgtttacgattgacggacaagcatacaccggaactatgttcacgcattttgcctcttctcatcctcaagctgtcaaacggcagttggaaggatttatagctaagtcattgctggattatgaaagccggaatatcgataaaaagcatccggaaattccttatgccttgcgggaatctgatgaaaactatttggtggaagagataacacgtcagaaaatagatttgcccgcagctaatgaccgggcgggattggctacttattttaaatttcattcgtcggattatcggtgggagagcccccggtatagaggagtcgtgcttcattgcgttgataaaaagatggcaaagcaagccaaaaaaatgctgaagaaagtgccggaaaaagagtgggcggacaagcttcggcaaacttttaatacatccggggaggaaaagatacaagttgaacaaggaatttttgccgacggagacaataaatatatagataaactggtttttaagaagggtgattttgatcctttgatgtcttatccttttactattgtagtaggcgaaaaaatgaaaggtccagatgattatcgggaagtaattgatcgggttcgaaaggattatcgaagctatcttgacacgtgctggatgcgggaattgagtgagtccggtaaggttgaaataaaccaagaggttttaaaaacagttaataataactga

SEQ ID NO: 1000 - DNA, 1389 bp, Bacteroides ovatus
atgacctttatcaacgagattaacgacatactctggacctatatcctgattatcatgttattgggatgtgctgtctggttcagcatacggacacgcttcgtacaattccgcatgattcgcgaaatgatcgtactgttaagcgaatctgcgggcaaagggaagcagggagagaaacatgtatcttcttttcaggcattcgctatctctatcgccagccgtgtgggtacgggaaatcttgcgggagtggctaccgccatcgctatcggcggtcccggagctattttctggatgtgggtcatcgcactgttaggggcttcgagtgctttcatagagtctactttgggacaattatacaaaatacgcggaaaggattcgttcatcggaggacctgcttattatatgaagaaagggttgaaacaaccgtggatgggaatgctttttgccgtattaataagcattactttcgggtttgctttcaattctgtacagagtaatacgatctgtgctgcggcagagcatgcttttgggttcaatcatattatattgggaggtgtgctgactttgctgacattgcttatcatctttggaggtattcaacgcattgcccgcgtcagcagtattatcgtgcctgttatggctttgggatatgtagggctggcactggttattgttgcactcaatatcactcatttaccgggtgttatcgcactgattgtcagccatgctttcggttgggagcaggcattggcaggaggagttggtatggcattaatgcagggcatcaagagaggacttttcagcaatgaggccggtatgggttcggccccgaatgcggctgccacggctcatgtcagccatcccgtaaaacaagggttgatacagactttggcggtatttacagatacattattgatatgtacctgtacggcttttatcatcctctttagtggggctcctctggatggttcggctaatggagtgcagctgactcaacaggcgttgacaaacgaaataggttcttcgggcagtatcttcgttgccgtagctcttttcttttttgctttcagcagtattctggggaattattattatggtgaggctaatatccgttttatcactcaccggaaatgggtacttcatggttacaggatattggtgggtggtatggtactcttcggttcacttgccacattggatatggtatggagcctggcagatgtcacgatggcgttaatggctatctgtaatctgatcgctatccttttcctcggaaaatatgctatccgtctgctaaatgattaccgcgcgcaaaagaaagctggcatccaaagccctgtttttaagaaagagacaatgccggacatcgaaaaggacttggaatgttggtga

SEQ ID NO: 1001 - DNA, 1452 bp, Bacteroides sp. CAG:144
atgcaacagggcgaatcgacatcgatgtatcgtcgtattgtgaagacgaccgggcttttgggaggagtgcaggtgctttcgattctctgttccatcgtgcggaataaatgtattgctttgtggctgggtcctgcgggagtcggtattatcggattgtacaatacatcgatagaaatggtcgccgcccttacgggattgggattgcggcagagtgccgtgcggaatgtttctcaggctcgggcttcggaaaatgaaaatgcgttgtcgcatacggttaccgtgttgaggcgatggagttggctggccggccttttcggtgcggttgtcatgctttctactgcaccgctgttgagccgttttacatttggcgatgacaagcatatttgggggtatgtgtggttatcgtgcgctttgcttttcaatgctttgacatcgggcgatcaggcgatattgcagggaacgcagcgattgcgccagctttccaaagccggtgttgccggtaatttggcagcattgttgttgtcgttgccgctatattattttttccgattcggcggtatcgtaccgtctttggtcttgtcttcggccgttacgttttttttcgtctggatatacagtcgcagaagtgttgcaccgaaacaaccggtttctgtgcgggagacatggaatgagggaaaatgcatggtcgtcttgggagtatatatgacggtgagcggattcctgacgacattgttcaattacttatttatcggttttatccatagaacggtcggagatgccgatttgggctattatcaggcggggtatgctattgtaacgaggtatgtgggacttgttttggcggcgatggccaccgaatattatccccggttggcagccgtgagcgaagataaggaaacacttggaaatcaggtgtctcgacagatcgaggctgcgttgttgctattggcacctatcgtgtcgttgtttctgctgttgcaggagtgggtgatacggttgctttatacgtcggagttcctgtgtatagaagagtttttctcttgggcgatggtaggtgtattgttcaagtcggtttcttgggcgatgggttttgtcttgctggcgaaaggcgacggtaagttatatctgatcaccgaattgatttcggatttgtgcgggttcctgcttaacgtctccgcttattatttgtggggactggaaggtgcaggtgttgcttatttgctcaatttcgtgatttacggtatcatgatgtggtgggtgtgccggcgtcattaccatatacggttaggccggtcgtggtacggagttgccatttgggtgattgtcggttgtgcagtcgtttcgatactgtaccgcatcggttcgataccggcgttatcggtggccgtagtgtgtgctgttgcagtttctgtggcggcgttgtgggggttgaaacgtcggttggcgatatag

SEQ ID NO: 1002 - DNA, 1194 bp, Bacteroides sp. CAG:144
acgaaacattccatagctgaaagagagaataccatgattacgctgagcatcgtcatcgtcaattataatgtatgcggttttctggaacagtgcctgctgtcggtacgcgatgccataaaaggtatttctcatgaaatattcgtcgtggacaatgcttcgaccgacgggtcggaagcctacatttcgacccgctttccgcaagtaaaatacatctacaacaccgaaaatgtaggtttttccaaagccaataatcaagctatcgcccagtcgtcgggacgttacgtactgttactcaatcccgatacggttgtgggagaatcggtactcgacgaagcctgccattttctcgacgaacacgatgatgcgggagcactgggcgtgaaaatgatcgacggagacggaaagttcctgcccgagtcgaaacgaggatttccttcaccgtgggtctcgttctgtaaaattttcggcttgtccaaactgttcccatacagtcaccgtttcggacgttatcatttgcggtttctcgacgagaacagtacacaccgagtcgacgtactctctggggcattcatgttgttgaggcgttccacactcgatcggtgcggtctgctcgacgaaaactttttcatgtacggggaagatatagacctctcgtaccgcatgacgcttaccggagaaaaaaattactacctgcctctgcgtattcttcattacaagggagagagcaccaaaaccgagtcattgcgttatgtgcgtatcttctatcaagcgatgtttatcttcctgcgcaaacactatcctcactataaactgtttgccctgttgtctatcaaaacagccatctatatgagagccacgactgctgccgtgaggcgtttcctttttcccaaaaaagaaaaacgatgcgatgtcaacgggaaatggtatatatggagccgtgaagctgacccgataaaaaacatactggacaaatacggtatcaccccgacccttgtaactcccgacggtcgcgatatagctccgcatcttttccgttcagaaaatatacgccatgtcgtgttcgaccgaaaaacactttcttacggacgcatcatcgaacaaatggaaagatggagcgttcccggtaaagtatgcttttacatctattcgcccgatagcggaaaaatcgtttcggcgcattcgttattgacttag

SEQ ID NO: 1003 - DNA, 1917 bp, Bacteroides sp. CAG:144
atggagcaaagtattcacgaaatattgaaacgttattggggatatgactctttcagacccttgcaggaagatatcatacaatcggtcttaaaaggaatagatacgcttgcgttaatgccgaccggtggcggaaaatcgattacttatcaggttccggggttatacatggacggtatatgtatcgtggtaacgcctcttatcgcgttgatgaaagaccaagtagacacgttgcgggccctcgacataaaagcatcgtatatacactcgggaatgagccgacgggagatgctcactactctcgacaactgcatattcgggaaatacaagttcctctatgtttctcccgaacggctatcgacccaacttttccaagaaaaactcaaagatttaccggtttcactacttgttgtagacgaggcccattgtatttcgcagtggggatatgatttccgccccgattatttaaaaatagcggaattgcgacagacaattccccaaatacccgtacttgccgtaacagcaaccgcaactcccgaagttgcaaaagatattcagactaagttgctttttaaggctgaaaatgttttccgaaaaagcttccgtcggccgaatcttcgttatgttgtccgttacaatgaagacaaactgcaacaactcatctatatattatcccgcgtcccgggaagcgccatcgtgtatgtccgcagcagaaaacgcacaaaagaggttgcagaggtcttatatcgtgcaggaatatccgcacaatattatcatgcgggtatcgatcccgaagataaagagcgcagacaacaagagtggaaagaagggcattcccgggttatggttgcaacaaatgcttttggtatgggaatagacaagcccgatgtgcgtctggtcgtacatctcgatatacccagttctcccgaagagtattatcaagaagccggacgggctggacgggacggaaacagttcttatgccgtcctgctctactccccgaccgataaatccaagctgcataaaagggtaacagacatgttccccgaaaaagattttatagtccgtatatacgaagccatgtgcaactatttgcaagtagccgagggatttggaataaactcagtacatgatttcgatttgaatcttttttgtaagacattcaaattcccgatactgcccgcttaccacgcgttgaaaatattggaacagtcgggatatatagaatacatagaagaagccgattcgcagtcccgtgtcatggtaaccgtacatagagacgaattgtataaactaaaaaccgacgaccccgataccgatacggtattgcaatgcttgttacgctcttatacaggattattcgccgattatacatttatcaaagagtcgattatcgaacggcgtacagggttgtctcccgaaacaatatacgagagtctcatctatttggggaaattacacattatccattatgttcctcgaaaaagaatgcccttcattctttttacctgttcccgtacaagattgaaagatcttgtaataccccggtcggcatacgaagaacgaaaagagcgttttgtatatcggatagaacgtatcctgcaatatactttatgcgaaaatatttgtagggaaaaattgttactcgactatttcggtgaaaaaacgaccgataattgtggctgttgcgatgtgtgtcaaaataagaaaaacgcgactttatcgccagttgtattcgaccaaattacctccgccctgcaagacttattgagaaatgaaccgctcaaactgaacgaattggtcgaacgattgcactatccgcaagaacaaattgtagaaacgattcgttatcttgtcgacgaacgcttcctgcgacaagataaccaaaaatattttttgaataacaacaaaaaacgataa

SEQ ID NO: 1004 - DNA, 1212 bp, Bacteroides sp. CAG:144
ggattgagactgttgcatcatgccgatagcaatacgcgaatggtcgctataaatctgttgtatgatgtgggggctcgggacgagtctccggattgtacgggttttgcgcatctttttgagcatcttatgtttggcgggtcgcttcatatccccgatttcgatacggcgttgcaaaaggccggaggtgaaaacaatgcatggacgagtaatgacattacaaattattatacgatagttccccggcaaaatgtagagactgccttttggttggaatccgaccgaatgttggggttggatttttcccaacatagccttgatgtgcaaaaggccgttgttatggaagagttcaagcaacggacattgaatcaaccttatggggatattcctgccattatacgggaattggcttatcgggagcatccttaccgctggccggtgataggccgggatatatctcatatagagaaagctacgctcgaagatgtaagatcttttttttataaccattatgctcccaataatgcaattttggcagtagtcggcgatatttcttttgaagaggctttgcgcttatccgaaaagtggttttctcctattgagaaaagaaatatagcaccacgttgtatcttgcctgagccggagcaggaagcgcctcgctataaagaggttgtcagagacatcccttctgatgccatcgtgaaagcttatcatatgggccgacgatgcgatgccgattatcagacctgtgatttgatgtcggacatactgtcaaacggtcgttcttcccgcttatttcgccgtttggttatggaaaagtcgctttttaccagtatagatgcaagcattacgggtgatattgacgcgggtctttttttgataaatggccgattgaatcaaggtgtctcgttacaacaggccgacgaggccatagaggaggagttggggcgactttgcagggaatcagcctcggaacaggaaatcagtaaaatggtgcataagttcgagacgggatatcttttttcaaatttgagttatgtcgacaaggctgcgaatttatcttattttgagttgatagatgctgccgaatcgatagacagggaagtcgagaaatattatcgtatcacgccggaatcgttgcaaaagacggcacaagcggtatttagagccaataatatgtctacgttgtattacaaagctcagaatagttgttga

SEQ ID NO: 1005 - DNA, 2409 bp, Bacteroides sp. CAG:144
atgagcgaaacgaaggacaacaagcaacgaaacgcagaaattcacccggaagaaggtggatcggccgacagcggacaacaaccggtttccatagagaaaaccggcgaatctatccgtgaaaaaaatccggctccgataggaactgatccaataagccatcagaccgaggagcaagaagacatcatgattgaaaaagaatttcagggcttgcttgttgaatacctcaactcgaatcatcggaaaaaagtcgatatcatagaacgtgctttccgtttcgccaaagaagcccatcacgggattcggcggcgttcgggagagccgtatatcatgcaccccattgccgtagcaagaatcgtctgcgaagaaatggggttgggttcgacctccatctgttcggccctattgcacgacgtagtagaagatacggaatatacggtcgaagacatcgaaaaccttttcggccgaaaaatcgccatgatcgtctcggggctgaccaaaatatccggcggtattttcggagaccaagcctctgcccaagccgagaatttcaggaaattactgcttaccatgtcggaagacattcgcgtcattctcgtaaaaatggccgaccgcctgcacaacatgcgcacattgggttctatgttacccagcaagcaatacaagatcgccggagaaacactctacatctatgcgccgctggctcaccgattagggctttttgccattaagacagaactcgaagacctgagcttcaaatacgaacaccccgaggcatacgctgaaatacaacacaacatcgcatcgagcgaagcctaccgacagaaagtatttcacgacttcgccgcgccgatcaccgagaagttgcacgaaatgggtgtccaattcgaaatgaaagcccgcgtaaaatcgatttattcgatatggaataaaatgcagagtaaaaatattccattcgaagaggtgtatgacttatatgcggtgcgtatcatattcgaccccaagcaggaggaaaacgaaaagaccgaatgctttaacatttactcggtgatcaccgatatttataaagttcaccccgaacgcacccgcgactgggtaagccaccccaaagccaatggttaccgggctttgcacgtaaccgtcatgggccccgacggaaactggacggaggtacagatacgcagccgaaaaatggacgaaatcgccgaacggggatttgcggctcattggaaatacaaagtaggtggtgccgacgaagaatcggaactggatatttggctgaaaacaatcaaagaaatactcgaaaatcccgaacccaacgctctcgattttctcgatacgatcaaactcaatctttttgcctcggaaatattcgtatttaccccgaaaggcgaattgaaaaccctgcccaaagacgccacagccctcgatttcgcattcattctccactccgacctcggctaccactgcatcgcagcaaaagtaaatcacaagctggtaccgttgagccaaaaactacaaagcggcgatcaggtcgaagtccttacttcgaaatcgcaaacgcccaaagaagaatggatcaatttcgtaaccacagccaaagccaaaacccagttacaagcagccctgcgtaaagagcggaaaatcatcgcggccaaaggagaggaaatctacaacaaatttatttcgagcaaccatcttatcaccaacgatctgagtatactcgacagaatactcaactacttcgacatagacaagaaagaggaacttttctatcaactgggtaaaaacgatatcacgctcgacgaaggagtaaaaaaattattcagaggaaaaaacaaaaacgtattcatgcgttatttgcgaaatcctttcagcagcaacaacaagtcgacccacaaacacgccgagaaaagaatcccaatcgataaaaacatcgttattcccgagaaaatagatcgtaaagcgacctatatactcaaaagcaacgaaaccgaacgcaactatatcatcgccacatgttgcaaaccgattccgggagacgatgttctgggatacgtcaatgaaaaaggcgaggtcatcgtacacaaacaatcctgcccaatagccatgaaactgaaaagcagtttcggcccccggctgatttcggtaaaatgggataaacacctgagcgaatcttttccggtagaaatcgaaatagacggtatagacaacatcggggtactcaaccgcatcacacatatcatttccgatgacatggccgtgaatatccggaacctgacaatatctaccaatgaaggcttatttcacggagaagtgggcgtaatggtacacgatgcccgcgacatagagaaactgtgcaaccgactgaaaaaaatagaagacgtaaaatcggcagcccgaaagaattaa

SEQ ID NO: 1006 - DNA, 1311 bp, Bacteroides sp. CAG:144
ttgttgatagaaaaatgttttaccgataaagatatgaagttaatatttagaacctctcttttgctgttttgtatcgcattgtatggcgtgccttccgaggcacaagattcgatcggggaaaaaggaccggggccggttattcttatttcacgggataaaaacggtcaggacgaaatcgtcaatgtctttaaagagactcagcgtcagcactttcatgatccgggtattcctcgttttttgttggccgacaggaagcgaaagtgggctttgggtgtaggtggatatgtgcaggctgtggtcgaatatgattttggcggcatttcggacgatatagatttttttccagcatttatatccggggggaaacctcgtagccagtttcagatggatataacgacctcgacgctctttctgaaattggtgggccgggtcggtaaatgggggaatattattgtctataccgccggaaattggaggggcgatggaaatacatttgagttgcaaaatgcttatgtgcagtttcttggtattacgtttgggtatgatacgggaacttttatggatttggcggccggccctccgaccatcgattttgcaggcccttgcggtatgacatcctatcggaccactcttgtacgctatgaacggactttgggaaagggcttttctgtgggtattgcattggaaatgcccggtatcgagggggcgaccgatcgttatacgtcggtagatcatcaactcgtcccgagtgttcccgcttatgtacagtacggttggaataaggggaggagtcatatccggttgagtggaatttacaggaatatagcgtataccgacttggctaatgataaaagcaatagccagacgggatggggtgtgcaggctacctctgttgttgcgattggaaagccctttcaaatatatctccaatatgcttacgggaaaggcatagggagcttgataaacgatataagcaatctgagtgtggatatagtccccgatgtcgataacgtaggtaaaatgcaactccttcctatgtcgggttggtacgccggggtacaatataatttcacgccgaagattttcatgtcggctacatatagccagtcgatgcttcatgccggaaattattatcggatagtaaatcccgaacaatacaaactcggacaatatctcgttaccaatcttttctggaatgttattcccgatttacagttgggaatggaatatctgcatggttggcggaaggatttcgataaaaacggagatcaggcaaaccggataaatttgtctgcgaaattcagtttctaa

SEQ ID NO: 1007 - DNA, 1119 bp, Bacteroides sp. CAG:144
atgacatttcaacaattgaatatttcccagcctgtattgaaggcattggaagagaaacagtttagtaccccaacatcgattcaacaacatgctatacccgtagctctgggcggtcgggatattttgggacttgcccagacgggaaccggaaaaacagcagcttttgcaatacccgtgatagaacatctgtatagaaaatcacaagcagaaaaaacgcggagcatcagagctttggttttgactcccacgcgagaacttgcgatccagatagaagaggcgtttgcagcttatggaaaatatacccgacttaaatgcgtggtaatttatggcggagtgagacagaaccgtcaggtcgagcagcttcgtcgcggagccgatatactgattgcgactcccgggcggttattggacttgataagccagaaaatcgtggatttgggaagtgtaacacatttcgtccttgatgaggccgaccgtatgctcgatatgggctttgtgcacgatatcaaacgacttttgccgttattgccgcaaaagagacagaatctgttgttttcggctacgatgccaaaagagattgccgttatttcggaaacgatacttcatcagccggtaaaggtggaagccgccccggtttcatcggtggtcgatacgatcgaacaacgtctctattgggtggaaaaaaacgaaaaaatagcacttctggtcgatgttttgaatacacatatcgataagacgatactggttttttcccgaaccaagcacggagccgataaaattgcgcggattcttaataaaagagatatagagtgtatggctattcacgggaataaatcacaaaatgccagacaattggctttaagttgttttaagtcgggaaaaataagagttatcgttgcgacagacattgcagcccggggaatcgatgtgcagaatctcggggttgttgtaaattacgacatgcccgatgtggcagaaacgtatgtgcatcgcatcggtcgtacgggacgtgccggtaaccgggggattgctctctctttttgctcgaaagacgagagggaagtggtgaggaatatccgaaaattgacgaccggcagactcgatgtcgtatcggtataa

SEQ ID NO: 1008 - DNA, 1386 bp, Bacteroides sp. CAG:144
aaaaacaatatagaaatgaccgaattaatcagaaaaaaactcaatgacagtcccatagcccgttggacggctatgtttatcgtatcatttaccatgatgtgcggctattttatcaccgatgtgatggcgtcgctcgaagttatgtgtacaacgcccgttgccgacggcggtttgggttggagcagctcggagtacggcttcttctcgggcgcatacggttatatcaatgttttcttgctgatgcttttcttcggaggtattattctcgataagtgcggaattcgttttacgggagtcatgagttcatctcttatgttgggtggagctttgctcaaatggtatgctttggcaaccgatttcggcgatgctacatttatgggctatcaccttcaagtcgttttggccagtttggggtttgccgttttcggtatgggcgccgaaattacgggaattacagtatcaaaggtcatcatcaagtggtttaccggccatgaagttgcgttggctatggggttgcaggtagcgatggcccgtatcggtacggctgtggcattggcgtgtagcttgcctatggcgagagcaatgcatagtgtttcttatccggtactattcggtgcgctttgcctgtgtgtaggtttggtggcatacttggtatattgtgtcatggataagaaactcgaccagtctgtcgaagcggtcagcgaggaaaaggaagaaggtttccagctgaaagatctgaaactgatttttaccaacaaaggcttttggctgattaccttgttgtgcctgatgttctatgccggggtgttcccgttcttgaaattcgccacgaagctgatgattgccaaatatcatgtagaacccgaaatggcaggacttattcctgccatgttgccgttcggtacgattttgttgactccggttttcggaactctttatgaccgcattggtaaaggagctacgcttatgcttattggatcggtcatgttgacgatcgttcatcttttatttgcattgcctattttgcctacgtggtggtttgctatcgtaataatggttgttttaggtattgccttttctttggtgccttcggctttgtggcccagtgtacctaagattattcctatgaaacagctcggatcggcttatgcgacgatattctatattcagaatataggcctctctatggtaccggtacttatcggctgggtcattgagacctattcgacacatgtcgatggagcaggtgttgtaacgtatgattatacgatacctatgcttattttcgccacctttgggattgtggctatatttatttctctctggctgaaaagagaagatgcccgttcgcattatggtcttgaagacccgaatatgaaaaagtaa

SEQ ID NO: 1009 - DNA, 1440 bp, Bacteroides sp. CAG:144
atgaataccaaaatttcccttcctgaattgatcgaccagttgagtcggaaaagcaactgtaccaaaaaagaagcggaacagtttctgaaagagtttttttcattggcagccgacacagtcgtacaaggagaaaatcttaaaatcaacggtttgggccagtttcggctggtttgggtagaaccgcgtgtcagtgtcaatgtacgtaccggcgaaccgatggaaattcccgggcattacaagttatcgttcgctcctgataaaacgatgagagaggctgtcaatgctccgttttcttgttttgtacccgaagttttgcccgatgatgccgaaatcgttcaaggcgaaaacgccacattgcctgatgacgtcgatgaagatttttccgataaaatcgtagaagaagattatgacgatgccggcgatatgaaatgtgaagacggggtatcggagtgtcgaagagaagaaatcgttacggaacaagaaacgacagatgtgaaggaatttcctggttctgttgaagcggagttgacggaagaatcgggtaaagaagaatctgctcaggtcgtgaacacctccgggaacgtgcaggaaaaagctgaatacgaagaacctgtaaaaaatctttcggaagaagaactcaatgctttggccgattttgtactggaaaaaatcgtggccgataacaccacacaagaaacttctgggaaagaaaatgctcgggaggttgtctccaagactgtaacggcgacagaggatatttgtacggggcatcgggaaaatgagataaaagaagagagagatctttccgatgacaatgtcgcagaagatgccatttctgatagcgggagttccgaagaagattttggggaagaagaacgcatttcattgtgggataaaatgcaacgacgtccgctccttaccggtatgtgctctgttttgttgcttttattggtgattgccggcggtacggtatggaatttaaatcgtcaaggcatcacactgggagatgcgtggaattactacttcccatcggagcagcaggccgtagaaactctttctgtgggaaaaagtgcccttttgcaaaccgatggagaaccgcttgaagaagagaacaatcttcggtctacggttgttacagaaaaagaaacgatgtcgggaggagggcaggtcgaccttcgatcattgccaccgcttgcctcacatcgcttgggtgttggcgacaggctaaccttattggctctcgaatattatggcagcaaagatttttgggtgtatatctatgaagagaacaaggagcgtatgcccaatcccaatcgtctctctgtcggcctcgaagtgaaaattcccgatccccgtaaatatggtatcgatgcggaagatcagcaatctttggcgagggcgaaaagctttgccgaaaggctgaaagaaaaattcgagtga

SEQ ID NO: 1010 - DNA, 2532 bp, Bacteroides sp. CAG:144
atgtatatctttgttgagttctcttttatgtcttatatcatgaaatgtcaccgtgccgcttcaggttcaatgccgaagataagttcctttataggaatttttgtcttgatgcagatttttttcggtatatcgtctgcccgggcgcaagaaggattgaagttgtggtatgataaacccgcgggtgaatgggttgaggcgttgccggtagggaacggacgcatcggggcgatggttttcggcggagtaagcagtgagttgatccggctgaatgagtcctcgctttggtcgggttgtccggtacaggatagcctcaacatcgatgccccttgttacttgcctttgattcgtaaagctcttttcgagggcgatttttctacggctgcgcaaggttgtcggttcatgcagggaccttatagtgccagttatcttccgctgggagatttgcatatctcatatatgatgccccgttcggctcccaccgattattatagggcgttgaatctctcggaagcatcggccgttactcgttttacggtggctggtattacctacgaacgggaggtgtttgcttcgtcttctgatgatgttttggcagtgcgtctcactgcttcgagaaaaaattccctttctttgtatatcactctttcttctccgttgcattatgagatggaagccccggctttcgatgaactgacgatgcggggtgttgctccgatacgggtcgatcccgattattatgtagtcgatggtcggagtccgattgtttatgaggagaacgggcataccggcatgagattccgtacctgtctgaaagttgtagccaaaggcggtgtcgtatcgtccgatacgtgcgggatacatgtcgatcaggcatcggaagtggtggtgttgctttcggcagctaccagctttaacggttttgacaaatatcccgataccgaaggtgccgatgaaaaaagtcttgccgaaaacatgttgcataaggcatcggcctatacctacaagaatttgaagaaacgccatgtttccgattttcgaaaatatttcgatcgtttctccgtttctttggggctgacagccgattctttgaaaaagattcctaccgaccggcggctcattgcttatgcccggggacattccgatcccgagttggaagcgctttatttccagtacggtcgttatttacttatttcttcttctcgtataggtggtcgtccggctaatttacaaggtatttggaatccttatatacaagctccgtggagctccaattatacgataaatgtcaataccgagatgaattattggccggccgaggtaacatctcttccggagatgcatgaaccacttctcgactggatttccggcctgtctcgtaccggtatggttacagccagacagttttatggctgtcgaggttggatggcacatcagaattccgatatttggtgcatgagcaatcctgtggggaatggtgtcggagacccgacgtgggccaattggtacatgggcgggaattggctgtgcaggcatctttatgaacattatgcctatacacgggataagagttttttacaggaagcctatccgattatgaaaggtgctgcccgtttttgtttggattggttggtggagaaggacggttatttactgacggctccgtctacttctcctgaaaataattatcgtgtcgacggaaagatcggttccgttacgatgggggcaacgatggatatgtctatcatttgggatctgtttacccaccttatcgaggcttcggccgttttgggtatcgacgcgtcgtttcgggatacgcttgttacggcacgggaacagctttatccgttgcgtataggaagccggggagagttgttggagtggtatgacgagtacgaagaggtagatccgcatcatcgtcatgtctcgcagctttacgggctgtatcccggtcgtcagatttctcctctttatacgcctcggtatgccgaggcctgccgccgtacactcgaaatgcggggcgacgggggtactgggtggagtaaggcatggaagataaatttttgggcgcgtttgctcgatggagaccatgcttataagatgatacgcgatattatgaaggctgtcggtcccgggacttcaaataagggaggtggtacttatcctaatcttttcgatgcccacccaccctttcagatcgacggaaatttcggtgctactgccggtttggcggagatgttgttacaaagccatttgggagaaattcatttgttgccggccttacccgcagcctggtcgcggggagaggtctcgggattgaaggctcgcggaggctttgatgtctctttttcttggcgggacggacgtcttgtaaaaggagagattctctccgtggccggagaatcttgcaccgtgcgatcgaaacagcctctttttatcaagggagcgaaggtctcggcccgagaaaagaatgggtattttatatatacgtttgctacgcgggagggtgtccgatataagtttttgacagaataa

SEQ ID NO: 1011 - DNA, 1905 bp, Bacteroides sp. CAG:144
atgagcgatattatccatcttttacccgattccgttgctaatcagattgccgctggtgaagtcatacaacgtccggcatctgttgtgaaggaattggtcgaaaatgctatcgatgccggagcgaccgagatacaaatctttataaaagatgccggacgtacattgatacaggtggtcgataacggtaaaggtatgtcagagaccgatgcccgattatctttcgagcgacatgctacatccaagataagttcggcacaagacttgtattctttgcgtacgatgggatttcggggcgaagctctcgcttctattgctgccattgctcaagtggagttacgaacccgccgtgccgaagatgagatagggacatcgattctcatatcgggttcgaaagtcgaatcacaagaatatgtctcgtgtcccgccggtgcgaatttcatgataaagaatatttttttcaatgtcccggctcgaaggaaatttctgaaatcgaatcaagtggaattcggatttattatgtccgaatttgaacgcatggcactggttaatacggatatagctttcaagctcgtccacaatgatgtagaattatataatctcccggcgtctaatttcagacaacgtattgtctccttattcggtaagaatttgaaccagcaccttctctctgttgatgttcagacttctttggtttctattactggatatatcggacaccccgactcggcccgcaaacgcaatgcttggcaatacttttttgtcaatggtcgatatatgcggcatccgtatttttataaggctgtcatctccaattacgaacaattgttgcctgccggcgagatgcctcactattttctgcatatacaagtagacccatctaccatagatgtgaatattcatccgacaaaaacagaaataaaatttgagaatgaacaacctatatggcaaattttatcggctgccgtgagagaaacattgggaaaatccaatgctgtcccgacaatcgacttcgataccgaaggtgcacccgaaatacctatattgcatcacggtcagcaggttgagccacctcgggtatcatattctcccgattacaatccgtttgcgtcgttttctacaaaaccctcgaatcattcgcataaagtcgattacgattggactcagctttataaagattttcaatcgaataaagatatgcctatgaccccagaagaggggtccggagagataaaaataccttctaagataaattgcctgacttctgtcgaggatatgaccaaagtatcatcggaagcgataccgctttccattccgatgcaggaaacttcccgttcgatagatacgggtattgaacatttgcagataaaaggtcgctatatattgacgtcggtaaaatcgggactgatgattatcgaccagcatcgggcgcatgtacgcatcttatttgatcgatatatgtctcatatacaggataaaaaaggcgtttcccagcgtcttctttttcctgaaatgatacaattgtctccggcacaaggagcagaattgctatcggttcaagaagattttgaagcattgggattcgatatttccgatatgggaggaggggcttacgccgtcaatgcagttccggcaggtatcgacgggcttgatgtgtcgacgttgatcgataaaatgctcgaaacagcgacgcaaagaggcggcgatgtaagtgtcgacgttcatgaagccatttcgttggcattggccgagtcggctgcaattccgtatggacagattttatctccgctggaaatggagaaattgatcagtgatcttttttctttaacagcccccaattatactcccgacgggaaaaccgtcgtatcggtgataggggatgatgaattacaaaaaagattccgatag

SEQ ID NO: 1012 - DNA, 1368 bp, Bacteroides sp. CAG:144
atgaacgataaagaacgaatcgatacgcaacgtctctttttcgggaaacgaaaacccctctccctcaaatacaggttacaatcgctcaaacggttgcaaaaaaccatacggcaatacgagtccgacatagaaaaagcccttgaaaacgatttacacaaatctgtatacgaaagctatacgaccgaaatcggatttgttttgagtgaattacgacgcacaatcaagcatttgaaacaatgggccgcacctcgacgcacccgcatgccgctttttcttttcggctcgacaagccgcatcgaattccaagcatacggaaacgtattgattctcgcaccctggaattacccgttccaattagtcttcaccccccttataggtgctgttgctgccggaaactgtgtaaccgtaaaatgttctccttatgctatccgcacaagtgaaatatgtcggaaaatcattgacgaagcctttgacagaaggcacgtcttatggatcgataccgataataaaggaaccgacagattgctcgaaatgaaatgggactatattttttatacaggagggcctgtctacggacgtaaagtggccgaggcggcagcccgccatctgaccccgattacactcgaattgggaggaaaaagcccgtgcatcgtacatcacgatgcacatctggcatctgccgcaagacgtatcgtttggggaaaattcatgaattgcggacaaacctgcgtggctcccgattacctgctcgtacaccgcgatattgccgatgagctcatagactctttacggcaagaaattgtgcgacaatacgggaaaaatccacaagaaaatagtgattatcctcgtatcatcaatgaaaaaagattttacgaacttatactgctcacaaaacaaggacatatcgaacacggcggaatatatgatgcggacgacttatacatcgcaccgacactcatttcgcacataactcccgatatgcgtatcatgcacgaagaaatcttcggtcctatacttcccatcttgcaatatacaaccctcgatgaagccatcgattttatcaacagccgggaaaaaccgctcgcattatactatttcggtaacaaacggaaagagatgaaaaaagtattgaaccaaacttcatcgggcggttcctgcatcaacgatgtcgtatctcatgtcgctaatccgtatctcccgttcggtggtgtgggaaacagcggaataggtcattaccacggacgggaaagtttttatactttcagccatacccgctcggtgttacaaaacaatacaaaatggaatcccggcatcaagtttgcacctttcgccgggaaactgtctcttataaaacgactactgcgataa

SEQ ID NO: 1013 - DNA, 1332 bp, Bacteroides sp. CAG:144
atggaaaaagaacaaaagccccgtcgtccccgtatcggagagacaagagggagtgccaactatgaaggcagcagtgaaaaatacgaaaaagtaaattattctcgtcgaaacgattccgattacaactttaacaatcgacgcccttacaacaacgaaaatcgcaccaacaccggctattataaccgtcggaacgatacttatcaaggcaataattataaccgtaattataatttcaataacgatcgctcgggagaagataatttcaaccgttacggagattacggacacaatcgcaacaattacggcgagcgtcagaatggaaactataaccgtgctgataactaccaaagcggatataaccgaaacaactacaacaatcgccgcccgttccgttccaacaacgagacaaacgaagagaccaactacaatacaataggagaaaacaggccttatcgtcaagaagggaaccgatccggattcaataacagattcggcggctataacaagccctacggaaaccaacaacgccggccctacgggaacgggaataatcgtcagcaacgtccggccatgcctcggagaatcgtttacgacgagagtatgatagaccccaatgaaccgatacgcctcaacaaatttctggctaactcaggattgtgttcacgtcgagaagccgatgagtttatccaaaacggagaaatcaaagtcaacggtgaagtcatcacagaattgggcaccaaaataacccgcaacgatgtcgttactcacaacgataaagtcgtattgcccgaacataaaatttatgttctgctcaacaagccgaaagactgcgtaacgacgtcggacgacccgcaaggccgtcttacggtcatggacatcgtaaaaaatgcatgttccgaacggatttatcccgtcggacgcctcgaccgtaataccaccggagtgctcttgcttaccaacgacggcgatttggcctcgaaactgacgcacccgaaattcgtcaagaaaaagatttaccacgtatggctcgataaagatgtagccgaagaagatatgcaacgcattgccgacggtatagaactcgaagacggtcccatacacgccgatgcaatcagttatgcgaccgagatcgacaaaaaccaagtaggcatagaaatacactcgggccgcaaccgggtggtacgccgcatattcgaatcattgggctatcgggtagtaaagctcgaccgcgtatattttgccggtcttaccaagaaaaatctgccgcgcggtcgttggcgtcatctgacccaacaagaggtaaatttcttgaaaatgggatcattcgaataa

SEQ ID NO: 1014 - DNA, 1812 bp, Bacteroides sp. CAG:144
atggacaactatatcgtctcggctcgtaagtatcgccccacaaccttctgctctgtcgtcgggcaaaaagctttggtacagacgctcaaagcggcggtcgttacccgcaaactggcgcacgcctatcttttttgcggaacccggggagtgggaaaaaccacttgcgcccgcatttttgcaaagaccatcaactgcgaacaccctacacccgacggggaggcttgtaacgaatgtgagtcgtgccgtgctttcaatgagcagcgctcgtacaacatcatcgagctcgatgccgcatcgaacaactcggtcgacgaaatacgcagccttatcgataaagtgcgcgttccgccgcaactcggacgctacaaggtatttattatcgatgaggtacacatgttgtcgacggcagcgttcaatgcgtttctgaaaaccctcgaagaaccgcccaatcatgccattttcatattggcaacgaccgagaaacacaaattgttgccgacgattctgtctcgttgccagatttacgatttccagcgtatcaccattgaagatatagtcgaacacctgcgttatgtcgcttcgcaggaaggttttaccgtcgacgacgatgccttgaatgtcatcgcccgtaaggccgatggcggtatgcgcgacgcattgtctattttcgatcaggtcgccgcctcctcgggtggaaatatcacgtaccagacgacgatagaaaacctcaatattctcgattacgactattatttcaggctcaccgatgcactgttggacggtaatatcccggaggccttgctcgttttcgactcggtattgcgggctggtttcggagcgcaacttttcgtcaacggactgagcagccatttcagggatctcatggtaagtaaagatgcggcgacgctcccgttgctcgacgtcgggacggctgtcgccgaacaatatgcccgacaagccaaacgttgcgacaaggctttcctctacaaggcgatggatttgagcaaccgctgcgacctcgactaccgtatcagcaacaacaaacgtttgctcgtggaattgatgcttataaagatatgcagtctcggaatgccgcaagaaataggacggtcgtccgaagcaagaatactttcgaccccgtcaactcctgccgcaaaccctcgtccagcggtgtctccgaccaccgctcaaacaaataagtcggttgtggaggccgtggcacaatcgccatcggcagcatctgaaccccagcaggaatacgggcaaccccggacggcaggtgaagaagcagctccggcagcctctcgcctccaaattccgagaccgcaagtcgctactccgcaggcaaaagttccgactcgtaaaattcctcgtatttcactcaaacacggtgtagagccggatccttcggaaacgccggtggcaacagtcgaaacgactgtcgaaatgaacgagccttttgctctcgatgccctgcatgaggcatggctgcgttttaccaaaaagattcctaccgaaacggtattggtacagacaatgtatttgtgtatgcctcaaatgctcgacgccacaacattcgaggtcgtggtcgataacagagcccaaatggataagctcaatggccggggggccgacctgatggctttcctccgcacggaattgcgcaatacacatcttgaaatgcggattcgtgaacgtgaacgcgaagaacggcaaaaggcattcagccccggtgaacgatttgtcatgctggccgaaaaaaatcccgaattgaacagactgaaagacattttcggtctggaactctcttaa

SEQ ID NO: 1015 - DNA, 1452 bp, Bacteroides sp. CAG:144
atgacagacgctttctctcgggaaagtacagaacccggcttatcgtcctgctgtttttttaataaaacttccggcatggcagcgacaaaacaaaaaaaatggcgcattatttttcgtcggacatatcggtttatcatatatgatatgtggcgtattacgggaaatgaagtttccggtagccgccatcggctcatcaatctgatgaagaccatttatctctcgatacaacgttttatcgccgatgatttgcaggcacgcgccgccgcactcacgttcaatacgttgctggccattgttccggcgctggcattggtctttgccgtagcaaaaggatttggtttccagaccatcgtacaaagtcaattgttcgactacttccccgctcagcgagaggctttggagcaggccatgacttttgtcgattcttatttagcgcaaaccaaagacggcatttttgtgggagtgggtatccttttcctcatgtggtcggtcgtgagtctgctgaatagcgtcgagacgacattcaacgatatatggcaggtgtcaaaacagcgatcgatatatcgtaaaattgtcgattatatcgctattatggtgttgttgcccattttgatgatcgttgccggcggattgtcgattttcgttacatcgggtatcgataccaaaccgatgttggcttttttgagtcctgtgttgcgttttgtattggcgataagtccttatattttgacttgtatcgtttttacggctttatatattttggttcccaatacgagggtcaagttttggaatgctctggtatcgggggtaatatgcggcttgtcgttccagttgttgcagtttgtctatatcagcggtcaggtatgggtttctcgttacaatgccatatacggcagttttgctttcctgcttttgtttctgttatggatgtggatttcgtggctcatttgccttttcggggcggttctttcgtattcttcccaaaacgtcgaaaaattcaatttcgataaagacataaaaaatatcagccgtagatataaagattttgtcgtactggtggttgtttcggtcatcgtacagcgttttgtacggggagaggctccgctcacccgacatcagatagcgtcgtcttatcgcataccagtacgccttacgggacaggtcttgcaacagttgttggaggccaaaatcatacgaggtacacctacctccgacgaacgtgtgtgggcatatatgccggcaatcgatgtgtcgagattaagtgtgggcatgcttttaaggcgtctcgaccgtaacgggtcggaaaatttcaagatcgaccgccgtctttatcataagcagtggcgggctatgctcgatactcgggaggcctcgtatctcaaaggcgatacgatgctggtaaaagatttggatttcaattctttcatgaaagatataaaaattgaagagtag

SEQ ID NO: 1016 - DNA, 1131 bp, Bacteroides sp. CAG:144
atgaaaatcaaacattctttccttttgtggggacttgtatttcttctcttcgtttcttgcggagaaaaacaaaattatctctcaggccagattgaaggtttggaaccgggtgattgcattattttggggttgatcgacccgattaccgatgaaatttacatatccgattcgaccatcgtagaaaagaaaaatcatttcgacttatataccaaagcgacagaccaatgggcatatttagctcactgtcctaaaaacgagaaaataaaaatcgaacatcaccgaggaaacagattccgtctctttcttgaaggatacgcatctctccacctttccggatctaccgacaatttccactacctaaaaattaccggcggtctatatgaaacgcccgatttgagaccggcatttaatttgatggacagcgctctactcatacaacaagacggtatcggccggtccccgtccgacccattacgacggacattgatcaaaaaatcgaaccgtatgttgatgaccgtagactccatggaacaacaatttgccgatacacatcccgattttgcatactcggcagccattatgcgctatgtcaatgaaaaagaactagaaaaacgtttccgacaattaacgccacgagtacagaaaagtgtgccgggcatagcggtcagcaatcatttgcaaatatttcgatcgacacaaccgggtggacttgctcccgattttacacttttatcactaaccggagattcgatacgactatcggactacaaaggaaaacacgtatttttggaattttgggggtcttggtgcggaccttgccgcatgatgtctcctaagctcatagcattcaaccataccctaccgtccgacagttctatcatcatgataggcatagcctgtaacgaagcgagtaaaaagaattggaaaaagaccgttgaagaagataatctcaactggattcaagttctagaagaaaacaatcaagggaaattatccgtgagccgccaatatgcaatcgacggctatcccacatcattgcttatcgatccaagagggaaaatcattttacggggccaccccgaacacatattagggaaagcaagtgctcttctgggtctatcctctaaataa

SEQ ID NO: 1017 - DNA, 1605 bp, Bacteroides sp. CAG:144
atgaaaaagacgattttgctattactgcctctcctgctcacaacagcatgcagccacacaaaaatcatagagcgaccagaaattgcactcaacagttcgacaaactatctgtctctcgaacgtgtcgtatgtactcccgaggcaacccgtctcgacctgactgtatgttgtatttccggaaaaggcttttcgatagaaaaagaagcctatctgcaaagccgggaaagcggactgaaatatgtacttacaggtgcagaaggcatcgaaccgggcaagaaaataaaaaccgactctaccgggctggtcgatatttcattactattcgaaccgattcctaccgatgaaaaacaaatcgatttcatcgaaagcgaagactggcaactcttcggtatcgacctgagcaaaaagaaaaagcctgtacaaatagaatgcctcatagaagggactgtcataaaccgcccccaaagctcggccattctattgaacacatcagaaaaagtattcgaccgacacaccaagggaaatatagttatccccatacgcaatggaaaattttcttacttgttgcgaaccgatacctgtacgacatacggactttgcttcaacgacgaatgggtaaacggacgcatgttgaataagatttttttcgctgaaccgggaagcatttatctgactatcgaaggagatgattctgtacacatcgaaggagggaaacttaccgaagaatatcaaaatatccagaaatacggacgagatcgcctgcaaccgatttatgacaaacgagactccctctacgacatagagaaactttacacacccgaggtatatgcccttttcaaagaaatggataattgtaatgacccgactcaacgaggtctattgggagaaaagttccaaaacctgcgtgtagaaggaaaagcatacagccgagaaggtaatgctttacaaaaagaggccgaacagacccatgccgaaatcgaaaaatgggaactcgacagaatcgccggccagccctctcttgcaacctactatttgctttttgaaaaaataaaaagggcggtcgtctattcgagacagaccatacccgattccattatcgaaatttatcgaaccctttataaaccgatatatcccgaccatccgtttacccgggacatagaacaatatatcaaagcacaacaaagttttgtcggtgggaaatatatcgacatcgttctacctgacacgactggaacaacataccgtctgtcggacctgatacaaggatgcaaaatagccctcatcgacttctggtcgatacactgcggtccttgccgacgtacctcaaaagccatgattcccgtgtacgaaaaatacaaagataaaggattccgcatcgtcggtatcagccgcgacggtaggcaacaaatgatacgaggaatactccatgacggctacccgtggataaatctcatcgatgaatataacaaaaaccaagtattcaaaagctacggtatcgaaaatactgccggatacacattcttagtcgacggaaacggaacaatcgtcgctagcggagcctcggtcgaagaaatgatctctcttatcgaaaaatactgcaaataa

SEQ ID NO: 1018 - DNA, 1272 bp, Bacteroides sp. CAG:144
atgatagctctggtcgattgtaataacttttttgcgtcatgcgagcgggttttcaatccctctttgcaaaataagcctgtcgttatactttccaataatgacggttgcatcattgcccgcagtaatgaggccaaggcattgggtatcgctatgggggtaccgttgtatcaggtaagggaactcctcgaacgggaaaatgtcgcagtgttcagcagcaattacaatctttacggggatatgagccgtagggtcatgtgccttctttctgaatttaccccagatcttgttccttactcgatcgatgaggcttttctcgattttaccggagtgtgtaccgaagatcgtttccgggattacggccgacggattgtggagaccgtcgagcggggtaccggcatacccataaccatcggtatcgctccgaccaaaacgctggccaaagtcgccggttatttcggtaaaaaatacccggggtatgggggtgtttgcctcattgatagtgaggcgaaacggatcaaggcgctcgatagttgtcccataggaaaggtttgggggatagggcgtcatcttttggtcaagatggaatattacgggataaagacagccggggattttgtacgtcgtcccgagagttgggtacgccgtaattttaccgttacgggagtacgcacatggaaagagcttcaaggagaaaattgtatcggtgaagacgatttaccgcataagaaaagcatttgtaccagtcgcagtttccccgatcagggagtggctctccatgcgcgactcgaagaggctgttgccaattttacggcctcgtgttgccgtaagctcaggcggcagcatgcctgttgccgggcagttacggtatttgcccatacgagccgtttccgaagagatatgccgcaaagctatatttatcatacccgttatctgccggtaccgaccaataatgtgagcgaacttatctctgttgtcgtgcagttgttgcgggaaaaatatcccgaaggagatacatattattataagaaagccggagtgatggtgtgggatataactcccgatgaggcggtccagacctatcttttcgattcggtcgaccggcagaaacaatcggctcttgccgaggccgtcgatcgtatcaatagaaaaaacggtcgcgatacagtgcgtatagctttgcagggttatgatgtcagttggcatttgaagtgcgagtataaaacatgccaatatacgacccgtctcaatgaaataatacgagtgaagagctga

SEQ ID NO: 1019 - DNA, 2169 bp, Bacteroides sp. CAG:144
atgaaaaaaatacgtttcctaatctgtgtgctggcttcgattgcaatgtcatttcccgtggctcatgccgatgaaggtatgtggttgctccccctgctgaaacaacaaaatatcgaacagatgaaaggtctcggactcgaaatctgcgccgaggatatttaccaccccgattctgtttcgttgaaagatgccgtcgttattttcggcggaggctgcaccggagaggtcatttctcctcacggtttgattttgaccaatcatcattgcggatacgaccacatacaggctcacagcactgtcgacaatgatttgctcacaaacggcttttgggccaaaagtcgccaagaagagctacctaatccgggacttacggtaacgttcatagacaaaatcgaggaggttaccgattacgtggaagaggaattgaaaaaagataccagtaagatagaaatgaagtatctcaatgcaaaatttctcaactcattggcggaaaaacgcgtgggagaagaatttctgaaaaacaatccgggaacgactgttatcataaaaccgttctacgggggtaaccggtactatatgttcacacaaaaggtatatcccgatgtgcgtatggtgggagccccgccctcttccatcggtaaattcggagccgataccgacaactggaaatggccccgacacacaggcgatttctcgatattccgagtttacgccgacagtctcggcaatccggcgccatacgacaccagcaatgttcccctccgaccgaaaaaatacttcgacctcagtatccggggtgtcagagaaaacgatttcgtcatgctcatgggatttcccggccgtaccaatcacttctacacccccatcgaggtacaagaacggaaaaatatcgaaaatcaaatacgcataaacgtccgagaccttcgccaacggcttttattgaacgccatgctggccgatccgaaagtcaggatacaatatgcgggcaaatatgcctcgtcgaccaacagctacaaaagcagcaaaggcatgaacaccatgatcgaacggcaatcgaccgagtatctgaaagaacggcaaatgaacgaactgctcaactggggttgggataacgatatacaagaataccgggaggccgtagatattatcgcccacgaagtgaaaaagcgagccacactgaaaatccgtatgcaatatctgctcgaagccttatggataggaacggaattcagccgtgtgccgaccaacttcgatgcattgaaaaaaggtctcaacggaaacgattcgacccgcaaagcggcattggaagactttgacaggctctattacaaattctacaacagagactatgcaccggaagtcgatcgccgcatagccaaagctatgctgaaaatgtatgccgacagcattgcacccgaacactatccagcttttttcaaaaccatcgataaaaaacacaagggaaatatcggtaaatatgtagaccatttattcgaaagttctttatttgccgatccgcagaaatatgagaaatggaagaaacgtcctaacatcaaggctctggaaaaagacggcatggtacaatatgcccgttccgtcaaagaagaagcccaacggatcaaccaagcactgtcatctatcgaaaatgagataaccaatgcccagaaacattatatcgcaggacaattgatgttgcatgacgataagcccaactatcccgacgccaattttaccatacggcttacttatgggcaggtaaaatcttattctccatcgaacgccgtaacctacaatttcgaaacaaccctcgacggcgttatggaaaaagaaaatcctacaaactgggaatttgtcgtcaacaaaaaattaaaagatttgtaccaaaggaaggacttcggtttttacatcaacgaaagcgggaaaatgcctgtcaactttattgccaacactcacacgaccggaggaaactcgggaagtcccgttctcaatgcccgcggagaattggtcggtatcaatttcgaccggaactgggaaggcatcaccggcgatattcaatatcaaggcaattaccaacgctcgataattaccgacatacgatatatactttttatcatcgacaaatatgccgaagccgattatttactcgacgagatgattatcaaaccgtaa

SEQ ID NO: 1020 - DNA, 879 bp, Bacteroides sp. CAG:144
atggaccagtacaacgaaatgctgaaaggttacgacaccgacctgcgagacgatgaaatctctcaaataacgaaaacaatcctgcacgaaggattacgagaaaactgcaatgaagaagtttaccgcttccttttcgggtgcatcgacttgacatccttgaatccgaccgacaatcaaaatcaaatcgccgaattcacccgacaagtaaacgaactggacaatcaaaatcccgaactcaaccatgtcgccgccatatgcgtttatcccaattttgtagaatgtgtacgcatgaacctcgaagtctctgatgtcaacatagcagctgttgccggagggtttccttctgcccaaacatttaccgaagtaaaaatcgcagaagccgctctcgccgttgccgaaggagccaacgagatagacatagtcatgaacgtaggacaatttctaagtggggaatatgaagatatttgcgatgaaatcgcagaaataaaacacagctgtcatggagatgcccgactgaaagtcattctcgaaaccggagctttgggaaattacagcaacgtaaaaaaagcggccctactcgccatatattccggtgccgactttatcaaaacttctaccggaaaactgaatccaggcgctactcccgaagctttttacgtcatgtgtaccgccatcaaagagtactacgagaaaacacatacccgcatcggaatcaaggccgcaggaggaatctctactacaacagacgccataaaatactacacgattgccaaaaacgtattgggagaagaatggctcgataaagagttcttccgcatcggagcaagccgactggccagccgcttattggaatcgatagtaggtgcaggaaagaactga

SEQ ID NO: 1021 - DNA, 3273 bp, Bacteroides sp. CAG:144
atgaaaaacagaatggtaagtatgagtccgattaaatatagccttttgttgctgtgtttgatgataagttgtacgctgtcggcacagacgagttcgggtttcatatcgggtaaagtatatgaaatatatcaggggaaacacgagccgtcgataggtgtgaatgtttctattgaaaataaccagcgtcgtgtattgaccggcgttacgaccgatgccaacggtgcattctcgttacgtgtcccggccgatgccgctacgatcgtattctcttttatcggtatggagacgcaacgtattgcttataccggccaaaagacgatgacggtggttatggaggcttcttctcaggaattgagtgaagtaaacgtttctgccgaacgggtcgagacgaccgatatgggtatctcggtgcgtgaacagacggctgccacgcagaaaatcgatatgtcgagcgtggtagaaacattgccggtttcttcggtcgaagaggctttgcagggacgtctcgccggtgtggatattttgtcgggtggcgaccccggttcgaaaggttctattcgtatacgtggtacggcaacccttaattccaatgccgatcctcttatcgtcatcaacggtgttccttactcgaccgatatcgatgactctttcgatttcaatacggcgaacaatgaagattttgccgatatgttgaatctcaacccgtatgatatagaaagcattgaggttttgaaagatgcagcttctacggctatttacggaacaaaagcggccaatggcgttttgttgattacgaccaagaaaggtgccaaaggaaaaaccaactttactttctcttcgaagtttacggtaaaggtcgaacccgaatcgatacctatgctcaacggagatgaatatgtcgcttttatgcaagatgctatttggaatacggccaatgcgcaaggtttgcagaattctgcatcttatctcgaattgctttttgatactcccgagataggttatatgcccagttggcgctatttcgatgagtataatgccaataccgattggctttcgcagatcaccaaagatgcatggattttcgataacagcttctcgatgtcgggcggtggtgaaaaagcaacgtatcgtttctcccttgcttatatgaatgaaggcggtaccagtataggtacggggctggatcgtatcacggccaactataatttgacgtatcgtttttccgataaattcaatatgtatgccgagttctcttataccgatacgcagaaagacgaaccctactttgataatgtccgttcggaggctttgcgcaagatgccgaataagagcccttattggatcaatgatgctacgggtgagcctaccgacaactattttatccgccaaaacagcgaagagttccaaggagcatctgatggagataaaaattatcatccgttgattgtggcaaatgagagttacaataagacgacccagcgtgaagagaggattctctatcgagccaattatcagattcttccgggattcagttggacgggttgggtggccatgaagtttaaaacggtcaaaactcgccagttcctgccgcaaacagccggagatttctcgatcgataataccaatgccaattatagctatgacggatattccaataacttgtcgttacagaccgagaataaatttatcttccggcgtcagttcggtgtacacggacttacagctacaggtttgtggcgtaccgaccagtctcgtagttcagaatcggccgaggccgtttatggtgtggctgctcccggaatgtcggatcctattgccggaggtgccattaccaaactgggatcgggtacatccgaggcccgttctatggcggctgtcggtatggtcaactatacattgttcaaccgttatatcgtaagttttacggccaactacgagggtcggtcgtctttgagtaaggccaaccgttggggatttttcccggccgtgggtgtggcttggcatgtacaagacgaggcttttatgcaaaatctcgactggtggacacagtttaagttacgcgccagctggggacaaagcggtaatgctcctaagggtactgctccttatgtgggaacctattcttcgataggtgattacaataccagtgcggctatcgccccgaactcgatgcaactcaacaaactgaaatgggaaacttcgaccgagtacgatatcggtaccgacctcgggttcctcgataataaattgacgatgactttcgattattatcataaggaaacgaaagacttgttgcagaccaaagtgacgataccctcgacagtagggtatgcaagcaatcaattggcttactacaattccggtagattgagcaatatcggttgggaataccgtatcgattacgaaatattccggaacaaggattggaccgtgtcagccaacttcaatatcaaccgcaacgtaaataaaatcatcgagttgccatcgaatattgcagaggagaatttctcgttgaagaacggtgagtatgcccaaagactcgaacccggtgttgcggtaggttcgttctacggtttccgttatcagggcgtataccagaatacggccgatacctatgctcgcgatgccgaaggtaatgtgatgtatgatttgcagggaaaacccattgtcatgaagaacggatcttatgtatgttatcccggtgatgccaagtatgaagacatcaatcatgacggaaaaatagatgcgaatgatgtcgtttacatcggtaacagtaaccctatgctgaccggtggtggcggattcaatgtcaaatacaggggcttgggactgacggtattcttccattatcgtttgggacaaaaagtgatcaatcaggctcgtatggattcggaggctatgtatggtcgcgacaaccaaagtaaagccgtgttgaaacgttggcgtacagaaggtgacaataccgatataccgcgcgctctttatgactacgggttgaactatttgggttcggaccgatttgtagaagattgttcgtttgtccgtctcaaaactatctcgctttcttacagtatacctaagcgaatctgcaagaaaatgaagataaacggtttgaacctttttgttacgggttatgacctctttactttttccaattataaaggacaagaccccgaggtcagcctgccatccaaagtaacagatctctccaaagataatgcgcaaacgcctcgcagccgtcgtttttcttttggatttaaccttaatttctaa

SEQ ID NO: 1022 - DNA, 2199 bp, Bacteroides sp. CAG:144
atgataaaaagcatattacccgttctcgaaatgagttgcgccgtatgtgccaacaacgtagaaagcactgtaaaaaaactcccgggtgtgcggtcggcagttgtaaattttgcagcagagaatctcttggtcgaatacgacccgaccatactatctctcgaaaaaatacaagcagccgtgcaagcagccggatatgatctcatcatatcggaagaagaaaaagaaaaacaacgcgaagccgcctctttgcggcattacaagtccctgcgcaaccgcatgcttgtagcttgggtgtttgctatcccactcatggtcgtttcgatgggcttcatgcacacgccgcatatcgaatgggttttgctcggcctcaccctccctattttgctttattcgggacaatctttctatgttcacgcatggaaacaattgaaacaatgcacgtcaaacatggatacgctcgtggcactgagtaccctcacggcgtttctgttgagcctgcttatgacacttttccccggatattggggcgattacggcatcgaaatccatgtctactacgaagcctcgggtatgattgtcgcattcgtccttatcggtaaattcatggaagaacgagctaagcggagcacctcctctgccttgaaaagcctcatgggattgcaaccgcagaccgctctgaaaattaccgaatcggggaaaaccgaagtgaatatagccactctgaaaatcggcgaccgtattcttgtacgtccgggtgaaaaagttgctgtcgacgggtttgtcatcgaaggggaatctttcgtagacgaaagcatgataaacggagaaccgatccccgccgataaaaaagcgggagacaaagtactggccggaactatcaatcacgacggagttcttacgatagaagcccgtgccgtaggtgcgcagactctcctctctcaaatcgtgcggcgcgtacaagaagcacaagggagcaaagctccggcacaacggttggccgaccgtatcagccgtaaattcgtcccgaccatcatcattctcgcgattctcacatttatcggctgggaatatttttacgaggggccgggcgtactggcatacagcctgctggccgctatatcggtactggtcatcgcctgcccgtgtgcactgggattggctacccccacggctctgatggtgggaataggtaaagcagcccgagaacatattcttataaaagatgccgtcgccctcgaaaaaatgggacaaatcgacagcatcgtcctcgataagaccggcacgctcacacaaggccgtcccgaagtcatcgacatcatatggctgaaaccggccgacgaccgatacatcgacctgctcatcgctgctgagacccaatcgcaacacccattggccaaagcaatcgtttcgcattggaacgatcgtattccgggaaaacctcttatcgaacactttgaaaacatttcgggaaaaggtatcgaaataaaatcccgggaagaaacattccgtataggcaaccgttctttcgtgtttacggattcagctctttcgcccgaaaccgaagaaaaaatttcatcgtggttatccgaagggaaaagcgtagtctactacggcagtcatgaaggaatcatcgccatcatcgccatagccgacagaataaaaaaatcatcggccgaagccgtaacccaattacagcaactcggtatcgaagtgtacatgcttaccggagacaatgaagcgaccgcccgttccgtcgcccaatcggtcggaatcacccgtttcaaagcggaagtactgccacaagataaagaagactttgtatccgacttacaaaaggctggaaaaaccgtcgctatggtaggagacggaatcaacgattcgcaggcattagcctgcgccgacgtgagcatagccatggggcaagggacagatatagcgatgcaagtagcaatggttacactcatgaattccgaccttctcttgctcacacgtgccatacggctttcccgcagcacgacgcgcattatccgagaaaacctcttttgggcgttcatctacaatgtcgtatgtattcctatcgccgccgggatattgttcccgataaacggctggatgctcaatcccatgtgggcgagtgccgctatggcattcagctcggtatcggtcgttctcaacagcctgcgattgaaatggaaataa

SEQ ID NO: 1023 - DNA, 1599 bp, Bacteroides sp. CAG:144
ttattagaggggcggaaagccccattcgatacaaaacacaaaagaattatggcacaacaagaagatgtctttaagaaactgatttcgcattgtaaagaatatggattcgtatttccgtcgagtgaaatatacgatgggctgagcgccgtgtatgattacggacagatgggggtcgagctgaaaaacaatatcaaaaaatattggtgggacagtatggtgctgttgcacgaaaatattgtcggtatcgattcggccatttttatgcacccgacgatttggaaagcgtcggggcacgtcgatgcgtttaatgacccgttgatcgacaataaagactcgaagaagcgttatcgtgccgatgtgcttatcgaggatttgattgccaagatggacgaaaaaatagagaaagaggtggaaaaagccgccaagcgattcggtgaaagtttcgatgaagcgcttttccgtcagaccaatccccgtgtgcaagagcatgtcgccaaacgggaagagttgcattcccgctatgcgaaagccatgaatgaaaacgatttgaacgagttgcgccagattattctcgattatgaaatcgcctgtccgttgagcggtacccgcaactggaccgatgtacgccagttcaatctcatgttctctactgagatggggtctacggccgatggtacgatgaaaatatatcttcgtcccgaaacagcgcaaggtatttttgtcaactatctcaatgtgcagaaaactggccgtatgcgcattcccttcggtattgcgcaaataggcaaggcattccgcaatgaaatcgttgcccgccagttcattttccgtatgagggaattcgagcagatggagatgcaattttttgtgcgtcccggcgaagaactgaaatggtttgcccaatggaaagaaacccgtcttaaatggcacaaggctctcggcctcggcgatgagaaatatcgttatcacgaccatgaaaagttggcacactatgccaatgccgctaccgacatcgagtttgaaatgccattcggattcaaggaagtcgagggaattcattcgcgtaccaatttcgacctgtcgaatcacgaaaaattttctggtaaaaaattgcaatatttcgatccagaactcaacgagtcgtatgtgccctatgtcatcgagacttcgattggcgtcgaccgtatgttcctgagtgtaatggcgggttcgtattgcgaagaacaactgcccgatggggaaactcgtgtggtattgcggctcccggctgcattggcacctgtcaaattggcgatattgcctttggtgaagaaagacggtctgcccgagaaagctcgcgaaataatggatatgttgcgattcgatttcaaatgccagtacgatgagaaagattctatcggcaaacgttatcgccgtcaagatgccatcggtacgcctttctgcgttacggtcgatcacgatacgcttaccgataattgcgttacgatacgtttccgtgatacgatggagcaaaaacgtgtggccataagcgatttggctcagattatcggagagcaagtttcgatgaaatcgttgctgcggaaaattgtgaacagctaa

SEQ ID NO: 1024 - DNA, 1392 bp, Bacteroides sp. CAG:144
atgaaaaaagaacagattttgaattttctgaaatcaaaagacatttggttctggatcgccgctgctatgctcatggcattattggcgttcgtcctccacgactgcgcctatgctttggccgccgttatccctacggcatcgggaagaatcatttcaggcacgccgctcacaacggaaatcacacgagaatacagtaaagaactcctgatgaacgaggtcgacaaacgcatcaccaaagttcgtcccatgtcgaccccgatcgaccaactttcccgctatgcaggggctcggaaatcgggttcgatgatagtagactattactcggtcgatgtaaaaccgaccaaagcaatcctcgccgaagcctacaccgagccggcctcgggcagcgctaccatcgccgcacagaaagtacaaataacgactagtaacaacgacattttcgaagtctcggaaacgattctcgtacaaggtgtaaaagggtatgaaagcgatggaaaaacaccctcgaaagccgaccttgtcctttacatttcgagtaaagaagaaaccggagaactcaacgtgtacgccatcaatggaaagaccatcggcaatattaccggttgcgttccctcaatcgaacagggtactacgcttatacgcatgggccgagcagcgaccgaactcgacgtacagacagcccaatttgaggcactgcctgtcaaagaccaaaactattgtcaaatcttcaaaatgcaaatcgagcaatcgacgttccaaaaaatcgccaacaaagaagtggaatgggaattttccgactcggaagaggcggctatctatgacatgcgtttgggtatggaaaagactttcatgttcggtgtaaaaagccgtatttacgactcgaaaaagaaagaagaagtctcgcttacgggaggtatctggtggcaagccggtaaagaatacacattcgaccccgaaaaagaacttacacaggaagaccttatcgacatcgccaaagaagcttttaccggaaacggagggaacaaacggaaaatcctcatcggcggttccgacttcatcggtcgcatcaacaagctcgatgtaaataaaatcgtttcggccgatgaagatttcgtaaaatggggcatcgacttttccgaaatccgctccaaattcgggcgtctctttatcctctattccgaagtcttcgacgaatgcggcatgagcgactacggatttattttcgaccccgaattcctgtcgaaatggtctcacgttcctttcgaccgtcaggtactcgacctcaaaggtgccggcgtgcgtaataccgatgccgtcgttctcaccgaggcaagttgccttaccctgcgttatccggccgcacatatgcgcattattcccaaaaacgcataa

SEQ ID NO: 1025 - DNA, 1800 bp, Bacteroides sp. CAG:144
atgataggaaaaatacggtccgacctgatagccttatgctcgttgatacttttggtactatttgatattcttactccggcagaagctttgagcggattttccaacagtgtcgttatcatgatggtcgggctgtttgtcgtaggaggtgcgattttccaaacgggattggccaaaatggtaagcggaaaaatcatgaggacggccgggaagaatcagttccttcttttcatactggtcatgttggtaacatcttttgtcggggcatttgtgagcaataccggtacggtagctttgatgttgcctattgtggtaagtctggccaatagtgccgatatgtctccttcgcgtctgcttatgcctctggcttttgccagcagtatgggggggatgcttacgcttataggtactccgcccaacttggtcattcaggaagctattgtagacgccgggctggaacccttgtcgtttttctctttcaccccggtggggcttgtgtgtatcgcggtcggtattattgttttgataccgttgtcgaaatggattctttcccgaaagaaacgccaggctgaggacgaaaaaaagtcgcacccttctatggcagaattgttgcgagaatatcagttggaacagcgccttttcagagtacaagtacctgccgactctacttattgcgggaaaatgttgcaagagttggatatttcggagaaatacggtgtcggcattttggagatacggcgtaaaatctctacgcgccgccattttttcaataatatctacgatcatataacagccggaccgcataccgtgatacagagcggcgatatactctatctgtcgggtgatgccgaacatgtttcccgaatgattggagataacgctttgtggaagctcgatacgatatacaatacgtccgagtcggataagatgaatcagacgggagtagcggaagttttgctgttgcataattcatcattgcataacgtggcggtgcgcgattgtggcttccgggaaaaattcaatatcaatatattaggtatacagaggaacgatacctattatgtacatgacttgcgtgatttccgtatgcatagcggagacgccttgttgatacagggagagtggagcgatatagcccgcatgagtagggagcagaacgattgggtcgtattgggacaacctatcgagcaggttgccaaagtaacgatcgatcgtaaggcgcctgtcgctgccggtattatgttgcttatgatattagcgatgattttcgattgggttccggcggtgatggcggttatcatagcagctgtattgatggtatttaccgggtgcttgcgaaatgtcgaggatgcctatcgtacgataaattgggaaagcatcgtactgattgccgccatgatgcctatgtcgttggctttggagaaaaccggggcttcgtccggaatatctatggctcttgtttcgggactcggagagtatggtccattagcattgttggcaggaatttattttacgacatcattgatgacaatgtttatcagcaatacagctacggcggtgcttttggctcccattgccatgcaatcggcagtcagtctgggtgtgagtccctatccctatctttttgccgtaaccgtagcggcgagtatgtgttttgcttcacctttctctacaccgcctaatgcgttggttatgtcggccggtaaatacacatttatggattatgtcaaggtgggattgccgttacagcttgttatcggtatcgtcatgatattcgttttaccgttgttgttccctttttag

SEQ ID NO: 1026 - DNA, 1569 bp, Bacteroides sp. CAG:144
atgaagaaaatactactttcattaatatttgtgaccgtttttccgtcggcgtcggtttatgctgccggtaaggtctattatgcttctcctgcgggggcgggagatggtttgtcttatgagaaaccttgttcttttactttcggtatcaataagatttcttcgggagatacgctttatctattgggcggacaatatgatctttcagctcgcgtgaatgtaggaaagggtaaatctggaacgagttcgaaaaggaccgttattgcaggatatccgggtgaaaaagcgattcttgattaccgtaagcagccatacggaagtgaagtatcgggtacaaacaatatcggtctttgcttgtcagaaggtggggtctattttcacttgaaggattttacgattcgttacgccggaaagaacggtttactcaattatgccagttattgtattgtagagaacctcgaagtatatggttgcggcgattctggtatacaacataagacgggtggtggaaatacgataaaaaactgcgattctcaccataatttcgattataaaaacgggggaatggaatctcccaattacggagaaaatgccgatggttttgccgataaacagtatgaaaattccgaaccgaatacttatatcggttgccgctcttgggcgaatggcgatgacggttgggatttctttcaacgtgtaggtaataccgttatggaaaattgtatctgttacgacaatggcccaaaggaatacgatatgtatgatcaccctcggtatgaagtcgacaaggagtggttcgatcaatttaccgagcaggaattgaccagctatccttgttatggtaacggaaacggctttaagttgggcggaaaaaataccgagcataatgtaacacttgtcaactgtctggcggttgctaatccttctaaagggtttgatcaaaacaataatgccggaacgatgaaaatttataactgcacggcttataaaaacaatcgcgattatggcttttccaataagtcttatggttctttgataatccgtaactgcatttcttatcgttccgagagcagtaatgcattgtcatgcaagtcggtcgatgcaaaaaacaatacatggaatttgggaattacgtgtagtgatgccgattttgtcggccttgatgtaaccgaagctattgccgctcgtaacgaagacgggtcgctgcccgaaacatcgttgttgcatctgtcgagtggcagtcgtcttatcgatgccggcatcgattgcggttatccttatgagggaatggcacccgatttgggttgttatgagtcctctttctcctcaggagtaacgaccgaagagaaagaagagcgagatgtccgtgttgttgtagatcgctcatctgttagggtactcggtgcagaagaaagtgtccgtatgcaactgtacagcatatcggggcagtgtattgccgatgtgcatggagatcgtctttcgacagcctccgtttctaccggtcgttatatcgtgagggtgatcggtgcacaaggacaagttattgtaacgcaaaaaatccttgtgaattga

SEQ ID NO: 1027 - DNA, 1131 bp, Bacteroides sp. CAG:144
atgtctgaaaaagaatcatataaaagtcccgaatttaactcctcggaaaatgacgaggtagaaatcgattggatgggatatttgcgcaaacttattgctgctcgtaaagccttgctgtggtctgttattatcggtgtagtcctgggtattgtcatagcattgagtatgcccaaagaatataccgtggctgttacgctttcgccagaaatgggtgatgagagtaagtcggccggaggactggccagtcttgcttcctcatttttaggtggaagtacggcaagtggaggatccgatgcactcaatgtatccctttcgtccgatatagttgcctctaccccatttgttttgggacttttcgatgtgcgggtgcagacgatcgataattcactcgacacaacccttgttgcatatctcgatgagcaaaaatctccgtggtggagctatatcctctcttctcccggaatggttgtgggctgggtaaaatcatggtttacaaaagatagcgacgatgaggtatctacgagtgtttctcgtagaccttttcagttgacagaaaaagaagctcaaaaagtagcaactattaaaagtatggtagctgcaacagtcgatagtaagacggcgataactactgtgtcggttacaatgcaagaccctctggtggccgctatcgttgccgactcggtcgtacaaaagctgcaaacctattttataaattatcgtatcgccaaagccaaggaccaatgtgtttctctgtctaaaatgtgtgaaagcagcagagaagaatactatgcgttacaaaaaaaattggccgtttttctcgatgccaataaaaatatcgctttgcaaagcgtagaaatagaaaaaacacgactggaaaatgaagtgaacttggcctatcaaatatatagtcaggtagcctctcaactgcaaatgacacagaccaagatgcaagaggccaaaccagcttttgctgtcctcgaaccggccactgtcccacttcaaccatcgggtacgagtcgtaagatgattttgatggctgttacattcgtagcaataattcttacagctggctggaaactccttggagaagaactgtggggtaagaccaaagatttattcaaagaaaaataa

SEQ ID NO: 1028 - DNA, 1587 bp, Bacteroides sp. CAG:144
ttgttctcgaccgataaaacaaaaaagaatatcatgaaaaagtatctgcttgctatattgtttctgcttgcaacaacgtatgcttccgcccagcagacagccgcttggggagaccagggtaacggcacttatgtaaatcctattctcaatgccgactattccgatcccgatgtaatacggatgggagaaaaatactatatggtttgttcggatttccattacataggtatgcccgttttggaatcgaccgatatggtcaattggacaatcatcagccaagtatataaccgattcgattaccctaaatgggataccaacgagcgttttgccggcggatcgtgggctccggccatacgttaccacgacgggaaattctgggtctttttctgcacaccacatgaaggcttgttcatgagtacggctaccgatccgcatggcccgtggtctccgctgcattgcgtaaaaaaggtaaagaaatgggaagacccttgtcctttctgggacgaagacgggcaagcctatctcgggcgcagcaagcatggagcgggtcccattatcatacataaaatgagccccgacggctgggaactgctcgatgacggttttaccgtatataccggtcctgtcgccgaaggaaccaaaatctacaaacgtgacggttattattacctgagtattcccgaaggcggtgtaaaaggcgggtggcagaccatacttcgttcacgtaatatttacggcccgtatgagaagaaagtggtgatggagcagggtagcaccgacataaacggccctcatcagggggctttggtcgatacgcccgacggggagtggtggttctatcattttcagtttgtcgatccgataggtcgtgtcgtgcacttgcaacccgcccattggaaagacggttggccggtcatcggtgtggacatcgacatgaacggtatcggagaaccggtgcgcacatggacgaaaccgcaagttgccgcagccgccatcactcgtccgcagaccgatgacgatttctcgtcgccaagcctcggtgtacaatggcaatacaatcataatccacgtcccgaatgcgtatcgcttaccgacaggaaaggctggttgcgtctcgtggctttacaggccgacagcttaaaggtatcgcacaatatgctttcgcaaaaaacgatgggataccattccgaagtaacgacccgccttgatgtttcccgcatgaccgacggacaacgagccggtatgctttgcacagggaatcttttcaacggtataggtgtcatgtgccgggagggaaaacgtttcctttatctggaacaaaacggccgtactgagcagataaaatccatcaacgataaaatcgtttacttacgggctgttatcgattatccggataatgaacatcggctttattacagtaccgacggtaaacgctatgtcgaagcgggaaagccttattcccttaaattcggtagttggaagggaacccgcataggggtttatagttataacaccaaagccgacggcggcatagccgatttcgatttctttacttatgttaccgacgggccgggaacaggtcgatga

SEQ ID NO: 1029 - DNA, 2265 bp, Bacteroides sp. CAG:144
atggaatatcttatacatgtttgcggattggtgcaaggggtaggtttccgtccttatgtatgccgccttgctggggaaatggggcttgccggttccgtcgataatgataccggaggcgtatctatacgtctgatggcaaatcccgaacagaaaaatcgttttctgcaacggttggtttcggagcaacctcgggtagcacgtatcgactccgttgatgtgcaggagcaggaggaatcggcttcttttgcggggccttttttcatagcaccgagtcatgataccggcgagggggttacccgggtgagtcccgatattgccgtgtgcgatgcatgtctggacgatatgatccgccagtcgaggcgtagcgattacccttttgtgaattgtacctcttgcggcccacgcttttctatcataaaagatttaccttatgaccggcctgctacgacgatggcgtcgtttgccatgtgccccgagtgtgcccgggagtatgaagatgagaccgatcgccgtttccacgcccagccgatagcgtgtaaccattgtgggccgcattatacgttgcgtgagaaatcgggcaccgtaatcgatgattatccgacgatacgccgtcagttggctactgttttgtcgggaggcggagttgttgctttgaaaggcatcggcggatataatttgatttgcgatcctttttcacctatggccgtgaggcgtttgcgggtattgaaagagagaccacataaaccctttgctgtcatggttcccgatatggaaacggcacggcgttttgtatttctttcgagaagggaggaagtcgtgttgtcctcttggcggaggccgattcttttggctcgccagcgccgcgtacttgcttctgctatcaatgaggggtattgtacattgggactgatgttgccttttcagcccattcattatcatattttttccgattcggggttgaaggctttggtatttaccagcgggaataaaaaaggttttccgctttgtgccgatgacgatgaggctgtcgtgcaacttctggaaggaacagatattttggtggcttataatcggaatatttacaatcgggtagatgactctgttgttcgggttattgccgaagctccccggttattgcgtcgggctagggggtatgttcccgaccctttacctgcggatatgccggtagaaggtgtttttgcagccggagccgaacggacgaaccattttgccatagggaaaggctcggaaataattctttctccgtatatcggtacattgcgcgattgtgctgttgccgatctttatggtgatacgcttacccgttatacacgtctgtttcgttttgaaccccggttggttgtgtgcgataaacaccctgattatttttcgacacgttttgccgaatcgtatgcgaccgaacacggtttaccgttggtgcgggtgcaacatcatcatgcccatgctgttgctgtcatggccgaatatcgtctttcccgtcccgttttggcaatttgtctcgatggtacgggggctggtgatgacggtcgtatatggggtggggaatttctttgggtcgaccgttgcagttatcggcggttgttgcatttcccttatctgtctatgcccgggggcgatgcggcggctcgtgaaccgtggcgtatggcggtggcggttgtacgtgctttctcagacggactgtatccgtccggtttttgcaaacgtgtgggcgatgaacgtgttcgattggtggagcgtatgattctttctccggagctttctccgcagacgtcggctgtcggtcggttgttcgacgcggtgtcgtcgcttctcgggatatgtgataaaaacagttatgaatccgaggccgctgttttgctcgaacaggttgccttaggagcggaaataaaggataaaaactatcctgtcgatgagaacagtccattgaatttaactccgctttttatatcgttattgagagatttacaggctggttgcaaagtggctgatattgcttatgcatttcatgcgacattggcagagatagtgtttatggtagctgctggcttattgtcgaaagaaaatctgtcggtcgtagttttatccggtggtgtttttcagaacaaaatactttcggaattgttattaaaaaggttctcgatgcagggcattacagcctatcttcccgagcaaatgcccgtgcatgacggtgcaatagccgtgggacaagccgtgattgcctcggcccgaggccgtttgacataa

SEQ ID NO: 1030 - DNA, 1095 bp, Bacteroides sp. CAG:144
atgcccgataagaagaatttcgcaacccgtcttgaacgctggtttgaagagaacaaacggtcgttaccgtggcgggagacgactgatccctacctgatatggatttcagaaattattctgcaacagacacgagtcgcgcaggggctggattattaccggcgttttatagggcgttttcccgatgttcatgagcttgcggtttccgatgaagatgaggttttgaagtattgggaagggttggggtattacagtcgtgcccggaatttgcatgctgctgcccgtcaagtgatgcgggattttgaggggcggtttcctgatacttacgaggggatacgttctctcaaaggggtcggagattatacggctgcggcgatagcctcttttgcttacggcttgcctcatgcggtggtcgatggtaatgtgtatcgggtcctttcccgattgtttgccgttgatactcctatcgatacgacggcagggcgcaaattgttttcggctttggccgatgaaatgctcgatcgtcgttatccggctctttataatcaggcgattatggaattgggcgcattgcagtgtttgccgcgttcaccccggtgtcctgactgtccgcttttcctttcttgcgaagctgttgccgcaggtgcggtcgatatgtatcccgtgaaatcgggaaaaaccgtggtgctgccccgttatttcaattatttggtagtacattgcggagatgatgtattcatagctcgtcgggacggaaaggacatttggcggaatctgtatgaatttgtattgatagaaagcgataaagaattgacattcgaggcattgcagcataacgatttttatcggaaaattttcggagataccgcggttcggatttccacccctccgttttcgcatcgccacatattgtcgcatcggattatttatgcgacctttcatacgatagaagtcgatatgcttcccgacggtttgttttcttatgttcgagtcccgtatcgggaagtggggcgttatgcattttcccggcttaccggtctttatttcgactggttggaaaaatcctcgaaaaatccgacacttgaattatttggttga

SEQ ID NO: 1031 - DNA, 2478 bp, Bacteroides sp. CAG:144
atgaatttaaaacacatttgcttgtcggtgcttttttgtggcacggcatggttgcaggcgcaagccgataatgccatgaagctatggtatgaacagcccgcatcgttatgggtcgaggcactgccgttgggtaacgggcgtcttggcgctatggtgttcggcgatccggtgcacgaacagtttcagttgaacgaagagacgatttggggtggttctccctataacaacaccaatcctaaggcaaaagacgcgttggccgaaatacgtcgacttatttttgccggagagaatatgaaggcgcaggaattgtgcggcccgacgatatgttctccttcgggcgctaacggtatgccttaccagacggtgggttctttgcttctcgattttgaaggcgttggcgattataccgattattatcgcgaactcgacatcgaacgggctctctcgacgacccgtttcaaagccgacggtgtggaatattgtcgcgaagcttttacttcgtttaccgatcaattacttattatacggcttactgcttcccaaaaaggtaaaatatctttctcggcgcgttataacactccgtataaagaatatagtcgtaccatcgagtcaaaaaatatgcttcgtctcgatgcaaaggccaacgaccatgagggtatcgaaggcaaagtgcgttttacgacgcttacccgtatagaccgcaaagggggtaaatgcgaagtcgtgggcgatactttgttgcgtgtgtcgggagccaacgaggtaaccctttacgtttcggtcggaaccaactttgtcaattataaagatgtgtcgggcgactcggaaaagaaagcgttttcgtacctcaaaaatgccggcaaaaagtttgagaaggctttgcagagccataccgccgaatatggcaagtattttgaccgggtatctctcgatttgggagcaaatgcacaagctgccaagcctaccgatgtacgggttcgggagttcgagtcgaatttcgacccgcagttggctgcgctctatttccagttcggacgttatcttttgatatgcagttcgcaacccggcggtcaggcagccaatttgcaaggtatatggaattacaagttgcgtgcaccgtgggacgggaaatatacgaccgacataaatgtggagatgaattattggccggccgaggtaaccaacctcgccgagatgcatgagcctttcctcgacttggtaaaacgcgttgccgaacaaggtaagcagtcggctgccatgtacggttgccggggctggacattacaccataataccgatatttgggcatcgaccggtgcggtcgatgggcatcgctacggcgtgtggcctacctgcaatgcatggttctgccagcatttgtgggatcgttatctgttctctggcaataaagaatatctgagtgaagtatatcctttgatgaaaagcgcgtgcgagttctatatcgatttccttgtgcgcgaacccgaaaacaattggttggtggtagcgccctcgtattctcccgaaaatgcgccgtcggtcaacggcaaacgctcttttgtggtcgttgccggtacgacgatggacaaccaaatggtctacgatcttttctccaataccatcgatgccgctacggtgatgggcgaggagacggtttttgtcgacagcttgcgtgcgatagcctctcagttggctcctatgcaagtcgggcgttggggacagttgcaggagtggctcgaagactgggacaacccccgggatcgccatcgtcacgtttcccatttgtggggactctatccgggtcggcagatcacctataatacgccggtgctgatggaggctgccaagaaaacgctttacggtcgcggcgaccattctaccggctggtctatgggttggaaagtttgtttctgggcgcggttgctcgatggtaaccacgcttataagttgattaccgaacagatacgtcctacgaccgatgaaaaaggccaaaacggaggtacatatcccaatcttttcgatgcgcatccgcctttccaaatcgacggaaacttcggttgtacggccggtattgccgagatgttggtgcaaagtcatgccggtacggtacaccttttgccggcgttacccgatgtttggagcaaaggaacggtaaaaggtttgcgttgtcgaggaggatttacgctcgaagagatgtcttggagcaacggtacgatagatcgggtacaagtgctttcgacgatcggtggaaaattacgggtgcgctcggcagttcctcttgtatgcgaaggaatagacctcaaacccctcaaatcgacagcctctacccccggtatgttgctcgatccccagtcgatacgtcgtccgctcatttcgcccgaagcacctatcaatactacaaatccgtcagccaagtcctatgtctatgatatagagacgacgcccggacaggtatatgtattgatggctgaaaaataa

SEQ ID NO: 1032 - DNA, 1317 bp, Bacteroides sp. CAG:144
atgggaaacttagtagctatcgtaggtcgccccaatgtaggcaaatcgaccttgttcaaccggctcacgcaaagccgtcaagccattgtcaacgacgaagcgggtacgactcgcgaccgccaatacggaaaggtttactggacaggacaggaattttcgattgtcgacaccggcggttgggtagtcaactccgacgacgttttcgaggaagaaatcaacaagcaagtagcgattgctatcgaagaggccgatgtcatactctttgtcgtcgatgccattcatggtatcaccgatctcgatgataaggtggcggccatattgcgacgcagtaaaaagcccacattgttggttgccaataaagtagaaaataacgcatcgcaatacagctcggccgagttttatgcattcggactgggagacccgttctgtatctcggccgtcaacggctcgggtacaggagaattgctcgacgcagtcatcgaacattttccctcccaaaacggagaagaagaactcgatgaaaatattccccgtatcgccgtcgtaggtcgtcccaatgccgggaaatcatcgattatcaacgctttcatcggcgaagaccgatacattgttaccgatatagccggaacgactcgcgactcggtaaatacccgttacaataaattcggattcgacttctatatcgtcgataccgccggcatacgcaaaaaagggaaagtaaacgaagacatcgaatactactcggtcatacggtcgatacgcgccatcgaaaactccgacgtatgcatactcatgatcgacgccacacgcggcatcgaagggcaggatctcaatattttctcgctcatacagaaaaataaaaaaggattggtcgtgtgcattaacaaatgggatcttgtggaagacaaaagtacacaagccatcaaaacctttgaaaacgccatacgtgcccgcctcgctccattcaccgatttcccgatcgtgtatgcatcggcattgaccaagcaacggatattcaaagttctcgaaagcgcgtcggaagtatataaaaatcgtcatcgccatgttcccacggccaaactcaatgaggaaatgcttgccgtcatcgagaattatccaccacctgccaataaaggcaaatacgtgaaaataaagtatgtaacgcaactgaaaggaacgcccgtccccacatttattttcttctgcaatctcccgcaatgggttaaagacccttataaacacttcctcgagaaccaaatacgttcgaagtggaacttctcggggacacccgtcaacatcatcatacgagaaaaataa

SEQ ID NO: 1033 - DNA, 1431 bp, Bacteroides sp. CAG:144
atgaaaaaattttttcttttccgatcgaaccggatactcccgattgccgtggtattattcgttttttctgtatctgctcagaaacccgtaggagagaggcatctttcccggccattgcccgaaagttggtcgggtgattccttgtttgttcaacagttgccggttaccggacgctggtggttgagcctcgacgattccctgctcgattctttgataactgtctcttttgtcaacagccccgatttgaaaactgttttttaccgggtacgggcttcccacgcagctttgcgtatgaaacagagtggatactatccatcgctcggagcctcgttcggttggaataaaacccagaccagcggtcgcgtatcggactcctataccccgacgcgagaacaatatttttcgggagccttgacaacctcatgggaactagaccttttcggttctacctatcttcgggttcggtcgcaaaaggctcaatatcaggtgtcgatagagtcgtataatgctgcattggtatctttggcagcgcaggtatcttcggcctatgcccagttgcgaatgtttcagcaacaggtaattgtcgctcgtcgtaatatcgattcgcagaaatcgattctggatatgaccgaagtccgttatgaaaccggattggcttctcaactcgatgtggctcaggcgcggtcggtctattacagcacactggccacgataccgtctttggaagccagtgttgtggtgcaaatcaatttgttggcgctattggtgggaacacacccgcaggcgttgatgtctgtattggaaaaggaacgccctattcccgattatcggacgatcgtccctgtcggcgtcccagccaatttgttacgccaacggcccgatatccgggcggccgagcaatctgtcgtttcagctgccgcgctggtcggagcttcccgttccgattatatgccccatctggtgttgacgggttctatcgggtttgcgtcgaaaaaaatggacactttcttcgatcatcgcagccttacttattcgattgtacccactcttagctggacgctttttcaggggcgacaatatacgcaggctacccgtcaggccaaagccgagtggcgtgcgagtatcgaacaatataacttggcggtgcttacggctgttcaggaggtcgacaatgcaatggtcaattacaagggggctgtcaagcagttgaacgtcctttatgatttggtcgaacaaggtaaaatcacattgaatctttctctcgatctatacaagcggggactttcgacttttcagaatgtgcttgatgcgcagcgttcgttattggattatcaaaacggacttgtttcggcgcaaggtgccgctctctcggcggtaatagacctttatcgggctttgggaggcggttgggataatggttcctcggaataa

SEQ ID NO: 1034 - DNA, 1749 bp, Bacteroides sp. CAG:144
atggaaaacgaagttctactcaaggaagtaaccgcaaaagcccaagtttggttgggagaaggttatgatgcggagacacgtgccgaagtgcggcgtatgctcgatagcgaagataaaaccgaccttatagaggctttctataaagatttggaattcggaaccggcggattgcgcggtatcatgggtgtcggctccaaccgtatgaatatttataccgtaggagctgcgacacaaggattggccaattatctgaaaaaagaatttgcttcgctaccgcagataaaagtggtcatagggcatgattgtcggaacaacagccgtaaatttgccgaaatatcggccgatattttttcggcaaatggtataaaagtataccttttcgagtctttacggcctacacccgaaatgtcgtacaccattcgggaattgggttgtcagagcggtattattcttactgcttcgcataatcccaaagaatataacggatataaagcatattgggacgatggggcacagatgatttccccccacgataaaaatacgatttccgaggtcaataaaatacgttcggtttccgatatcaatttcaatggaaatccggctttggtcgagatgatcggaaaagaaatcgacgaaaaatatattgctcgtgtcaaagccttgtcgctcaatcccgaggccatcgcccgtcagcacgatttgaaaatcgtttatacaccgatacacggtacgggagtaagacttatccccgaagctttggctgcttacgggtttacccatgtgatacatgtacccgagcaagatgtcatcagtggtgatttccccacagtaaaatcgcccaatcccgaggaaccggcggctctcgacttggctatacgcaaggccaaggaggtcgatgccgatattgtgttggcatcagatcccgatgccgatcgtatgggtatcgccataaagaacgataagggcgagtggattctagtgaatggaaaccagaatgctctgctctttactcattaccttatttcgcagtataaggcgactggccgcattcgtgaaggagcatatatggtaaagacgatcgtaaccacagaattgatgaagaaaatcgccgaccgtaacggaatagagtgcttcgatgtgtacaccggatttaaatggattgctgccataatgcgggaacttgagggtaaacgtcaatatatcggtggcggagaagaaagttacggcttcttggtagaagatttcgttcgtgataaagatgccgtgtcggcgtgtgccatgatggccgagatagcggcatgggcgaaagataacggtaagacgatgtatgaactgttgcaggacatatatgtcgaatacggattttctaaggaaaagggtatttcggtcgtgcgtaaaggaaagtcgggtgcagaagaaatcgaagctatgatgaagaatttccgcgaacaccccattaccgaaatcgccgggtcgaaagtcgtattggcaaaagattatgccacgcttgttgcacatgattttgtggcaggagagaaatatacgctcgatatgccgactacctcgaatgtgttgcaatactttaccgaagacggtacgaaagtttcggtacgtccgtcgggaaccgagcccaaaatcaaattctatatcgaagtcagcggagaactcaaatcgcgtgccgattatgataatgccgtggcagcagccgaagaaaaaatcaaagctgtttccgtttcgctcggagtataa

SEQ ID NO: 1035 - DNA, 2478 bp, Bacteroides sp. CAG:144
atgatttcatctgataaaaacatctttttcgataccgacgagaataccaatatcggcacgatttttgccgaaatcgacggatcgcccgatatcgaatgtccgggtctcgacgaaaaaaaattaccgattctccccttacgcaacatggtgttgtttcccggcgtaacccttcctattaccgttggcaggtccaagtcgctgcaactggtacgcgaagccgccaaaaagaaacaactcatcggcgttgtctgccagaaggatatgtacaaagacgatcccgatgaaaccgacgacctctatcctatcggttctatgggagaaattatcaagatactggaaatgcccgacggcaatacgacagtcattttacaagggaaacagcgttttcaccttgatgaggttacgtcctattttccgtacattaccggaaatatcacgctccaacccgaaatcatgccccaagaaaacgacaaggaattcgaagcattgctcgatgcattgaaagacattacgctcgatgtgttgaagtcgatgcccgaaccaccgagagaactcatttttgctttgcgtaacatgggcaatatgctctatctcgtcaatttcttgtgcacgaatattccttttacgccgcaacagaaacaagagtttctcgatattccgacagtaaaagagcgcgctttcgccctctatgccgccctgcgcaaagaagctcaactcctcgaaataaaagccgatatccaatcgaaaacccgtgccgatatcaaccagcaacaacgcgagcatttcctacaacaacagataaaaaccatacaggacgagttgggtggcaatagccaagagcaagatatcgaagagctttcgcaaaaagcggcgcaaaagaaatggagcgaagaagtccaagaagtattcgataaagagctgcgtcgactggaacgactttacccccaatctcccgatttttcggtacagtacaactacctcgaaacgttgactgacttgccatggggtgaatacacgacagataacttcaacttgaaaaatgcccaacggcaactcgacaaagaccattacggtctcgaaaaagtcaaagagcgtatcatagaacatctcgccgtactcaaattacggggagatatgaaagctcccatcatctgcctgtacggtcctccgggtgtgggaaaaacctctttgggcaaatcgatcgccgccgcactagaccgcaaatacgtacgtgtttcattaggcggtctgcacgacgaggccgaaatacgagggcatcgccgtacttatatcggagccatgccgggacgaatcattcagggcatacagaaagcgggagcctccaatccggtattcgttctcgatgaaatcgataaaataggcaacgacttcaagggcgacccggcatcggcacttctcgaagtgctcgacccggagcaaaataatgcgtttcacgacaattatctcgacatcgactacgacctctcgaaagtattgtttatagccacggccaacaacctgaacaccatctctcggcctctgctcgaccgtatggaactcatcgaagtctcgggctacatacaggaagaaaaagtcgagataggccgacgccacctcgttcccaaacaactcgaagaacatggtttgaacaaagacgatctcgatatacccaagaaaacaatggcagccatcatcgaatcgtacacgcgggaatcgggtgtacgggaactcgataaaaaaattgcgaaaatcatgcggaaggtcgctcgaaaaaaagcatcgggcgaacagtggaaccatgaattgtccatagacgaacttgcggaatatctcggcatgaaagaatatatgcgcgaccgttatgaagggaatgattatgccggtgtagtaaccggtctcgcatggacggccgtaggtggggaaattctttatatcgagtcgagtttgagccgcaacaaaggcgaaaaacttacgctcacaggaaatctgggcgatgtgatgaaagaatccgccgttatcgctttgcaatatgtcaaagcccacgccgatcaactgggtatcgactacgacgtattcaaccactggaatctgcatatccacgtacccgaaggcgccatacccaaagacgggccgtcggccggcattacaatggtaacatctatcgcctcgacatttacccagcgtaaagtacgggctcacctcgccatgacgggagaaatcacacttcgcggccgcgtactgcccgtcgggggtatcaaagaaaaaattcttgcggcaaagcgtgccggcatcaaagagatcattctctgcgaagaaaaccgaaaagatatcgaagacataaaagagaactatctcaaagggttgaaattctactatgtacacgatataaaagaggttctcgatatcgccctgctcaaagaaaaagtctcccacccgatagacctttccatacccaaagaatgtagcgataaagaatga

SEQ ID NO: 1036 - DNA, 1677 bp, Bacteroides sp. CAG:144
atgaaatacctaaaaagaatatcatgctcttttctcgccatcgcgctgtgcatgtcaatcgcagcaaaagacgagagaggttcgatagcaaaattcgattacttcgaatacataggcaatgacgatttttacagggaaaatccccttccccacgacaattctttctataatcccatcgtcccgggttggcattccgacccgagtatatgcagggtagggaacgattatttcatggtcatgtccacgtttacctactacccgggagttccattgttccatagccgggatctcgtcaactggcgacaaataggcaatatactcgataggccgagccaactgccggcacttcaagggcaacctatcaacacaggagggatatatgccccggccatatcgtacaatccccacaataaaacatattacatgattaccaccgatgtaggacgtgggcatttctatgttacgacacaagacccgttcggcaagtggtccgacccgcactggttgcctaccataggaggtatcgacccctcatttttcttcgacgatgacgggaaagcctatatcgtgcataaagaagacaccgagggaaaacccaagtggagcaatttccgttcgatacgcatcacgcggttcgataccacgaccggcgacgttttcggtgaagacatgcctttccgcgaatcgggggtcggaccggaagaacggctcgaccgcaacgaaggcccgcatatctataagataaacgggaaatattacatgatttgcgccgaaggaggtaccagttgggcacactccgaagtcgtgtaccgcgccgacagcgtactcggcccttacacccgttggagccgcaaccccatgcttacccaacgcctgttgaaagccaatcgcaataacgccgtaacctgcacgggacatgtagatattgtagatactcccgacggggaatggtggggcgtattcctcggttgccgacccgaccaaaacgggtttgaatgtctcggacgcgaaacattcatcatgccgataaaatggagcgccgacggatttccctacatgacgcaaagcaaagacaccattccccttgtcctgcaccgcaaaggaataaaacgagagaaaaacgttaccttcggcaacttcacatggcgcgacgatttcaccggaaagaccctgcgtccggaatggctttcgatttggggatcggccgagaagtactataaaacaggcaacggattgcggctatcctgcgcaccgataaccctgaaagaccgccgcacaccggcttacataggccgaaggttgcaacatcacaaatacaccgttaccacgtgtctcagattcaagcccgaagagggagaagccgcaggattgttactggtcaaaaacgaagagcatcaatatttcatggccttacgcaaaggcaacctcgccctgctgcaaatagggcgaggtgctgataaagagattgcgacccaaccgataaaaaccgacggccgcccgataagtctgcgggtagaagctcgtggtactctctgcgatttctactacaaagaagagggtaacggctggcagttactggccaaagatatagatgcaacccacatttcttcccggaggggaggtggttttaccggctctaccgtcggaatgtatgccgtcaaaaatcaaaaagaatag

SEQ ID NO: 1037 - DNA, 2925 bp, Bacteroides sp. CAG:144
atgcaaaacaaaggattcataagggttttagcagttctgcttactttggtatgccttttctacatttctttctcgtttgtaactcgttactataacaagaaagccgaagagatttccaatggagaccctgtcgtttacaagaattatttagattctatggcaaccgagaaagtatatcttggttattacaccttgaaacagtgtaatgagatggaaatcggtttgggtttggacctcaaaggcggtatgaatgtaacgctgcaaatttcggttgctgatgtgttgagatcgctttccaataacaatcccgacgccaaattcaatgcggctctcgacgctgcaacggccaatcaagccgacaactccgactttttggcgatttttgtagatgaatataaaaaattggatccgaatatccggttggcatcgattttcagtacctatcagttgaaagaaaaaattgctccgagtgctaccaatgaccaagtcgttgctgttttgcgtgaggaattgaacagtgccatcgacaactctttcaatgtattgcgtacccgtatcgaccgtttcggtgtggttgctcccaatatacagcgtctcgaaaaagacggtcgtattcttgtggagcttcccggtgtgaaagagcccgaacgtgtgcgtaaacttctgcaaggtagtgccaatctcgaattttgggaaacctataatttgaatgagatttattcccgtttggctgcagccaatgagatgatcgcccgtatggaaaacaatggtaaacctgttgtggccgaggaaaagagcgcaggcggggatctttccgaattgacgcaagaaagtgaagaagtggagttgtggaaacgtcagaatcctcttttctcgcgtttgcaacccgctctttctcaaaacgggcagcctatggccaatccggctgtgggttatgcgcattaccgcgatacggcagctgtaagttcttaccttgccatgccccaagtacgcgaaatgcttcctgccaatctgcgtttctgctggtcggtaaaatcgatcgacgagaaagaacaatattatcaactggtcgctttgaaatcgagcaccggtggccgtcctgcgttggaaggcgatgttatcaacgatgctcgcgaagacttcgatccgttgacaaatgcgcctgtcgtaagcatgtcgatgaatgccgaaggtaccaaaatctgggctcaacttacgcgtgagaatataggtcgttgcgttgccgtggttctcgatgaccatgtttattctttcccggttgtcaataccgagattccgaacggttcttcgcaaatatccggcgggttcactcccgaagaggccaaagacttggccaatgtgttgaagaccggtaagatggcagctagcgtgaaaatcgtacaagaagacatcgtcggcccgtcgttgggacaagaggctatccgtagcggtgtcatctcgtttattttcgctttggtattgctcatgatctatatgatcggtgtatatggtgtcgttcccggtttggtcgctaatgtggctcttattctcaacttgttctttacgatgggtattttggcatcgttccaagcggtgcttactctctcgggtattgccggtttggtcctttcgctcggagttgccgtcgatgccaatgtgttgatttatgaacgttccaaagaggaattacgtgccggtaagagcttgaaaaatgcgattgccgacggttataaaaatgctttctcggctattttcgactccaacttgacatcggttatcactggtattatccttttctacttcggaaccggtcctatcaagggttttgctacgacgttgcttatcggtatcgtctgctcattctttaccgccgtgttcttgacacgtcttttctatgaaaaaggtttggaaaagaattggttcaagcatctctcttttacgaccccaatgacccgcaatttgctggtaaatcccgaaatcaacttcctcggcgcacgtaagaaaggatatatcatctgtttggtattggttatcatcggcggtgtatcgttcggtttgagagggttgaacaaaggtatcgatttctcgggcggacgcaactatatcgtgcgtttcgataagtcagtgaatacacaagaaatagccaatttgctcaaacccgaattcggtgaaaatattcctactgttatcacgatcggcggtgataatcaagtgcgtatctcgacgaactatcgtatcgaggaatcggacgatgctatcgatgaagaaatcctgacgatgatttacaaaggtctcaaagacgaagtgggcggtaaatcccaagaggcttttgagaccgagaacgtgatgagtatccagaaagtaggtccgagcattgccgaggacattactatcggagctatatgggcggttatcatttcgcttattgctatcgcgctttacattctgttgcgtttccgcgacgtggcattcagtgtcggcacacttgtatcattggcgttcgatacgttgatcatcttgtcggtttactcgattttcaacggcttgttgccgttctcgatggaaatcgaccagacattcatcgctgcaattcttaccaatatcggttactcggtaaatgataaagtggtagtattcgaccgtgtgcgtgaggtgataggtctctatccgaaacgggatcgcggcttggttatcaatgatgcactcaacagtacgttgtcgcgtaccattagtacatcgttgagtaccgctcttgtgttgctcagtatctttatcttgggtggcgatacgatccgtagtttctctttcgctatgttgctgggtgtgataacgggtacattctctaccctcttcgttgccgttcctattgcatacgaaatgatgaaaaagaaatttgccaaactcgtggcaaacgaggctgcttag

SEQ ID NO: 1038 - DNA, 1317 bp, Bacteroides sp. CAG:144
atgattttgcaggaagaacctcatattacggttggtattcagcatggcaagtcggtagacttccggttgtgcggaatatttacgactcccgaaggtcgcctttttcctcccggagagtatcgggtggagatttcgaccgggaaaagaggttttgttttgggagcggagtattatgaagatttacgcctcgttccattaagttccgaaaccctttttgatttgccacatgtaaccattggtatcgattttcattggcaacggcaggagtgtcagactttttgcggtatattgtatttggtgtgcgacagggaggaaatttatgcgatcaacgaagtgcccgtcgaagattaccttaccagtgtcatatcttcggaaatgagtgcgacatcttctctcgaattattgaaagcccatgctgtggtttcccgcagttggttgttggcgcaactgcctcgttttagcgggcgtagggtacgtgagagaggagagtgcggagatgtgcattcggccggggagattgtccgatggtatgatagagatgatcatttgcttttcgatgtttgtgccgacgatcactgccagcgttatcaaggtgtaacgcgggtggctaccccgcaagtggtcgaggcggtgaaagttacccggggagaggtattgatgtatggcggcgaggtttgcgatgcccgcttttcgaaatgttgcggcggtatgagcgagaggttcgatgcttgctggggagaagagccacatgtgtatctccggccggtatatgatgcccccgatgataaatcggtcatggatcttaccgtagagcaggaggccgagcattttatcgatagtcgtcccgatgttttttgcaatacgaccgatgcggaggtcctttcacaagtgctcaacagttatgatagggaaacacccgattttttccgttggcaggttcgctatacccggtcgcacctttcggcattggtagctgatcgttcgggaatcgatttcggtacgataacagcgatcgagccggtagaacgtggtgcttcgggtcgtataatccgtttgcgcattgtcggtacgcggcgtgaaatgattgtcggtaaggagctatacattcgacgtatattatcctcttcgcacttgtatagctcggcttttgttgtacggcgcgacggagatgattttgttttcgatggggcaggctggggacacggtgtgggattatgtcaaataggtgcggctgttatggcgcatcggggatatgattaccgttctatacttcgtcattattatcccgtagccgaacttgatatttattatcgttga

SEQ ID NO: 1039 - DNA, 1350 bp, Bacteroides sp. CAG:144
atggataatcgaatattgataatcgacgatgaaccgacgatacgtaaacttctggctcgtatgctggagttggaagggtatgagatatttcaggccgatgattgtacgtcgggtatgaagcaattgactttgcgtagaccacagttggttttatgcgatgtttttttacctgacgggaatggcgttgaattagtaaaaagtatcaaggctgttactcccgatgttgaagtaatattgttgacggctcacggaaatattcctgatggcgtacaggcgataaaaaacggagcgttcgattatataaccaaaggtgacgacaacaacaagattatacctatcatcagccgggcgatggacgaggttcataaacgcatgaagtcggcttcggcatcgaagtccgattctgaatgttctttcgattctattttgggacagtccgactgtatgaaacgggctattagtttagcagagaaagtgtctaagaccgatgtcccggttttattgacaggagaaaccgggacaggaaaagaagtgtttgcccaagcgattcataataatagtggacggagcaagaaaccttttgttgcagtcaattgttcggcattcagcaaagagttgttggagagtgagatgttcggtcataaagccggggcgtttaccggagcggtgaaagataagaaaggtttgtttgaagaagccaataacggaacgatttttctcgatgagatcggtgagatggcttttgaattgcaagctaaacttttgcgggtacttgagtcgggtgaatatttgaagataggagataccaaaccgacgaaagtaaatgtgaggattatttcagcgacgaatcgcaacttgaagcaggaaattgaaaataagactttccgggaagacttgttttttcgtctttcggtttttcatatcgaattgcctccattgagagagcgtatgggagacgtagaaattcttgtaaaagaatttttattgcgttatagtaaaaaaatgggacgtaaagtcgagggcataacacccgaatgtttgtctgcgctatctacttattcatggccgggtaatatacgggaattgcgaaatgtgatagagcgttctatcatcgtgtgcgatgactatttgacgttaagcgatcttcctgttgaaatacagtcattctcttcctctcagaaaaatttgccgcaaaacgagtttgaattggcgggagcggagcgtcgccacatcgagaaagtattgcggtacaccaaaggaaataaaaccgaggcttcccgtttattgaagattggcttgacgactctctatcgtaagatcgaagagtataagattgttcttaataattag

SEQ ID NO: 1040 - DNA, 963 bp, Bacteroides sp. CAG:144
atggatatatccgtaatcgttcctttgtacaatgaggctgagtcgttgcccgaattgtcggcatggataacccgagtcatggactcgaactgctttacttacgaagtcatatttatcgatgacgggagtaccgatgattcttggcgggtgatagagtcgcttaaagccgaaaatccttgtctgaaaggagtgaaattccgtcgtaattatggaaaatctcctgcattgcataccggttttacccgggcgcaaggcgatgtggtcattacgatggatgccgatttgcaagacagtcccgatgaaattccggaactttaccgaatgattaccgtcgaggggtacgatatggtttcggggtggaaaaagaaacgttacgaccctttgtccaaaacgcttccgacaaaactgttcaatgcgacggcacgcatgattacaggcattcatttgcatgatttcaattgcggcttgaaagcctatcgcaatgaagtcgtgaaacatatcgaggtctatggcgatatgcaccgggatataccattcttggtaaaaagtgccggcttttcccgtatcggggagaaagtcgtgcatcatcaggcccgcaagtacgggaagacgaaattcggtatgagccgctttataaacggttatctcgacctgatgactttgtggttcttttccaaattttcggaaaaacccatgcattttttcggcttgttgggcagcctcatgtttgttatcggcttttttgcggcagttgccgtcggtgcttataagctttatgccttatggcatgatatgccttatcgcctggtaaccgactcgccttacttttttatcgcccttaccatgatgatattgggcacactgcttttcctgtcgggctttttgggagaacttatttcccgcaatgctccgggacgtaaccattataatatagaaaaagatatagatgatcgattggcgtaa

SEQ ID NO: 1041 - DNA, 1494 bp, Bacteroides sp. CAG:144
atgccggaaatagtctggctaaatacaataaagcaaaaagaaaagcgttatttaatcgatatgaaaaagaaggtcatactcataagcgtcatctcggtagtaatcgcattcctcgcgacaagctgtttcgacgaaaagtttaccgacgacccgtcgcacgtactatcgttctcgaccgatatcgtaaaattcgacacgatttttaccgacaaaggtacagccaccctttcgtttcgcgtctacaatcgcaataatcgggcggtacgaatcgaatcggtacgtctggccgatgccgaacattcgggattccatatcaacgtcgacggagaaaaaggccccgaagccggccctatcgaattaagtgcacaggacagcctttacgtctttgtagaggcgaatatcgacccgactgacgtatcgaccccgttccttgtcaaagactctatcgttttccttacaaacggagtaaagcaagatgtgaaaatagaagcctacgggcaaaatgccgtcgtatttcgaggtggaaaaatcatttcgaccgatacgacatttaccgacaaacgtccgttccttatttacgacagccttgtcgtcgcttccaatgcaactctatctctcaccgaagggactaccctgtatctgcatgacaaagctttcgtgcgcatcgacggacgcatgcgggcacaaggcactgcctcaaaacgtgttactctgagaggcgaccgtaccgacaatgtttttcccgatctgccttacgacttctactccggacaatgggggggggtacagttcgggccggagagttacgaaaatctttgggaatacgtcgatatgcacggttcatcatggggaatccgcatcgattcgagcgatatttcccgcgataagctgactttgcagcacagtatcgtccacaactcggcttcacaccttatttcggcctctcatgcacgaatcaacgggtataactgccaactcaccaatgcaggcggagcgttgctgcaccttacggcttgccgctcggaatggatacattgtaccgtagccaatctttataattgggacgttatctctacaccggctcttactcttctggaatattctcctgccgactctgtcgctcccgaaatgcagccccgtttccttatagccaacagtatcgtaacgacccgtggacttttcatggcaccaagcgaaatagaaggattgaatatctctttcgacaactgccttttccaagtaaacggagaagatgacgaaaactttttatcctgtatctgggaaaaagaccctgcctttgttgctacgggcgacaactacattttcgatttcaggattaccgaatcttcccctgcccgggaagccggaagcacagcctatctcaatgacaccaccgccgtggacctctacggcataccccgtcctaccgacggcacccgtcccgacatcggagccagcaattatacccagccctcacaagatgatgcgctttaa

SEQ ID NO: 1042 - DNA, 2199 bp, Bacteroides sp. CAG:144
atgaaaattgtaaagaaaacaattgatttgggagatggaagaaccatcaccatcgaaaccggaaaattggccaagcaggccgacggtgccgtagaggtacgcatgggaaataccatgttgctggcaactgtcgtgtcggccaaagaagccggtgaaggcgtggacttcatgcctttgcaagtagagtataaagaacgttattcgtcgataggacgtttccccggaggttttactcgtcgcgagggtcgtgcttctgattatgaaattcttactgcgcgcttggtcgaccgcgccttgcgtccgttattccccgataattatcacgccgacacgtttgtcaacgtgatgctcttttcgtccgacggaaaagatatgcccgatgcattggccggtttggctgcttcggctgctcttgccgtttcggatattcctttcaacggtcctatttcggaagtaagggttgcccgcatcgacggacagttcaaagtgaatcctacgttcgaagagttggaaagggccgatatggacattatggtaggagctacttatgagaatatcatgatggtcgaaggcgaaatgaacgaagtttcagaggccgatttgctggctgccatgaagtttgcccatgatgccatcaaaatacagtgccaagcacagatggaacttgccgaagaggtgggttcgaccgtaaaacgcgaatattgccacgaagtaaacgacgaagagttgcgtaaagacgtatgggctaagtgctacgatgaggcttatgccgttgcctgctcgggcaataccaacaaacatgctcgcggtgtagctttcgacgccatcgttgagaaatatttggagtcgatggacgcggaagaagccgatgccaaaaacgctttggtgaaacgttattaccacgatgtggaaaaagaggctatgcgtcgcagtatcctcgatgagggaaaacgtctcgacggtcgtacaactaccgagatccgtcctatctggtgcgaagtggattatcttcctggacctcacggctcatcgatatttacccgcggtgagacacaatcgctctcgactgttactctcggtaccaaactcgatgagaaaatcgtcgatgatgtactcgaccagagccgcgaccgtttcttgttacactataatttcccgcctttctctacgggagaagccaaagccagccggggagtgggtcgtcgcgaaataggccacggaaacttggccaaccgggctctcaaacgcatgattcccgatgattatccttatgtaattcgtatcgtttcggatattctcgaatcgaacggttcctcctctatggcaaccgtttgtgcgggaacgctcgctcttatggacgccggtgtgaaaatcaagaaaccggtttcgggtattgctatgggcttgattaccgataaggacaatgtgaaatatgccgttctttccgatattctcggcgatgaagatcatctcggcgatatggacttcaaagtaacgggtacacgggacggtattacggctactcaaatggatataaaggtcgacggtctctcgtacgaggttctcgaaaaagccctcaatcaggcgaaagaaggtcgtatgtatattctcgataagatactcgataccatacccgaaccgcgtgccgacttcaaaccgcatgttccgcgtatcgaagttctcgaaattcccaaagatatgataggagccgtgataggaccgggcggcaaaatcatacaaggcatacaagaggagactggtgctatcgttacgatcgatgaaatcgacggcgtgggtcgtgtcgaagtggctgcacccggtcgcgatgctatcaatgcggctttggctcgcatcaaaggcattgtcgctatccctgaggtcggtgaagtatataccggtaaagtgaagtcgattcttcctttcggtgctttcgttgaattcatgcccggtaaagacggtctgctccatatctcggagatttgttggacgcgtctcgaaacaatggaagaatcgggcttgaaagaaggagacgaagtaacggtgaaactggttgaaatcgacccgaagaccggtaaattccgtctctcgatgaaagagcttcaacctcgccccgagggtatgcccgaacgtcgtgaaggtaatggcggcggaaatggtgggaatcacaaccatcgtccgcgtcgtgaaaaaagagattga

SEQ ID NO: 1043 - DNA, 2061 bp, Bacteroides sp. CAG:144
gctgcccgtttcagagccgagaatgcgcacaacacggttcttgacatgaaacagataaagagactccgatggtttgtcgtttttcttttacccctgttcggcggtaaaacgatctctctacatgcgcaaaaccgcctcgactcgctccaacatctgcaagaactgaccgttaccgcccgccgacaaaacgaagtaatcccgccacaaaaactctccggagaaaaactgagacgtctcaacagtttctccgtagccgatgccatacgttatttctcgggggtacaactgaaagactacggaggggtaggcggactgaaaaccgtaaatatccgtagcttgggagccaaccatgtaggagtcttttatgacgggatacagctgggaaacgctcaaaacggacaaatagatttgggaaaattctccctcgacaacatggaggaaatctccttgtacaacgggcaaaaaagcgaaatcttccagtcggccaaagatttcgggaattcgggtgccgtgtatctgcgcagccgccggccgcaattttctgcaaatgaaaaataccatttgcggttaacgatgaaatgcggttcattcggacttgccaatccttctgttttatgggaacaaaaaatcaatgaccgggtaagcagcctgttcaacgccgaatacacatatgcgacaggacgctataaattcagatatcgccgaaccctgcccgacggctctacggcatacgacactactgcggtacgccagaacggagacatcgaatcattgcgcatcgaaggtggatttttcggaacgacgccaaacggcaaatggaatgccaaagtctattattatgactcggagagaggcattcccggtcctatactcaacaacgtatggcgacatggtgaacgtcagtgggatcgaaatttctttacacaaggcagctggcagaacgacttcggccgatataaattgctcgtcaatgccaaatacgcttacgactacaccgaatacctgcgcgatgatcccaaagaaatctatatacacaaccactaccggcaacaagaaggatacctctcggcagcccatttgttccatcttttttcatggtgggatatttctctctcgaccgatttccaatggaactacctcgatgccgacttgcgcgacttcgtttatcctacacgatacaccgaaatggcagccattgccacctccttccaatggaaaggggtacatatacaaggcagcttgttagggacattcatacaagacaagctcggggataaacgcataaccgcatctccccggaaaaacgaattctctcccgcactttttaccaactataaaccattcgcccgacacgatttccgggtacgggcattctgtaaaaagtctttccgcatgccgacattcaatgacctttattataccgatgtcgggaataaatatctcaaaccggaatataccgtccagtacgacggagggattgtttatcggaaaaactggaaacaaaaatttttccgatcgctggaaatacaagccgacggatactataatatcgttaccaataaaatcatcgcttacccgaccggacgtcaattccgctggtccatgctcaatttgggccgtgtggaaatacgaggttgcgatatatccgtacagacggtctggcaactcgggaaagtagaaatggggctgcacggcaactatacttaccaaaaagcacaggattttaccaaccccaaaaaaaaattttacggcgaccagataccctacacaccgcaacacagcggctcgatactattatggggcacgtggaaacgatggaatctcaattacagttttatctacacgggcgaaagatacagcaattccgagaacataccggtaaattatctgcaaccctggtacacgagcgacattgcgctaagccacactttttctataaaaaaagtaggcttcaaagccgcctgcgaagtcagtaacctattcaaccaacattacgacgttatcgtcaattacccgatgcccggaacgaactttaaaatcactttaactatacaaatatga

SEQ ID NO: 1044 - DNA, 1497 bp, Bacteroides sp. CAG:144
atgtccggaatgaaaagtttggccaaagatactgccgtgtatgggttgagcagtatcgtggggcgtttcctcaattggtgtctggtgcccctttatacccatgtgttcgcacaagccgaatatggtgtggtaacttatctttattcgttggtggccttgttgctcatcattctgacgtatggtctggaaaccggcttcttccgctttgccaatcacgagaaatataaagacccgatgcgtgtctatacgaccggtcttatgtcgttggcggttacctctgcgctttttgtcattttggtatggatatttctcggtcccatttcatcggttctcggttcgtcgggcgatccccgttatgtgatgatgcttgccgttacattggccatcgatgcgtttacctctttgccgtttgcttacctgcgctataaacagcggccgctccgttttgcgggaatcaagttgttgtctatttttctcaatatcggtctgaatcttttctttatcgtgctgtgtcccgtatggtatacatcacaccccgagtgggtgggccggttttatgatcccgatttcggtgtgggatatattttcttgtccaatctcattgcttcggccgtaacattgttggttctcgtccccgagatcgtaaaggtacggtatcggtttgatacggaaatttggagacgcatgattgtctattcatttccgttgctggtgatgggactggccggtattatgaatcagacgatagataagctcatctatccttggctggtgggagatcccgaccgggcgatgtctgaactgggcgtttacggggcaaattataagattgccattgtcatggtcatgtttatacaagctttccgctttgcatacgaaccgtttgtttttgccaaaagccgtagtcggggagaggagagccagaaggcgtatgtcgatgcgatgcattattttatcattttcgggctgttgattttcttgggagtcatgttttttctgcccgtgttgaagtatttcatatcgccccgttatttttcgggtcttgccgtagtgcctatcgtgatggccggagaattgtttttcggtgtcttctacaacctttctttgtggtataagctgaccgaccgtacctattggggtacgattttttcgcttttcggtttggcggtaactttgcttatcaatatccttttcgtaccctgttatggatatatggcttgtgcttgggcggcgtttttctgctatctgtcgatgatggcaacttcctattttgtggggaaaaaatattatccggttccttataggtggggagctgctctgcggtatgtgttgttggcggccgtgctttatgttgcagctatgtatgtgccgatctcgaatacgtgggctttgctggctttccgggcggtattgctgtcgctttttgtggcttatgccgtacgacaggatttgccgttggccgaattgccttttgtgggacgttattttaagaaatag

SEQ ID NO: 1045 - DNA, 2436 bp, Bacteroides sp. CAG:144
atgaaaaaaatctttactttatgtgcatttctatgtgctgcgataacggccggaaatgcaggtgaaattgttttgtgcgatttcgaaaattacaatgtgggagatgcgtttacaatggtcaatatttatggtcctacgacttctacggccgaggttgtagccgatcccctcaatcccgacaacaaagtgttgcacgtaaaagtcgataattggaatacttttgtacagtttgtccttcccgaaggtattacgggaaaaaatttgctcgataactatcagaaagtttctttcgacctctatcgggcggcagatcaaactaatgatcatatgcagacggccgtgcttctcggaccgtccacagatggttctacgactctctattgggacagtgattttcctttcttgggcgataaaggcaagtggatacccaaaagttatgattttaatcgtatttataatgagtctacaactcttttgttgggctttcattgtgatgtcgtggagtattacatcgataatgtacgcctttcgggtgtatcatcggtcgagaccgacacgattcgttggacggcttctgtttcgaatgtatgggacgcggcgacaaccaatttctctgctgtggaagatgatcctgccacgggaacaccggttgcctttgcgtcgggcaatcgtgtcattttcgatgataatgtgttgactacggcaacagctacccctacaacggtacaggtaagtggaactatggaggcctcgacggtcgttttcgataataccgaattggattatacactcaccgcagccgacggtgaggcggccttgactggtgctggacagtttattgtgcaaggtggcggttctgttacagtaggtgtcaataaccagtttctgaaagggacttacctcaaagacggggaattgcgtatgggtgttcaaaacgggaacgtcctcggtacatcgttgcttaccgaaggaggaacgctctatacctgtttcgacaacagctccgatagttatgtatcggtaagcaccccgatgattatggccgaagggacggctctcgatgtatatttgtcgcgctatgcttattggatgtcttctctctccggtaacggtacgttgaatatctatgccggtggtgagcgttctcatttgggaaatgaaaaaggagcgaagtatcccgattggaatggcttctccggtactgtgaatgtttatccctacaaagaggttgtatcgacggccggtttttatggcgtagttttgggccatggcggcaagacattcaatcccgcagagatagaagaaagtttatcttcgggcaaggtgaatacgatgttcgagaactctgttcttgtattgcacgatggcacggcgttggcttgtgagtcgggtacacgcgctttccgcatcggtgagttgcaaatgtctcctacctcgcgcatttatggctatttcaaggcttcttctccgagctcctatttcttggtgggttgttccggtaccgactctgaactctccggacagattgcccctcccgagaaaaacggaaaaccgtatatcgaacaaaccttaggtatcatcaaagaaggtaccggaacttatacgctcaccaataacaacaaccttatcacgggtggcattcaagttctcggaggtaaattgctggtcaataacgatgtcaagaaaactgaatccgaaggcctgaccggaggaaccggatatgccaaagaaggaactcttgtttttgtgtttgaaggtgcaactatcggcggtacaggaaatattgccgatgatgtcgacgtatatggacgcctcgaaccgggtagcaacggtatcggtacattgactttgaaaaattttgcctcggacgactccgtgtcgctctatttgcgtccgactactgaaatggaatttgagattgcttcgcctactcatcacgacagcctgattgtcgacggtcatctggtgtattacaaccagacacaggatttcatggagagcgacgagaaaccggttgtcagaatcaaaatagatgatagctacgtctataatgaaggcgatgagtttgttctcatttcttacaaagggaaatcttcattatggggtgatccgtgggatttcaatgtgaaattgcccgatacggaaaaatgggcggttgaagagcgtaccaccgaaacaggcaaacaattcgtacttgttgccaaaagcacgagcggtgtgaaatcgaccgagagcgaagaccgggtacgtatctatactcaatccggaaatatctgtgtagagagtgaggccggtgatgtgatccgtctgtattctacttcgggacagcttcttaaatcggagaccgcccgtcaaggacttactcttatcgaggcactcccgggcacttatgttatagaagttgccgggcagtcgacgacgattgtcaattattaa

SEQ ID NO: 1046 - DNA, 1119 bp, Bacteroides sp. CAG:144
atgttgaagtacttgatagaaaaggagtttaagcagattgtcagaaattcgttcctcccgaggctgataatcgtgatgccgttgatgataatgctggtccttccgtgggcggccgatcaggagatcaagaacgtgaaattgagtgttatcgataatgatcatagccccgattcggaacgtctgatacggaaaattgtctcttcgggctatttcgttctggccgatgtctccgatacaaacgagcaggcgatgcaacgtatcgagtcgggtgatgccgatgttattctcgagatacccgatggttttgaaaaagatatggtaaatggtgaagtcggaaaaatatcgattcgggccaatgccgtgaacgggacgaagggaggtttgggaagttcttacctgtcgtcgatactcgccgattattccgtcgaattgagaaccgaatatatcggagaatcgaatgcgatggctgtctctgctcccgtttttggtgttatacctcaatataagttcaatccgcatctcgattataaggtatttatgatcccggctctaatggtcatgttgctgacgttgcttaccggatttcttccggctttgaatatcgtcggggaaaaagaagccggaacgatagaacagatcaatgtaacgccggtaaaaaaatccatgtttgtattggcgaaactcataccctattgggtcatcgggtttgtcgtattgggattgtgtatgattttggcagctttggtgtacgggataaatcccgcaggtagcttgttaacgatatttttgtttgcgaccatatatatactggttgtttctgggttcgggttgattatctcgaattattccgatacgatacagcaggcgatgttcgtcatgtttttcttcattatgattttcatcttgatgagcggactgtttaccccggtagccagtatgccgcaatgggcgcaagtcattactatattcaatccgttgaaatattttatgcaggtaatgcgcttggtctatctcaaaggaagtgcttttgtggagcttatacctcagtttctcgccttgtgcactttcgctgtggctctgaacgtgtgggcggttctcagttataagaagagcagttga

SEQ ID NO: 1047 - DNA, 1245 bp, Bacteroides sp. CAG:144
actatgaatgtagaaattatagccgtaggagacgagttgcttatagggcaggttaccgataccaattcgggttggattgcccgccagttgaaccttatggggtgggaactgaccgaagttacggtggtcagggatcgaaaggacgagataaaaaaagcggttctcgatgcttttacgcgggtaccggttgttttgatgacgggcggtttgggccctaccaaagacgatattacaaaaaagaccctttgcgaactttacgggtgctccttgcatcgcgacgagaaagtgcaggagatgaatgaggaacggtttgcccgtaaaggttttacgatgaatgaacttacacgcgatcaagcattggtgcccgatgcgtgtaccgttatatacaatccggtgggaacggcaccggtcatgtggtttgatcgggacgataaggtcctcgtatctatgcccggtgttccttccgagatgcagtatgccgtttctcatgaagtgttgccgcgcttgcggagtcgtttcaacgaccattcttcggttcgtcatgctacatgtttggtcaaggggtataccgagtcgggattggcgattgtccttgccgattttgagaatgagctgccgccgtatatccatttggcctatctgccgaaacccggtgtaatacgtcttcgccttacggcgacgggattagatgatgccgaggtttcgtccggccttgaaatacagttcgagaagttgacagccttgttgggctcccatgttttttgtagggaagatgtgtctttggcgggggcgttgggaaatatattgcgggaacggaatctgacgattgcgacagctgagagttgtaccggtggaaatatcgcacatgaacttactcttgtcccgggttgttcggcctattatagaggaagtatcgtgtcgtatgccaacgatgtgaaaacttcattgctgggagtttcttccgaaacgatagagcagaacggcgtggtaagtcttccggttgtagaggagatggttcggggtgtacggcatgcgttgcataccgattgtgcaatcgctacctcgggaatcgccggccccgatggagctactccgggaaagcctgtgggtacggtagctattgctgttgcttgtggtgaaaatgtcgtgtcgaagatggtgatggctggtacgcaacgggaacgtaatatcgaacgatttactcactcggctcttttgcaaatgattgatctgttgactccttga

SEQ ID NO: 1048 - DNA, 1488 bp, Bacteroides sp. CAG:144
atgtatttattaggatatgacatcggcagttcatcggtcaaggcttcgcttgtcgatgcacagaccggtgtgtgcatagccagcgacttctctccgaaacaagaaatggagatcatcgctcataaaagcggctgggccgaacaagaccccgaacggtggtgggaaaatctgcaaaccgctacgcgttcaattttaaatcaagccaacatcgacggttctgaaataaaagcgatcggtatctcttatcaaatgcacggccttgtcgttgtggataaaaatcaacatgtactgcgaccggccattatttggtgcgacagccgtgccgtaccctacggagaaaacgcattccgcacgttgggcgaaaaattctgtctcgaacatctgcttaactctccgggaaatttcacggcctcgaaactggcgtggatcaaagaaaacgagccggaaattttcgagaaaatagataaaatcatgctcccgggcgactatatcgccatgcggctgacaaatgaggtatgcactaccgtatcggggctatcagaaggtatattttgggacttcaagaacgcttgcgtatcgaaagaattattggcacattacgggttcgatgaaagcattatcgccaaaatcgttcctacattcggcgtgcagggagccgtcagttcccatgccgcacaattgttgggactcacagccggtactcctgttacctaccgagccggagaccaacccaacaacgctctgtcgctcaatgtattcaatccgggagaaattgcatcgacagccggaacatcgggtgtcgtatacggtatcaacgggtcggtcaattacgatcccctatcgcgcgtcaatacttttgcgcatgtaaaccataaaaagggacagacccggctgggcgtgttgctttgcatcaacggaacgggcattctcaattcatggataaaacgcaacatcgctcccgaagatacttcttattcgagcatgaacctgctggcatcgcaagtagacatcggttgcgacggagtgagtatcgtgccattcggcaacggtgccgaacgtatcctgcaaaataaagaaatcggcgcgtcgatccacggcatcaactacaaccggcacgaccgttatcatctcatgcgcgcagcccaagagggtattgtattctcctttaaatacggtatggaaatcatgcaaggcataggcatcgacatacgcacgataaaggccggacatgccaacatgttcctgagtccgattttccgcgacacattggcgggagtaaccgaggcaacaatagaactatacgataccgacggatcggtaggtgccgccaaaggagccggtataggagccggaatctacaaatcgactgaagaggcgttctcttccctgaaaaaaattcagatcatagaacccgacaccaaaaatatagcagcttaccaagaggcatacgcccgctggaaaggcatattagaaacccttataaaataa

SEQ ID NO: 1049 - DNA, 2040 bp, Bacteroides sp. CAG:144
atggaattcaaaatcgtttctccattcagtcctaccggcgaccagcccgaggctattgccgaactgacacacggtatcaaggaaggtttgccggcgcagacgcttctcggtgttaccggatcgggaaaaacgttcactatggccaatgtcatagagcaggtacagaagcctaccctcatactcagccacaacaagacgttggctgcccagctttatagcgaattcaagaattttttccccgaaaatgctgttgaatattttgtttcttattacgattattatcaacccgaggcttatattccgaccaccgatacctatatcgaaaaagatctggccatcaacgaagagatcgatcggttgcggttgtcggctacatcttcgcttttgtcaggtcgtaaagatattattgtcgtgtcgtcggtatcgtgcctttatggtatcggaaatcccgaagattttcatagcaatacgattgaggtgaaagtcggcggccgtttggaacggaatgacttccttcgccggttggtcgacggactctattcccgtaacgaaatagaattgcatcgggggaatttccgggtcaagggcgatacggtcgatgtttatcccgcttaccaagatgaaattgtgcgggtaacgttttggggagacgagatcgattccatagaaagtgtcgatccgtcgagtggccatacgatttcgaggttcgacgcatataatatttatccggccaacatattcgtaacgacaaaagaacgcatcaatagagctgtcgatgagatcgctctcgatttgggcaaacaggtcgaatttttcaagtcgataggaaaagaacttgaagccaagcgtctgtatgaacgagttacatacgatctcgaaatgatcaaggaggtgggatattgttcaggcatcgaaaactattcccgttatttcgacggacgtatgcccggtacgagaccgttctgtttgctcgattattttccgaaagattttatggtgattatcgatgaaagccatgttacaataccgcagatacgtgctatgtacgggggggataactcccgtaaagtcaatttggtggaatatggttttcgattgccggcggccatagataaccggccgttgacgtttgctgagttcgagtctctggttccgcaggtcatttatgtgagcgctacgccggccgactatgagttggctcgtagcgaaggtgttgtggtcgaacaggttatacggcccacgggattgctcgatcctgtcatagaagtacggcccagtctcaatcaaatcgatgatttgctcgaagagatacaacaacgtgtcgaacgtaatgagcgggtattggttacgacacttaccaagcgtatggccgaggagttgaacgcttacctgctacgtctcgacatacattgcaattatatccactccgatgtcgacaccctcgatcggatacagattatcgatgaccttcgcaaaggggtgtacgatgtcttggtcggggtgaatttgttgagggagggattagatctgcccgaggtttcccttgtagcgatactcgatgccgataaggaaggatttttgcgttcgcatcgttctcttacgcagacagccggtcgtgcggctcgtaatctcaacgggcgtgttattatgtatgccgaccgcataaccgatagtatgcagcagactatcgatgagaccaatcgtcggagagagaagcaattggcttataatgaggctcaccacattacaccgcaagccatacgcaaagcttataatacggcattggctcgtcgggaagataagaccgtcgaatctatcgagactcccggaaaaccgatgtatgaagaggagttcgataccgtacatgtgtctttggctgccgacccgatcgtcccgtatatgagtaaggaacaactcaaaaaaaatatggagaatgtgcgtcggcagatggtggcggccgccaaaaatatggaatttatcgaagcggctcgtttgcgtgatgaactgctgaaactcgaagatctttacaatcataaataa

SEQ ID NO: 1050 - DNA, 1362 bp, Bacteroides sp. CAG:144
atgaaaaccatctgtttttactttcagattcaccagccgttcagattgaaacgttatcgctttttcgatatcggcaacgatcattattactatgatgattataacaacgatgagataataactcgcatagctcatcgttcgtacttaccggccaatcagacattgctcgaaatgataaagaattccaacgggaaattcaaagtggcattttctatttcgggcgttgctctcgaacaactggaaatttatgtccccgaatttatcgattcgatgaaagaacttgccaagaccggttgtgtggaatttctttctgagacgtatgcgcactctttggcttccctgcgtgatcccgacgaatttgtgttgcaggttaaggagcacgatgataagatcgaggaattattcggacaacggcctaaggttttccggaataccgagttgatttattccgacgagattgcctgcatggttgccgatatgggctttaaaggctgtattaccgaaggagccaagcatattctcggttggaaaagtcccaattatctctattgttccaccgccgtacctaaattgaaattgttgctcaaaaattataaaatgagcgatgacataactttccgtttttccaattacgaatggagcgaatacccccttaccgccgataagtatatgggttggatcaatgcgattcccgagaccgagcaggtggtgaacctttttatgaattacgaaacgttgggcgagttgcaacctcgtgagagcggtattttcgaatttatgaaatctctcccctattttgccgagcagatgggaattacgttttcgacgcctaccgaggtcatttccaaattgaaacctgtcgattctttgtcggtaagttatcctatttcgtgggccgatgaagagcgtgataccagtgcttggttgggaaatcttttgcaaaacgaggcgttcgagaaactttattccgtcggagaacgagtgcgtttgtgcgatgaccgtcgtttgaaacaagattggcattacttgcagaccagcgaccatttttattatatgtgtaccaaattcttgtccgatggcgccatacatagtcattacagtccatacgactcagcctatgaggcatttaccaactatatgaatgtattgagtgatttcatcgtcagagtgaaagagcaatatcccgatacgatagagaatgaagagctcaattcattgattacaactattcgtaaccaagcctcggaaatagatgtgttgaaaaaagagttgaagattgctaaagaggaacgtgctgccaaaaaagttactgcgcagccatctaagccgactgctcgcagagcagctgtgaaaaaagtttga

SEQ ID NO: 1051 - DNA, 1356 bp, Prevotella sp. CAG:617
atgttagtcggagcgatacatcggcagtggtgtttgctgatgttgcggaggcgaaaagaaaaactcttgctttcgtttttcttttcgctcagtttgcactatctttgtattcccaaaagtggcttttcaataaaaatggataatccgcaactacaacagataaaacagcgttatggcattgtcggtaattatgaggggttgaaccgtgctcttgaagtggctcttaaaattgcccccgttgacttgtcggttttaattaccggcgaaaacggagtgggaaaagaagtattcccccgtatcattcacgaccacagcaaccgtaagaaccggaaatattttgccgtaaactgcggcgccattcccgaaggaactatcgactccgaactttttggacacgaaaaaggagcctttaccggagccataggcgaccgtgaggggtattttgccgtggccaatggaggtacgctttttctggatgaggtgggcgaattgcctctttcaacgcaggcccgcttgctgcgtgtgctcgaaaccggcgaatatatccgcgtgggagccagcgaagtgcgcaaaacagatgttcgcatagtggcggccactaatgtgaatatgcagcaggctattgtagacggtaagtttcgtgaagatttgtactatcgtctgaattcaattcccattagcatacctccgctgcgtgaaaggaaggacgatattatcctgctgttccgcaagtttgcttttgaaatgagcgaaaaatacaagatgccttctattcggttggacgagaatgcacagcgtatgctgatgaattattcttggccgggaaatatccgacaactgaaaaatctgacggaaaacatgtcgattacgtcggaagagcgtgtcataacggctgaggtgctggctacctatttgccacatgacaacaacaagcagttggtcacggtgaaaaatgagagcggaggcaagagttttgaaaacgaacgcgaaatactgtatcagattctttttgatttacggcgtgacgtaacagaactgaaaaagattgtcaacgaacagatggggtataattattccacgacacgtacaactccgcagcccgttgcgacaaccagtgcgctgtcggtttatcatgaggcccctgcggctttgcagacgcaggatgcgcttcatgtggagccacccatacaggaagctgaagaagtgacagaggttcgttcgcttgatgaaatggagcgtgaaaccatacagaaaactcttgagcgccatcagggaaaacgaaagcaggctgctgctgaattggggatttcagaacgtacgttatacagaaaaatacgtgaatatggattggaataa

SEQ ID NO: 1052 - DNA, 609 bp, Prevotella sp. CAG:617
atgcttatcaaatattattcaaatggcgacaatgagcgggctatcagccaggcagtccgtgtgttgaccgacggcggaattgttatttatcctacggatagtgtgtatgctattggctgccatgcacttaaagaacgcgcggtagaaaaagtttgtaggataaagggtattaatcctgcaaaaaaccgtctttctgttatctgctatgatttgagtgccattagccagtatgcacgtatcagcaattccgtgtttaagttaatgaagaagaatttgccgggcccgtttacgtttattctgcctggtttgagcacacttccaaaagttttcaggggaagaggttctgaagttggaattcgaatgcccgaccatcctttcctgcggcagttgttggaacgtttggatgctcctattctgacagcttcattacctcccgttggtgaagaaatggaatatacgactaatgcagatttgatagaagaaactttcggtcagcaggttgacatggtgatcgacggaggagagggagtgcctgaggtaaccaccgttgttgattgtacgggagatgagccggaaattgttcgtcagggaaaaggtatcctacagtaa

SEQ ID NO: 1053 - DNA, 1053 bp, Prevotella sp. CAG:617
gaaatctccacagaattagagtctttctcactgttttgcaatgttttgcgtatcaagaaaacgggttcggtttcctacttttgtccaaactatacggcttatgacacgcggaaacaatctataaagacattctgcctgacgtccctgcatctttattttctgtataaaacttattcatatcaagatattttgtgtatattgcgctcggaaggaatacgcgacactccatccggcaccctccacgactcttattattttaccctacctccaaaagatgaagatatggatatgaaaaaaacactactgacgcttgctgccatgatgttcgcaacaagcgcaatgggacagcttcaatacgacatgactccggacacagggccggtgaaaggcggagcaaacaaagtggtcacggaagtatttaccgtagaaaagaaaaacggcaaatgggtcagagccggaaagcccgacccctggggcgaaatgggtgtctatccggaagaaagcgaatgcacctacgaccgaaacggaaaactgacaagcaagactaccgtatttgaaggcactaaaaccgaatatgcctaccaatatacaaccgacggaaaactggccgaaaccaaaaagacggaaaacggcaaactgacctccgtcatgcgttaccgatatacggccggcaaactgaccgggacgtcggaagacacattctacaacgggcaaaaaagtacgcaggactcacccatcactaccggaaagaccgagaccgacgctgccggaaacgttacggaacacggcgaccagcccagtgactacgttaagcgggacaaacagggccggctgctggaattttccatcaacaacgagatggacggctacgtggactcgcgcaaatatacctacgacgaggaaggacgtgtcgtaaaaattgaagtcagcgacggcgacacgctgacctaccactatgtcaaacaggacgaaaagggaaactggaccggcctgctcatcgtatcgggcgaaactcccataggagccgttgaccgcaaaatcatatactattaa

SEQ ID NO: 1054 - DNA, 1011 bp, Prevotella sp. CAG:617
atgtgtgccccacgccccggcaaagcgtgcacacatccgcctgccattcttcaacacagaaagaaaaaacaacacaacatcatgaataaaatttttaccaaggaaataaaaatcgcactgacggccatcgtcgccatcgtactgctgtttgttggcatcaacttcctgaaaggtgtcaatctgtttaagaaatccaacctttacatcattaaatttaatgacatcaccggacttgcggtatccaatcccgtatatgccaacggatatgccgtaggtattgtgcgcgaaataacttacgactacgaccatccgggcaatgttgccgtaggtgtggaactggactccaaaatgcgtgtgccggccggcacacgggctgaactggccacagagatgctgggcggcgccgtcatgaatctggtactgggccccgaccccctgcacacactcgagccgggcgataccattcccggaggccccaaaaacggactgatgaacaaactggagcaggctgcacctaccgtaatggcactgattccgaagctcgactccatactgaccaacatcaaccgcatcaccggcgacccggccttaatgcaaacgctcaacaatgcagcagaactgacagcccaactgaaaacgacaaccgcgtcagtcaatcatttgctcaaaaacgacgttccgcaactgacggccaaactcaaccgcatcggcagcaacatggaagttttgtccggccacctggccaacgtgccggtggaggaaaccatgcgcaacgtcaacgaaacgctggccagcgtacaccagttgagcaaaaacatgaccgacattaccaacaacctcaacaacagcatgagcagcaaagacaacacactgggcctgctcctcaacgaccgcaagctgtatgacaacatcaataccaccatcagcagtgccgattcattggttactgacctgaaggcgaacccgaaacgctacgtccacttctccctgttcggacgcaagggaaaataa

SEQ ID NO: 1055 - DNA, 699 bp, Prevotella sp. CAG:617
cccgacatggaacgccgcccagtaatcagtatgctgctcgtgatactgacaagcctcctccctcttgccggaaaagcacaggaggaagtggaataccgcatggaaataggtgcggcaggcggactgggattcgggctgactgatctcaacagcaaaatctttggtaatgcacgcggcgccggcggcgccatcttgcggtttgtgctcaacccgcgcatggccatcaagacgtcgctcacctataccggactgagcggcaatacgaaaaacccgcaggagttttatcctgaccccacagaccacaacaagccgcttgactatcgctttagcggcggagtggtggacctgggcggcacctacgagctgaacttctggccctacggttaccatcgcggataccagggctacagccgtattacgccctacattcagctggggttcggcctgagctacggcacagccaaggccttcagcctgaacctgccggtgggagcaggcttgaaatacaaactgaaagaacgactcaacgtcggtctcgactggcaaacacattttacactgagcgacaaactcgacggcctgcagacccctaccggagtcaagacttccggattcaagaacaaggaccattacagcacgcttatgctgacactgacctacagcttctcgcccaaatgcccggaatgtaatcgtgactaa

SEQ ID NO: 1056 - DNA, 828 bp, Prevotella sp. CAG:617
atggacaacaaatcagcttttacgattgacgtagaaaaagttttgcaggacaaggccggccgccatgcccgccgcgtaccacgttttgtgatttcctggctgaaacgtcttattcatcaggatgagatgaatgagttttttacgcaaacggcccatcttgagggcgtgccctggctgaatgccgcggtgaaatatctggacatgaatctggtggtcaagggattggagaatcttccctctgatgccgacgggcagcggtatacgtttgtgagcaaccacccgctgggcggcattgacggcattgctctgggagctattctgggtaatcactacgacggccgtatccgttatctggtcaatgatttgctgatgaatctgcgcggcctggcgccgctgtgtgtgcccatcaacaagacgggagcgcagacacggcagtttccggcgctggtggaggcgtgtttcaacagtccgaaccacgtcatcatgtttcccgccggcatctgttcgcgccgcatcggcggtaaggtggaagacctgccctggcgcaaaacctttatcggcaagagtgtagagacacagcgtgacgtagtgcccattcatttcagcggcgaaaattcaaaacgtttttaccgtattgccaactggtgcaagcagctgggcatcaagttcaacctggccatgctcttcctgcctgatgagatgtaccgtaaccgccatcagacttttgaggtgcgcattggcaaacccatcccctggcaaaccttcaacaagacccgcacggacgtgcagtgggcagcttatgtgagaaacctggtctaccagctttaa

SEQ ID NO: 1057 - DNA, 570 bp, Prevotella sp. CAG:617
atgtcaagaataggtaaattgccgattaacatccctgcaggtgtaaccgtaaccctgaaggataatgtagtgtctgtaaaaggaccaaagggtgagatgtctcagaaagttgacccttctatcatagtaacgattgaagataatcagatcaagtttgccatcgatgaagcaaacgacaccgttgaaacgaagcagaagcaggctttccacggcttgtaccgtgctttggtaaacaacatggttgttggtgttaccgaaggttacaagaaagagatggaactcgttggtgtaggttatcgtgtttctaaccagggtaacattatggagttgtcattggggtatactcataacatctttattcagttgcctaaggaaatcaaggttgaaactaagtcagaaagaaataaaaacccgtatatttgcctggagtcttgcgacaagcagcttctgggtcttgtatgcgcaaagattcgttctttccgtaaacctgagccttataagggtaagggtattttgtatgtcggtgagcagattcgtcgtaaatctggtaagtcggcaggtgctaagtaa

SEQ ID NO: 1058 - DNA, 588 bp, Prevotella sp. CAG:617
atgtacatcgatgtgattttaacattgcttttcgtgtgggccatttatagtggctggcgcatgggagctattaaacaattgttttcggccataggttttgccgtaggactggtaattgcttcgcttgtgtatctgtggttgggtgactatctgtctatgacaggcagcaaaaccaatatgatattaaatgttgtagcctttgccatactttggattattcttccgattgctttaggctatgtggctaatgtgttgactgccaagtttgatcgctttgctgtccgtgttcctcagcgtatagtcggtgcaattgtgtccttggctaagtatgtcgttctgttcagctgtattttcaatgtaatgacaggactgaacatgctggctacgtccagtgtggaaaaatccttttggtataagccggttacggctgtaatgggaaaccttacttcccaatcggttgaacgtacagattctgtatcttccacgttgcctgacactatttgggtagatatgcagtcaaacaaggcagtacccgcaaaaggagatactttaactaccactgaccatcatggaaacacaaaaaagtga

SEQ ID NO: 1059 - DNA, 1119 bp, Prevotella sp. CAG:617
atgaacgaagaattgagagtcataataagtggtggcggaacgggcggacatattttcccggccgtatccattgccaatgccatacgtgagaaacgcccggatgccaaaatcctgtttgtaggtgccgagggccgtatggagatgcagcgtgtgcccgccgcaggctacgaaatcaagggcctgcccatttgcggtttcgaccgtaaacacctgtggcgcaacgccatagtgctgatgaaaattctcaagagccgtcgtctggcccgtaaaatcgtgagcgagttccggccgcaggttgccgtgggcgtaggcggatacgccagcgggcctacgcttaacgtggccgagtcaatgggcatacccacgctgctgcaggagcagaattcgtatgccggcgtaactaacaagttgctggccaaaaacgccacaaaaatttgtgtggcttacgaaaacatgtcgcgctttttccccgctgataaaatcgtgtttaccggcaatcccgtacgccagggcctgcttaacgcgcaggtcgaccgcgcagcggcgctgcagcaaatggggctcagtccgcacaagcgcacgctgctgattgtgggtggctcgctgggcgcacgtacgctgaatgagagcgtgctgggcaacctgcctctggtacgtcagcagaacgacatccagtttatctggcagacgggcggatactacaaggaagaaatcaaggctgagctggcccgtaggggcaagcccgacaacctgtatgtgaccgacttcatttcagacatggccactgcctatgccgtggccgatctggtgatttcgcgtgccggagcgggcagtatttccgaattctgtctgctgggcaaaccggtgattctggtgccgtcgcccaatgtggccgaagaccatcagacgaagaatgccctggcgctggtgcagcgtgatgcggccctgtatgtaaaggacagcgaagcgcgcatgacgctcctgcccctggccatcaataccattacgcagcccgaccgcctgcagcagctgagcaccaacatccgggtgctggcgcgccccaatgccgcttcggacatagccgacgaagtgttgcggctggccggtcagcaagcgtag

SEQ ID NO: 1060 - DNA, 1512 bp, Prevotella sp. CAG:617
atggctgatttagcaaaactggcgggccgccgcaagagcggccaccctcatttgtttccgcatggtgatgattcggcacacattaaccgtatcatccgttttgtcatcgttctggcagtgtcgttgtttctttggtgtgtaccaccctctacgttggggttacccgaccttacgctggtgcagcagcgtatgattgccatctttgtgtttgctgcgctgatgtggatgtttgaaatcatctcttcgtggtccacttcgatgattgtggtggtggtcatgttgcttaccatatccgacagcagcgtctggtttatggacaaggcgctgggcagccagcccatggggacgcaggtgtcctacgtttccatcatggccagttttgccgaccccgtcatcatgctttttatcggaggtttcatcttggccatcgccgccaccaagagcgggctcgacgtggtgctggcccgcattatgctgcgtccctttggccatcagtcacgtttcgtgctgctgggcttcctgctcgtgacggccacgttttccatgtttatcagcaataccgccacggcagccatgatgcttatgttcctgactcccgtgctcaaaacgctcccggccgacggcaagggaaaaatcgggttggcgctggccatacccattggggccaacgtgggaggtatgggtacccccatcggcaccccgcccaacgccatagcgctgaaatatctgaatgacgtaaacggagccaacctcgacatcggtttcgggcagtgggtcagtgtcatgttcccctacatgctcgtcatattgctcctttcgtgggccgtattgctttggctcttcccatttaagcagaaagaaatccatttggaaatcgagggaaaaatggagcgcaactggcgtacctgggtcgtaaacattacgtttgccgttaccgtgctgtgctggattctggacaaggccatcggcatcaacgccaacgtggtggccatgattccggtaggcgtgttctgcgccacgggcatcattaccaaaaaagacctgcaggacatcaactggagcgtgctctggatggtggccggaggatttgctctgggcacggggctgcaggataccggcctggcccagcatctgattgagaacataccgttcagcagctggtcgcccgtactgatgattgtcgggtcgggactgatatgctggagcttgtccaactttatcagcaatacggctacggcagccctgctcgtgcccatcctggccatcgtggggcgcagcatgagtacgcagctttctgctatcggcggcgagggaaccctgctcatgggtattgccgtcagcgcttcgctggccatgatgctccccatcagtacgccgcccaacgctctggcccatgccacgggtatggtgcgccagcgcgacatggaaaaggttggtgtgctgattggtatcgtcggtctcgccttgggctatgccatgctggttgtgctgggcaagaatggctttttctga

SEQ ID NO: 1061 - DNA, 807 bp, Prevotella sp. CAG:617
ttcatggaagatacaaaccacatacaatcagacgaccaacatatgatgttgcgcgcagaaggattagtaaagaaatacggtaagcgcacggtagtgaatgacgtttcatttaacgttaagcaaggcgaaatagttggtttacttggccctaacggtgccggtaaaaccacgtctttttatatgacaaccgggcttgtcattcctaatgctggacgtatattcatcaatgaaaaggaaatcactcaatatccggtgtacaaacgagccaaaaacggcataggctatctggctcaggaagcctctgtatttcgaaaaatgagtgtggaagacaatatctcatcggtattagaaatgacaggaaaaagcaaggaataccaacgcgagaaactggaaagtcttattgcagaattccgacttcaaaaagttagaaagaataacggcgaccagctatccggtggcgaacggagacgtacagaaatagctcgttgtctggccattgacccgaaattcattatgcttgacgaaccatttgccggggtggaccctattgccgtagaagacatccaatatattgtctggaaactgaaagacaaaaacatcggtatcctgattactgaccataatgtagaggaaacactctgcattacagatcgggcatatttgctatttgaaggccgcattctgtttcagggaactccggaagaattagcggccaaccaaattgtaagagacaaatatctgacaaacagttttaaactccggaaaaaagacttccaaaagattgatagagataaatcggaacaataa

SEQ ID NO: 1062 - DNA, 846 bp, Prevotella sp. CAG:617
atgcttttaaccgaactttcatcccccacccatatccactacgaagaaagcaacttaagttttctgcacgattcgccccgacacttcaactgtggcatccaactcatctgcaccgatggcgaagccgttgtttctaccggtgcgcaacagttttacctcaagaaaatgtccgaactcattttttggagaggaagcattttacaacttatccattctacgccggattttagggttcgcatggtcctgtatccttctaaaatatttcttcaggcagccataaacttagacagcacattcttcaattatatgaaagaaatcccttataaggatcatacacaagctccatataactggcagcatgttaatttgtggatggacatggctaaaatgttatttactcagcccccttcggaattcaccctacagctcgaacaaaactatttacaaagcctgtttatgtggatattcagtgccattcctaaaattcacgtaaaagatgcccatccatacacccggaaacagatgatttttcaccactttatgtatctgatccatgaacatgcagccaccgagcaccaactctctttctatacacaacaactctgcatatcgccgcgctatctaaacgaaatatgcatcacctattcaaacggaaagacacccaaaaggctcatcaacgaacaactgacagctgaaatcaaagtcctgctcaatcgcccagatctgtctattgcagaaatagccatgcgctgccactttccagatgcctcatacctaagccgttttttcaaaaaaatcacacagctcagccctaaagaatatcgagccaatggtaaacggcaataa

SEQ ID NO: 1063 - DNA, 1905 bp, Prevotella sp. CAG:617
atgtgtaaaccacacaaaggttggcgcgcgtggtgggtggccttggcgacctgcctgctgcaactgaccgccgtggcgcagtcgctgacgacggacgaagcctgtcgcatcgggcggcaatggctttcggtccaatatccgcaacccgtggtacgccgtagtgaggaaggagtaaacgccgtgcgctggcgtgccgtttatcgggtgcagcgcggcgacggcgcttttgtcctgcttcatgcacgcacggcggccgtgatggggtatggccgctcgggcctccgccccatgccggaggcgctgcatacggctttgatgcaatatggtgacctgaatggtgttgttgccgaagctgaggtgcgggaatcctatcccgtagttccgcctctcttgcagagcgtgcgtgggcaatcggctccctacaacctttcgtgtccgtattatacgacggaagagggcaccagcacgcagcgctgtctgaccggctgcgtagctacggcattggagcagattctgacctattaccgccagccggcgcagttgcaggactcgctggcgcgcatggaaacgccgcactatgtggtagagggtgtaccggccggtacacctgttgattgggctcatgtacgcgatatttatgctgaaggagcatatagcgaggctgaggcccgtgccgtggccgacctttcgctctggtgcggcatgatggccggtatgaattgggggctggaggcttcgggtgcgcagattcgcccgctggaagctgctgcccgccgcgtattgggctacaaggatgtgcgctatgccgatagttatcggtatacaccggccgactgggagcggatgatgcgcacagaaattgaagccggtcgccccgtgctttatacgggttatacggggctgatacaggggcatgcctttgtgctggacgggcaggaagcctcgggcctgttccacgtaaactggggctatgacggcgcttacgatggctattttgcctgggaaatattgtggccgtttggtccggtggaggagccgaaccctgagattttgggcttctattgcaatcaggaggccctgctgctgtgtcccgacagtgtcccggcaggcacccggccgaccgaagtggctcgcaccgggcgggaattgcgggtggattcgctctgctttctgcgtcagccggatttgaatgattacgttacggcacagctgacagtaaccaacacttccctacaagccctgactactccgctggcgttgtattccgctgccgaggcggatactttggactttgagcaggcggaatgtgtggctttgggcggtgtgcggctggcggcaggttccactgccagggtaacgctgcgttgccgctttcagacaccggggcggcgcgtgctgagcctgacgccggacgatagtatcgttattttccggcaaacggctgacgtgcagcgcacgccgggtgcgcagcttgatttcgggaatacagtggtgcaggcttcagctgacagtgtggtcatcatccagcctatcagcaatgccgcagaagccggatgggccggcaacgaggtggtgtacagcctttttgagggcacgcaaagcttgtttaatacagacgagcgcctgatgcgctacctgaacttggctcccggctgtacattgacggataccgttgtgttccgtcaccttaagccctccacacaatataccctttgggtgcgctgtccgtggaatcccgtgcggcagcttacctttaccacgtcgtcggccgtggggctgtcacatgtgtcggctgcgcctgaaaatgaaactttttatgacgtgcaggggcggcgggttcgacccggaacttccggcattgtcatttccgataagggacggaaaatacttcggtcccgcaattaa

SEQ ID NO: 1064 - DNA, 1347 bp, Prevotella sp. CAG:617
atgtacgaactaacagttgcagccctcatccggaaacaaggatatgcaaccgtcgcatacaaggactttgtatatccggaacaaaccgctgaagaattcaaaacctggataaagcaggatgacagtgagttatacgctatttggaccgtcaatttgtcgctaaagaatgacgtagccgtagcacgactgattcatcagatccatcccgaatcctatgtagtctttatgggaccggggcctactttttacatcgaacaatgtttaccagaaggtgaaaagaactttgttgtacgtggcgagcctgacataaccatggcatgtctggtaaaaactttagcccaaaatgagtcatggtcaggcattgaaggattgtcttaccgcaatgggaaccagatcaagaacaatccctccagacctttactgaagaatttggacgaactccccttccccgcacgtgatttgctgggagaaaggacataccgtaacccaaaactcaaatgctcaccctatacagtagttgtcagcagcaggaattgcccttaccggtgcatttactgcgttccgagttcactgacatttgcacgcgaaattgaatcgcgccgaaatacaggccacaagcctcccatcagttttcgttccacagaaagtatagcagaagaattattacttctgcatcgccaaggctacaaagccatcggcttcatggatgacaatttcatttggaacgaaaagcgcactgcccaaatatgtgaagtcctgaaaaaatacggatttgtttggggatgccaggcccgcgtagatgccattaccgaacccattgcacgcatgttgggcgaatccggttgtcaatatgttgacttgggtgtagaatccttcaatgacgacatcctcaagttcatcaaaaaaggtatcacacaagctcaaatctatcaggctattgaactcctgaaaaaatatcacgtccccgtaaagctcaacattctgatcggaacaagcccactggagaccaaagctaccatccgcgatacactaaaacgcgccaaagcactcaaggttgaccaagtaatgttcaatattgtatcgccatttcctggtaccgaattctatgacatggcacgcaaaaatggatggattgttacaggcgattacctgcccacggatgtgcagaggaactctattctgagttacccgcatctttcggcagaagaaatggaaaaattgttattcaggaataacctaagctactttctatcacctcatttcgtaatcagccaaatcagacgattcaaaagttggaaagaatttacttatgctcttaaagcgctgaaaataaaattatttggatag

SEQ ID NO: 1065 - DNA, 1593 bp, Prevotella sp. CAG:617
atgaaaatcattttttcaaccgtcatgtgtacactcctgatgcttccggccgccgcccagcgccccaccatgggctggagctcatggaacacctaccgcgtaaacatcagtgacagcctcatccgcaaacaggccttcgccatgacacaaaacggcctgaaagaggccgggtacgaatatatcaacattgacgacggcgcctttgacggccgcgagcccgacggccggctgcatgcccacgccacaagatttccgcaaggactcaagcccgtggtcgactacatccacagcctcggcctgaaagccggcacctactccgacgccggacgcaacacctgcgggaactactgggacaacgacaaaggaggcgtgggcatcgggctgtacggccacgaaaaggctgacgtgaactacctgttcaacgacctggggtttgacttcatcaaggtagacttttgcggcggcgacccggcgcagaacaccgaacggctcgaccttgacgaacagacacaatatacggccatcagccagattatacgtgccgaagcacaccgcaacgtgcgtctgaacgtatgccggtgggcctttccgggcacatgggttacggaaattgccggctcatggcgcattgctcccgacatccagaacaactgggcatcggtcaaatccatcatcgaccgcaatctgttcctctcggcctacgcctcgccgggacactataacgacatggacatgctcgaagtgggtagagggctcacggccgaacaggaacgcacccatttcgggatgtggtgtatgatgagttcgccactgctcatcggggccgacctgaccagcctcagcaccgaaacgctcagtctgataaccaaccctgaactcatagccatcaatcaggaccccctgggacaacagggacacgtggtaagccgtcagggcgcggcatacatactggtaaaagacctgctctcgagccacgggcgaacacgcgccgtagccttctacaacccgtcggacacgacggccgacatgagcattacgctctcacaactgggctacgcgaaaggcaaggtaaaagtgcgcgacgccatgcaacgctgcgacatgtcaccatgcgagtcagccctcagcgtcagcctgccgccgcacgccacacgcatttatgtactgaaaggaaaacgcaccgaaacggtgcgctacgaagctgaaaacgcctggctaagcctctattcggccatcagcgaagccgactgtgcccgcgtagggtatgaagagaaagggctgtcatgcggcgcgaaagtaggtcatctgggcgacggcagcctgaagggcaacagcatgcagtggcgccacgtattcagccacaaaggcggccgctaccgtctcacgttccgctatctctgcaaaaacacatccacacttgaagtcggaatcaacggtaagctggtcaagcgcttcatccatctgccctcatccccgcaaggtgcagaatgcagcgtgaccgtagaactgaaaaaaggcaacaacatcatcgagctgggcaacaccaacggatgggcaccggacattgactatatggacgtggaacaaatgtaa

SEQ ID NO: 1066 - DNA, 708 bp, Prevotella sp. CAG:617
atgaactttctgaagggacaaatactggctttcgacaagccctatggctggacttcgttccagatggtcgccaagatccggcggctgctcacactgcgcatggacggcgtcaagattaaagtgggacacgccggcaccctcgaccccctggccaccggcgtcatgctggtatgtacgggccgcgccaccaaacaaatcgaaacgttgcaggccggaaaaaaagagtacatcgctaccctgcgtctgggcgccacaaccccaagtttcgacttggaacactccattgacgccctttatccgaccgaccatatcagcgaagatgacgtgcgccgcgtactcaagcagttcgaaggcgatattaatcaggtaccgcccacattttcagcctgcaagattcagggtaaacgggcctacgaccttgcccgcaagggaaaagacgtagaactgaaggccaaaaccatacatattgaccacatcgaactgctcgactgccgcctgcccatcatcaaaatcagggtagcctgcagcaaaggcacctacatacgcgccttggcccgcgacatcggacaggccctgggaagcggtgctcacctgacatccctgcaacgcacccaagtcggacaatatacgctggaacactgcttccagctgagccagtttgaaacctggctcaacgagcagaccgtagaaaccacattagatgactga

SEQ ID NO: 1067 - DNA, 1767 bp, Prevotella sp. CAG:617
atgaacagaattacgtccccccgatttatacctttagtcctttcactgggaattgtcttaggcatactgattggcaacttttatgcaaatcactatgccggcaatcgactaagcatcatcaatacttccagcaataaattaaatgacttattgcatatcattgatgatcaatacgttgatcctgtcaatatgtcagatctggtagaaaaggccatgccacaaatcctgaaagaattagatcctcactctacatatgtttccgcaaaagatgtagaagcctccatgcaagacctaaaaggaagtttttcaggcattggcatacaattctttatctatcaggattctgtgagagttgttcgtgtaatcaacggtgggccttctgaaagtgttggcattaaagctggggacagaataattggtatcaacaaaaaggcatatattgggaaaaatgtttccatagattcaacctacaaacttctgaaaggtcccaaggattcaaaaatagaattagaaatataccgccctgcaatacagaaaaaactaacattttccatcactcggaatgatgttccaatcaacagtgttacagctgcttatatggcagatgaaacaaccggttatatcaaagtcaatagttttgcagaaaccacatattctgaatttttagcagccttagccaatttgcacagacaaggattcaaaggtcttattatagatttaagaggtaatttaggtggctatcttgatcctgcaattcgcatggctatggaatttctccctaaagacaggcttatagtatatactcaaggtagaagatcaccccgacaagattataaaagtgatggaagaggagcttaccagaatttgccgttagtagtattggtagatgaagcgtctgcatcagcaagcgaaatattctccggagcaattcaagacaatgatagaggaacaatcatcgggcgacgcacttttggaaaagggcttgtacaagaacctatacaatttgccgatggtagtatgctcagacttacgattgcacgctactatacaccttcaggaagatgcgtacagaaaccatactcgcaaggagacgaagaacaatatgagaacgacctgtttttaagagcagaacacggtgaatacttttataaagatagcataaagacgagcggaaaagcatacaaaaccagactcggtaggaaagtttttggtggtggtggaatcattcccgacatatttatcccacgtgatacaataggaatgactccctactttaaacaagcatatacactaaatctgctacaagaatttgcatatgtttatagtgataagaatcgaaaagaacttatgcaacatcagaatctaaacgaactcgtaaattatctggataaacagaatctcttagaacaatttgcatggttcggatcaagcaatggacttaagcgtcggaatttaatgctaaaaaagtctcaaaaactattcacccgtttcatatacggaaacattatcgataatatcatggacgagcaatcagccatacaatacgacaacttatcagatcctgcaatgcttgaagccataaaaattttgcatcaaggttcagcattccccaaattgacacgtacggaaggaaaattcatatttgggtttcaacaaacggataaacatatagcgttaatatgctcacgaattttcaaactcccctactatgctacagaaagcacaaatccgaaaaattataagagaaacatacaaaaaaacgcttga

SEQ ID NO: 1068 - DNA, 1215 bp, Prevotella sp. CAG:617
atgatgaatttttgtaattttgcaccgcaactcaaacgtaaacaagcattaagcatgattaaatcaatgtgcaggggcttgctccttgcgggtctggccgctactgccggcctgacttcctgcatccgggaggaagcccttaatgcggagtgcgacatcgaaggcgtcgactccgtgtggctgcgccagaaacttgacgaaggacttctggtgggcaatccggttatcaagaaccaggctgcttatttctatgtccagtcgggggccgacgtgtcggcgctcgatccgcgtttctatctgacgcccggcgccaccatctcacccgtcagcggcaccacgctcgactttaccctcccgcaggtgtacaccacgcggtcggaggacggccagtggagcaaacagtacaccgtgtcgttcaacaagctgcagccgcaggtcagcaacacgtttgagcacgcccgtctgaacagcagcgggaaatactacgaattcttcgaggtcgattcgctgggtaccgagctcgactactgggacagcggcaacggcggtttcctctttaccggcatgggacgcaagcctgaggactatcccacctatcccgaccccgacggctacaagggccagtgcgtaagtctcgtgacgcgcaccaccggcagcttcggctcgggcgtacacatgcccattgccgccggcaacctgtttatcggcgagtttgccgccagccaggccatgctgcaacccctcaaggccacccgtttcggcaagcagctggtcaatgcccagccgctctatctggagggatactataaatataccgccggcgacgtgtttaccgacgaaaacaagaatgtgctggaggacatgcgcgacacgtgcgacatctacgccgtgctctacgaggttgaccccgccaactttgtcgccctcaacggagccgatgtgctctccagcgaccgcatcgtgtcgctggcccgcattgacaatcccggccagccgcagcagtggcgctacttcctggagcctttccgccccatgaacggcaagaccttcgaccccgcacgcgctgcccgcaacggctatgccattgccgtggtcatgacgtccagccgccagggagcctacttccgcggcgccgtgggcagtcacctcaaggttgacgaaatacgcgtcatctgggacaccgacaccaacaagcccgccgggagcgagcaatag

SEQ ID NO: 1069 - DNA, 465 bp, Prevotella sp. CAG:617
atggaaaaagttgtaatcaattcctatgaggaatttgaaaaatatgtaggaaaagagattggcgtatctgaatatcttgaaattccacaggagcgtataaatatgtttgcagatgcaacgctggatcatcagtggattcatgtagataaagaacgggcggagaaggaaagtccgttcggtcagactattgtacatggttatttgacgttgtcattattaccttatttgtggcaacagttgattgaggtccgtaatttgaagatgatggtgaattacggtatggacaaaatgcgttttggtcaggctgtattgtctggtcagcgagtacgtcttgtagcatcactgcattcgttggcaaatttacgcggtgtatgcaaggcagagataaaatttacgttgcagattgagaattgtaagaaatatgcgttggagggaatagctacattcctttattatttcaattaa

SEQ ID NO: 1070 - DNA, 1074 bp, Prevotella sp. CAG:617
atgacttcccgccccaaaatataccattggctgcgccccctgtcctttctctacggactgggggtgcgggcacgcaaccgggcgttcgactgcggctggctcaagcaggagtcgtttggcgtgcccaccatctgcgtgggtaacctggcggtgggaggcacgggcaagacaccccataccgaactgctggtgcgcctgctgcagccgcactacaaggtggccgtactgagccggggctaccgccgacagacgcacggctaccacgtggccacgccggccgacacggccgccaccatcggcgacgagcctttccagatgttcagcaagttcagaaacctgaccgtggccgtcgacgaagaccggcgcgagggcatccgccggctcatggccgaggaaaagcccgacgccgtcattctggacgacgccttccagcaccgctacgtcaagcccggtctgagtctgctgctgaccacctaccagcgcccctactatgccgactgtctgctgccggcggggcgtctgcgcgaacccgtcagcggcatgctgcgggcctccatcatcatcgtcaccaaatgcccgcccagtctgacccccattgagcagaacctgctacgcaaaaaactgcagctacgcccataccaggagctgtatctcaccagtttcagctacgggaagccctatccgctacagcctcacaagaagaaccgctggaacaaccctccggccattctgctgctctcgggcatagcgcatcccgaccagctgctccgccatgcccaaacgctatgcagccgtgttgagtcgctcacctttgccgaccaccacgccttttcagatgccgacatacagcatctaaacaaccgctggcgccagcttccggccggcagtatcgtcctgaccaccgaaaaggacgcagcccgattgcgcgcctacaagctgaccgacaaggccctgctcagagccatctggatacaacccgtcagcgtatgtttcattgacggaagggaagaacatttcacacaaaacatactgaactatgttgccgaaaatacaagaaaccaaacaatggattga

SEQ ID NO: 1071 - DNA, 2112 bp, Prevotella sp. CAG:617
atgcgttcgttagcctcatacgaaaagcctttcaggcaatatccgatattgcgcgtgctcgtgcctttcggcatcgggcttttgagcggcagtcagttcagccatttcttctcgcaagaaatggctttttgttgtttcgtgccagtggtggcgtgtgtggtgatgctgttgttgaatcgccggaaccgcggttttcaggttgctttggcagtggccatgtattgttttggcttcgggtggatgagcgtgagccggttgcgccatgatggggcatggcccgccggggtgctgacggcgcgtgcggtggtgatgtcgcctccggtaatgacggcgcatgcggtgcgcgtacgggtgatgctggccgacggcatccgttcggggtgcagggcggaactgaccttgcaccgtgcggacagtctgaacgaatgccggttgagaccgggcgacggcatacttttccgcgcccgggtcgagccgccccggaattcaggtaatccgggcgaatttgactatgccggctatctgcgccggcagggcatcagcggcagggcctatgtgcccccggacgcatggacatgcttgccggaggcacggagcctgcgcaagtgcttgcccttatggccgcgtttgcaactgctggcccggatgcagcagcaaaaactggccgaccgttattaccggaaactgccgcaggatgaggctgctttgctggccgccctttcggtggggtacaggagcgcgtttccaaaggatttgcggctgcagttttcggccgtcggtgtgagtcacgtactggcgctttcagggttgcatttgggcattctggtcggggtgttcctgtatgtcagtccgcgccggcgcagctggcgggtggcgtattacgggcttgtcgtgctgatgattgccgccttttgcctgctggccggtctgccggcttcgctggtcagggccgggggcatgtcggtgtttctgttgctttcgcgcatggtgaacaggcattcgcggatgttgcagtcattgtttgtcgtgacgtttgtattgctgctcgtctcgcctgagtcattgtttgacgcagggtttcagctatcctttctgtccgtatggtttatcggactgtttatgccctcgttgcggcgccggctggctccacgtcagcggtgggtaaaatgtctggtcgtgcctctttgtttgagcgtggtggctcaggtaggcacgttgccgctggttttgtattattttcatcagattccggtttatttcctgttggccaattttctggtggttccgctggtgacgtggctgctttatgtggctgccgtattcctgtgtgtgccccttacggtggtacaggaagcctgcgtatggcttttgcacggcctgacggagatgatggtggggagtgtgcgtctgttggcttcctggccgggggcggaactgactttccatcctcattggctgacagcctgcgggctgatggtggtgggctactgcctgatgcgctggtgggctgagggccgtctgtcgcatcgggtggcgggatggggcatactggctgtaagcctggttgtcggtaacgagatggtgcagatgcgcccgtcgcgtatccggccgcaagtggtgttttatcacggttgggacggctcgccggtgcattttatggcttcggctgccgaaacctatttgttgaataccgtaccggccgacagcagtttgctgaaaagtttggaaaaaacgtattggaaaccctgtcatatggaaaagccacggattgtcaggacttcagcgtgggccgaccgtaatatgcaggtttatcacggcgtagtgcgattcggcgggcatacctgggtgatagagcagggacgtgaggtgccgaaagcgcggcctgcgggcagaagaacggtggcgtgtgaggtgttgttcctgacgcgggactgccagacggagctcgacgcgttggcccggagctattgtccgcgtcttgtggttctggacgccgggttgcccgaagcgcagcggcgacgttatgccgccggctgccgccggatgggatggagatgttacgatatcgcacagcgcggggcgcttacgctaccttgtcaaaatgaatcgtga

SEQ ID NO: 1072 - DNA, 762 bp, Prevotella sp. CAG:617
atgattgactttggaataaaagatgccattgatatcctgctggtagcgctgattctgtactacatctacaaactgatgaagcagtcgagcgcggccaacatcttttcgggcatcatcatgtttatcctggtatggattctggtgtcgcaggtgtttgaaatgcgcttgctgggtacgattctcgacaagatggtcaacatgggtggtctggccctgataatcctgtttcaggaagaaatacgccggtttttctctaccatcggcacacagcgccactcgcgcatcatttcgagtttcttcaagcgccgccgcaaaaacgagacccagcgtgccgaaatcctgcccatcgtaatggcctgcatcaacatgagcaagcaaaaggtgggcatgctcatcgtactggagcgccaggtgggactgaacgagtacatccgctcgggcgacatcatcaacgccaacatcacgcaacgactgattgaaaacatcttcttcaagaacagccccctgcatgacggagccatgatcatacgcaaccaccgcattgaggccgcaggctgcatcctgccggtatcgcacgacgccaacatccccaaagcgctgggcctgcgccaccgcgctgcgctgggtctgtcgcaaaaaagcgactgcctggccatcatcgtgtcggaagagacaggcgccatctccattgcacagggaggccagttcaggttgcgcctgacgggtgaggagctggagcgggcactgaccgaagaatggtaa

SEQ ID NO: 1073 - DNA, 1374 bp, Prevotella sp. CAG:617
atgacagtaacacaaaaaattcaaaaaaagcttagtgacagcccagctgcaaggtggactgctttagccatcgtatcatttacaatgatgtgtggttacttcattacggacgtaatgtcttctcttgaggtaatgctcacaactcccgcggctcaaggtgggctgggatggtccagttcagaatatggctttttttccggatcttatgggtacattaacgtattcttgttaatgctttttttcggaggtattattctggacaaatgcggtattcgctttactggtataatgagttgcgctttaatgttaggtggagctcttatcaaatggtatgcgcttgcttctgactttggcacagcaacttttatgggctaccatatgcaagttattgtggcgagtttgggatttgccatcttcggtatgggagcagaaattacaggaattacagtttctaaagttattatcaaatggttcacgggacatgaagtcgctttagccatgggcttacaagttgctatggcacgtctcggtacagcagctgcattaggatgcagtctgcctatggcacgagctgtggggagtgtttcttttcccgtcctctttggtgccatttgtctttgtgttggtctgttagcatatttagtatactgcgtaatggataaaaaactggaccagtcagtagaagccgtcgaagaaaataaagaagaaggctttcaacttaaagatttaaaactcatctttaccaatcgggggttctggttaatcacgctgctttgtctcatgttctacgcaggtgtttttccattccttaaatttgccacaaaactgatgattgcaaaataccatgtagaacctggtttagcaggtcttattcctgccatgctaccattcggcacaattttgctgactccagtgttcggttcactttacgaccgcatcggtagaggagcaacactaatgctgatcggatcaataatgcttaccattgttcatctgctttttgcaatgcctgttcttaatgtatggtggtttgccattattgttatgattgtattaggtattgcattttcgttggttccttccgcaatgtggccatcagtacctaaaataattccaatgaaacaattgggttcagcctatgccatcatcttctatatccaaaatattggtctttctatggttcctttacttattggatgggttattgaaacttactcaacaagtacaactccccaaggaatcacgtatgactataccgtgccaatgcttatctttgcagcattcggagcagtagctattggaattgccatcatgctaaaaaaagaagatgctcaaaagggttatggacttgaagaaagcaacataaaaaaataa

SEQ ID NO: 1074 - DNA, 972 bp, Prevotella sp. CAG:617
atggatttaaagattctccgtccgcgcccgcttcgtcgcggcctgctgggcattgaaaagctcacgttgttctatgccgccctgacatcggtagccatagtgattctgtggccgcatgtcagccatccggtcagcctgctgctgcagcgctggctgctttgcggcgccatgatcattccgtattttgcctatcggtggtatccttcgcgaatgaccaagtttctgcgcatcttctacgtcatggctctgctgggctactggtatcccgacacgtacagcatctgcagcacgatgccctacctcgaccatgtgtttgcctcggccgaccaatggattttcgggttccagccggcagaatggttcagccggatattctcctcgcgggtattcagtgaggctttctacctgggctatctgtcttactttccgattatcgtgtttgtcacgttctacgcctggctgcgcaaataccagcaactggaatatacgacgtttgtcatcatgtgttcgttcttcctgttctacacggttttcctgttcctgccggtagcggggccgcagttctactatccgctgctcagcgccgggcagctgcaaggcggggtgtttccgcccgtaccgcacgactacttcgtgctgcacccgcagattcaggaaaatcccgacagcgtgggcggcctgttccacacgtgtgtcagtttcatgcaagggcacggcgaacggcccacggcggctttcccttcgtcgcacgtcggcatcagtacggttatcctgctggccagccgcaagctctcctctacgcttacggcctgcctcgttccgttctacctgctgctctgcttctctacggtgtatatcggtgcgcactacgccattgacgccctgacgggcattccctgcggcgtagcagccttctatttctcggcctggctgttccgtttccgttttttccaccgcaagccacattgctga

SEQ ID NO: 1075 - DNA, 1128 bp, Prevotella sp. CAG:617
atgatggatagaagaggctttttgaaaatttcatcaatgacagctttgatggcagcagcgggagagtggacgggattatcaaaaatttttgctcgctcatcttcgcagaattctttttcatcagttcgtcaatcttccggtaatatggagcatagaaacctgggccagctgaatgtgtcggctgtggggcttggttgtttgcccatggtgggatattatggcggccggtatgaaaaacgcgacatgatagctttgattcgtcgggcttatgaaaaaggaattacttttttcgatacggccgaagtttatggaccccatgtcagtgatgagtgggtcggagaggctttggagccattccgcaacgaggtgaaaatcggtacaaaattcggatttggcgtagaagaggggaagcctacatcattgaacagctctcctgctcatatccgccgggctgtggaggggtcgttaaaacgcttgcgtacggaccatattgatttgttgtatcagcatcgagttgacccgaatgtaccaatggaagaggtggccgatacggtcaagcagctgatgcaggaagggaaagttctgcattggggattgtctgaagccagtgcgcgttcaatccgtcgggctcatgccgtttgtccggttacggccgtgcagagcgagtatgccatttggtggcgtgagcccgaaactaaaatttttcctacacttgaagaattgggaataggatttgtgccttactgtccgttgggaagggctttcctgacaggtgttatcaatgaaaacagccgattctataagccggatcgtcgtcataatctgccgcaatttacacctgaagccttgaaacacaatatgccacttgtcagacttgttcaaaaatgggcagaacaaaaaggcttgactccggcacaatttgcgctggtgtggatgctttcgcgtaagtcgtggatagcaccgattccgggaacgactaatcctgaacatctggatgatttgttgggggctggaacggtcagactttcagcctgggaaatggaggcttttgataaagagtatgctcaaattgatttgatggggcatcgggccgatccttttacagaaagtcagattgataaatcataa

SEQ ID NO: 1076 - DNA, 942 bp, Prevotella sp. CAG:617
ataacacacaaaggaaaaatgacgttacgtaaaataaaaataggcttgttagctttgtttgcggttgctggactgcctgttgtaggacaagacctgatagctcgacaagctccgattgatcgtagattaaaagccgtagattctgtttcaattcaaaagatgatagagcgcgaacagaaacaagttgctgctaatttgtatcccaattggaataataaatacgcgcatcaatataacgttgagttaccagatagctttaagattgatctacgggatttttgtatgcccactccgagtcgacgaattactagtaactatggatatcggaaggcatatcgccgggtgcacagaggtttagatataaaggtctatactggtgatacgattgtttcggcttttgatgggaaagtgcgtatagtgcgttatgacgcaggaggatatggtaagtatgttgtaatacgacatccgaatggcttggaaaccatttatggacatttgtctgctcaactagtaaaagaaaatgaggaagtaagagctggccagcccattggtcttgggggaagtacaggtctttcttccggttcgcatttacatttcgagacacgtttgttgggggtagcaataaatcctgctttgttgtttgacttccccaatcaagacgtaacgtgtgattattatacgtattataaggatagttatggtaagcagtctgatttggcatcaatgcggacggcaaaggaaagtgcggcttttggaggaggaactgataattcaacgtctgctgcttcagaagtggggggtgatcatttctataagataaaaaagggcgaaacgctatattctgtttcgaaaaaagttggagtaagcgttgaacaactatgtaagattaatggatttaagaaaagcaaaaagttgatgccgggacaaattttacgttattga

SEQ ID NO: 1077 - DNA, 732 bp, Prevotella sp. CAG:617
atgcatcaatctgatatgacgaatcgtgaatacattacgtgtgtagccattgatgacgaaccgatggctctgctggtgattgagcaattctgtcgccgcaggggcgggatggagctgacctgtttcagcgaaccgcgcgtggggcttgaggccatacgccagcagcagcccgacctggtgtttctggacatacagatgaacagcatcagtgggctcgacattgccgacgccctgccgcccgactgctgtttggtgtttactacggcctatgcgcagtatgcgctcgaggggtttaatctcgatgcggtcgattttctgctcaagccgttttcgtatgagcggtttgaagtggctgttgagaaagccatgcgccgtatagccggacgtacacgcagggaagaatacggtggcagcattgtggtaaagcaggaatattccaacgtgaatataaaaatagacagcattctttatgttgaagcgttgggcaattatgccaaaatttacatgccggacgggcgttatgtgctgacgctcaccagcctgaaagccattttccagatgttgcccgaaggacggttcctgcgcatccaccgttcctacatcgtggcccgcagcagggtggtcagctttacgcggacgcaggtcgtgttgtgtgatttgccgtcgccgcttcccgtggggcagcaatatgccgcgcaggtgctgaagttgatgggcgtttcggaaaactga

SEQ ID NO: 1078 - DNA, 876 bp, Prevotella sp. CAG:617
atggcatcgcttaaggaggttaagacgcgtattgcatcagtaaatagcacccgtaagattacgagtgctatgaaaatggtggcgtcgtcaaagttgcatcgtgctcaacaagcgattgaaggaatgcgtccatatcagtctcagttgactaacatggttggacgttttttcaatagtatgcatggggatataaattctccttttattcttaaacgtccagtttcaaaggtcgcaattgttgttttaagttccaattccagtttatgtggtgggtttaatgctaatgttgcaaaacttttagccaagacaatagaatcttataagcaagaaagcataacggatattactgtttttccaataggtgctaagattgcagagaatgctcgtaaaatgaatacagttgtgtgtgatggtgcttctgattttacagcaatgcttgaccatcctcaatattctcaaatagcatcgttggcaaaggagttgatggataatttcgtaaatgagaaatatgataaaatagatctgatttaccatcaatataagagtacatctactcaaatattgcagcgtaaaacgcttttgcctattgatttgagtcaaaaagtttgtgatgagtctggacaattggattatattattgaaccttctgctgctgagttattagaaatgttgttgccacttagtataagttttcagctttatactgctgtccttgatagtttggctagtgagcacgcggctcgtgtggttgccatgcaggtagcaacggacaacgcagatgatttgttgcatgagttgactttgacttataataagactcgtcagcaggctataaccaatgagttattagatattgctggagggtctgctagatga

SEQ ID NO: 1079 - DNA, 351 bp, Prevotella sp. CAG:617
atgtatacagtattagtggtattggcagtgttgactgctatttttatgtgctttatcgtactaatccaggaatcaaagggaggcggtctggcttcaagtttttcatcttccaatcagatcatgggtgttcgtaagactaccgatgtcatagaaaaaaccacttgggctttggctgcaattctggttgtattgagcgttgctacggcttatgtgactccggctccggagggcagcacttccgtaacagataatatgaagactactgcgccgatgaatttgccgggtcagccaaacagcagtactactgctccggcttcggcccctgctgcccctgcagctcctgctaaataa

SEQ ID NO: 1080 - DNA, 933 bp, Prevotella sp. CAG:617
atgaataataattttatggtcttttcaggcacaaagtcacgctatttagcagaaaagatttgtgcaagtttaggttgcaaattaggtaatttgttaattactcacttcgcagacggagaatttgcggtcagctatgaagaatcaattagaggtcgtgatgtattcttagtgcaatcaactttcccaaattcggataatttgatggaattattgttgatgattgatgcggctaagcgtgcgtctgcgcacagtattatagcagtcgttccttattttggatgggctagacaggatagaaaggacaagccaagagtttcaatcggtgctaaattagtcgcagacctgctgagtgtagctggtattgatcgattaattaccatggatttacatgcagatcaagagcaaggcttttttgatgttccagtagaccatttgtatgcctctacaataatgttgccttatgtaaagaatttgaatttgccaaatctgtgtattgcaacaccagatgtggggggatcaaaacgtgcaagtacatatgcaaagtatttggattgtccattagtcctttgtaacaaatcgcgtaaaaaggcgaatgtagttgatactatgcagataattggcgatgtgaaaggcatggatgtcatacttgttgatgatattgttgatactgcaggaactattaccaaagcagctgatttgatgatggaaaatggtgcacatagtgtaagagctatagcatcccattgtgtaatgtctggaccagccagtcagagggttcaagattccaaattggaagaaattgtgtttacagacagtattccttatgacaatctttgttcgaaagttaagcaattaaccgtagcggatatgttcgcagagacaatacgccggttgatgaataatgaaagcattagttctcaatatctgatttaa

SEQ ID NO: 1081 - DNA, 687 bp, Prevotella sp. CAG:617
atgatcatagaaatgagaggcatcaccaagcgttttggtcagctggaggtgctgaaaggaatagacctggatattaacaagggcgaggtggtgagcattgtaggcccgagtggcgccggaaagacgacgctgctgcaaatcatgggtacgctctacaagcccgacagcggcagcgtaagcattaacggcgaggacgtgttgcggctgaagggaaacgccctgtcgcgctttcgtaaccgccatttgggatttgtgtttcagttccatcagttgctgccggagtttacggcgctggaaaatgtgatgattccggcctatatcggtggcatgaagggacatgcggtgaagcaacgggcggaggaactgctcgactttatggggctggccgaccgtatggagcacaagcccaacgagttgtcgggcggcgagaaacagcgcgtggccgtggcgcgggctttgattaaccagcccgacgtcatcctggccgacgaaccttcgggaagtctggacagccggaacaaggccgagctgcaccagttgtttttcgacctgcgcgacaaaaccgggcagacttttgttatcgtgacccacgacgaggaattggccggcttgaccgaccgtaccattcacatggtggacggaatgataaatactcagcatcatgaagatagcacaacaactgactga

SEQ ID NO: 1082 - DNA, 1074 bp, Prevotella sp. CAG:617
atgcagcaggattgggatgattccttagatgaagccgaggcgctttccaacgacgagatggacgccgagagcgggcagctgtacgagcattttcgtctggtggccgacaaggggcagcagttgttgcgcattgacaaattcctggtggagcatctgcccgacacttcgcgcaaccgcattcagcaggcggcgcgggccggttttattcatgtgggcggacgtcccgtgaagagtaactaccgtgtcaagccgctcgacgtggtgacgatggtgctcgaccgtccgccctacgacaacaccattgtgcccgaggatattccgcttgatattgtgtatgaggacgacgagctgatggtcatcaacaagcccgccggcatggtggtacatcccggccacggcaactatcacggcacgctggtgcacgccgtggcgtggcacttgcgccacatgcccggctacgaccccaacgacccctcgctgggcctggtgcaccgcattgacaaggacacgtcgggcctgctggtgattgccaagacggctaatgccaagaccaaactgggggtacagttcttcaacaagaccacccgccggcgttacaatgccctggtgtggggccgttttgacgagccggagggccgcattgagggcaacattgcccgtaatcccaaagaccgtttgcagatggccgtatttccgcccgactcaggggtgggcaagccggccgtgacgcactatcgtgtgctggagtcgtttggtccggtgacgtgggtggagtgtgtgctcgaaacggggcgtacgcatcagattcgcgcccacatgcgccacatcggtcatccgctgttcaacgacgcccgctacggcggcgaccagattctgcgcggcaatgtgtcggctgcctaccggcagtttgtgcagcattgctttgaggcctgtccgcgccaggcgctccatgcccgcacgctgggctttcagcacccgctgacggggcaggagatggactttacttccgaactgccggccgacatgcagagtctgactacacgctggcggcagtttgcgcaaacacatgcctaa

SEQ ID NO: 1083 - DNA, 1086 bp, Prevotella sp. CAG:617
atggaaaacgtagaaaaatcaattagtgggcttcaaagagaaaagttccagaaaaatatcgatggaaaacttactgatttattctttttacataatgcagccggccatgaaattgcaatcaccaattacggtggtacaattgtagcgatcatggttcctgacaaaaacgggaacttaagtaacattattcaaggccatgattgcattgaagattgcatttcatcacctgagccattcctaagtaccctaatcggccgatatggaaatcgtatctgcaagggtaaatttactatgaacaacaaagaatacaaactagccatcaacaatggagaaaatcacctacatggcggcccgacaggttttcatagtagagtatgggatgcagaacaagttgacacacaaagtttgattttacgttacacatcagcatactacgaagaaggattccccggtgaattgaaaatgactgtcatgtacacttttaacgatgatgatgaactgattatcaattatcgtggaacaacaaataagaagactgtagtaaacatgactcaccacggtttcttctcacttgcaggcattgcaaaccccacacctacaattgaagatattgagtgccaaatcaatgcagattactatattcctattgacaagaactcaattccgacaggcgaaattctcaaagtggaaggcacaccatttgattttagaaccatgcgtaaaataggacaagacattgatgccgacaacgaacaaataaaaaatggtgcaggctacgaccattgctttgtattgaaaaagaatgaacccggtgaactctcttttgctgcaaaagtcgttgagccaaaaagcaaaagaacaatggaggtttggacaacagaacctggagttcaattttacacagacaattgggctgatggatacaagggacaatttggtgccacattcccaagacgaagcgcaatctgttttgaggcacaacacttcccagacagtccgaatcattcttacttcccccctgttatactcaagcctggagaactatactcccaaaaaaccatttacaaatttggcatagcagattaa

SEQ ID NO: 1084 - DNA, 744 bp, Prevotella sp. CAG:617
atgagaatttttatccgtccggaatatcattgtttgtcagactttataaaaaaaattccgcagcattttgatcatgaaggtgaagtgctgtatgcccgacgtaatgtgatacgaaaaatgagagtcggagaaattgaattgaacgtgaagcgctatggtgtgccttcatttttcaatcgcttgatttatacttttttccggaaatcaaagggctggcgtgcctatacctaccctgaccggttgttggcgtctggcattgaaactcctcatcccgtggcttatattgaggaacggcgaggcggcttgttgcactattcgtattttgtaagtatccaatgtccctatacccgtaatttttatgaatttggcgatgcccggattgctgactgtcgtgatgtggtaagcgcttttgcaaagttttctgcccggttgcatgatgcgggtatattacatcttgattattcgccgggtaatattctgtttgaccgtgtggagaatgaatggcgcttttcgctgattgacattaaccggatgcggttcggcacggtttcggtagagcaggggtgtgccaattttgcacgtctgtgggggcaggtggatttctttaagcagttggcttgtgattatgctgctgcccgaaatgcagaaccggagcagtgctgccaatgggtgctgcactaccgacgtaagttctggcagcgttaccgccgccgtcatgagttgaagttccggttggaactttaa

SEQ ID NO: 1085 - DNA, 1962 bp, Prevotella sp. CAG:617
atgcacattggcaaatataggcgaaaggaagcaggcaaccaaattttttccgtctttttttcagggcttcccgccgaaagaggaagccggctgctgaaatctgtaatccgggtagggccatccgttatttttatacgccaaaatccgacaggaatatgtaattttgcaatacgattcggaaacgagaaatcactaaattttcattacgatatgtacatcgaaaaaatcaattcaccggccgacgtcaaaaagctgaacgtggccgaaatgactcagctgagccaggaaatccgcacggcgctgctgcagaaactcagccaccacggcggtcacgtaggtcccaacctgggtatggtggaggccaccattgccctgcactacgtgttcaattcgcccaccgaccagttcgtgtttgacgtgtcgcaccagagctatacgcacaagatgctgaccggtcgccgcgaggctttcctgcagtcggaccactacgacgacgtgtcgggctacacctgccccggcgagagcgagcacgacctctttaccatcggccacacgtcaacctccgtcagcctggcctgcggtctggccaaggcgcgcgacctgaagggcgagaagtacaacgtcatcgccatcatcggcgacggctcactcagcggcggcgaggcctacgagggcctgaacaatgtggccgaattgggcacgaacctgattgtcatcgtcaacgacaaccagatgtccattgccgagaaccacggcggcctctaccgcaacctgcaggccctgcgcgagagcaacggcacgtgcagctgcaactttttcaaggcgctgggctttgactacaaatacgtggacaacggcaacgacctgcaaaccctgattgacaccttccgcgaggtcaaggacattgaccaccccatcgtgctgcacatcaacaccatcaagggtaagggctacggtccggccgtgacggaaaaggagcgcttccactggagcatgccgtttgacttggaaacgagccaggtgacctgcgcttccgacggccccgactacaccagcctgaccgccgactatctgaaaaagcgcatggacagcgacccgcagttcgtggtgttgaccgccggtacgccggccgtcatgggcttcgacgccgagctgcgcatgcaggccggcaagcagtttgtcgacgtaggcatcgccgaggagcacgccgtagccatgtcgtcagctctggccaaaggtggcgcacgccccgtattcggtgtgttcagctcctttatccagcgcacctacgaccagctctcacaagacctctgcatcaaccggaacgcggccgttctggccatttttgcaggctccgtatgcggcatgaacgacgagacccacctgggattcttcgacattccgctcctctgcaacatccccaacatggtatatctctgcccgacgtcaaaggaggagtatttcggcatgatggactgggccattgaacagaccgatcaccccgtagccatacgcgtaccggtagctcccgtaatcagccgcccgcttccggccgataccgacttcagccagttggggcgcgccgaagtggtcaagcaaggaagccgcgtagccctgctcggactgggcaacttcctgactctggccctgcaaacggccgacctgctcaaggaaaaaggaattgacgccaccgtcatcaacccgcgctacgcctcacactacgacgagcagctgctcaaccgcctgaaggccgaccacgaggtagtcatcacgctggaagacggcaccatagacggcggatggggcgaaaaaatagcccgattctatggcgacagcgccatgaaagtgcgctgctacggcgccgacaaggcttttgccgaccgctacaaccttgacgaattcctgaaggcccaccacctgacggctccgcaaattgccgccgacgtggccgaactgtgctaa

SEQ ID NO: 1086 - DNA, 615 bp, Prevotella sp. CAG:617
atgaagaccaaagaaaaaatacacctcacaaaattcgtaaaaaaccacaatccggccaagttcatcctccgccactttgctcgcgcggcattttttcgcccaccgcttcattccctttctccggccggcaataagccatcaccatctacatttccgtataaaaacgcccctgcccccaaggcactctccacaaaaatcattacttttacatacgcatcatacacaaaaatcatgaaacgcatcgaagtagtagcggccgtcatctgccgccagcagcaatatctcgccacccagcgtggctatggcgagttcaaagacttctgggaatttccgggaggcaaaatcgaaccgggcgaaacgcctacacaggctctcaggcgcgaaatccgtgaggagctcgacaccgacatccgcgtcaatcgcttcctcaccaccgtcgagtacgactaccccgccttccacctcaccctccactgctacctctgctccctaccctccgaccacctcctgctcaaggagcacgaaaatgcccgctggctctcccccgaacaactcgacacccctcgctggctacccgccgaccgagaagtcgtcaaaatacttcaaaaactttaa

SEQ ID NO: 1087 - DNA, 726 bp, Prevotella sp. CAG:617
gtggcatgctttctgcatgcgaaaaaattgaaaaatatgaaggttataagtcatatcattttagttgtttcgtgttgcttttgctgtgtcctgaatttaaaagcccaggtggagcaggtgtctgattcggtcattactccctgggatagggccgtagccttgcccgacactgcacatcagacgctggacgggccagattccgcagctgacggactggatgctgtcggcttcctgatgaatgtgccgggcagcctggatcagtgggactatatgcctttgcatcgggggctcaatgcccagtttggcatgagtgtatccgccgcatggggcaaacatgcgccgcgtggcgtaggtttcgggcagcaccttaatttaatgtatgtggctccgcttacgtcgcgcttgagcattgcggccggtctttctgccgacaatcttacgtggggaggcgaccgcttgacttcactcagcctgatgggtgctgccagctaccggctgaccgaccgcatcaatgtttttgcctatggtgccaaacgtttgttgccgcagcgtgaggtaagaggtctggcggctccttatttctacgaccgcaatcccgactacgtatatggcggaggtttcgattttaaactgggcgagcatagctggctgcaaatcagcgtagagtcgcgaaaggacagttatccggcaccaccgcctccacctcaccattttgaacgtcgataa

SEQ ID NO: 1088 - DNA, 849 bp, Prevotella sp. CAG:617
tttcgctcctttatggcaaaaagaagcaacaacaataaacgccctcccaaaaacagactgaaaaagctattacgcaaagctccctcatgggcattgggcataggcggaatcctaattgccgctatttatgcagcaattttttattatttcttcgtaggacagtttggcttacgatggcaggctttctatggtgatgcatcttatccaaatgaatattccatacaaggtattgacattagccatcaccaaggtgaaatcaattggactaagcttcaatctgctacaataggcgacaaccctattcgattcattattatcaaagcaacagaaggagccgattttctcgatgaaaatttcaatgataatttttataatgcacgcgaaaacggctttattagaggggcataccactactttaaacctaacacaccagccctattacaagccaaatatttcttgaaacaagttcatttggaaccgggagatttgcctcctgtcttagatatagaagaaaaaggtaatctcactgcagcacaactaaaaaaagctgccctaacttggctgcacacagttgaaaaaaaatatggtgtcaaacccattatatatacaaattacaaatttaagttacaatatctctcagacaaagatttcaatgactacccgtattggattgcgcactactacgtaaaagaactaaaatacaaggggaaatggaagttctggcaacatacggattatggttcacttcctggaatcaacggaaaagtagactttaatgtttataatggatccatgtatgacctgaaaaaatttactataagcaaaaaagaagaagtagaaactgaatga

SEQ ID NO: 1089 - DNA, 2460 bp, Prevotella sp. CAG:617
atgaacatatcttataattggcttaaggagtatgtagattttgacttaactccaaatgaagttgcggctgctttaacttcaatagggttggaagtaggtgcattagaagaggttcaaacgattaaaggcggattggaaggtttggttgttggtgaagtattgacgtgtgaggcacatccaaattcggatcacatgcatatatgccaggtgagtctgggggcggacaatgttcagcagattgtatgtggcgcgcctaatgtagctgccgggcaaaaagtcattgtagctcccattggtaccaaattatatgatggcgagaattcttttaccattaagaagtcgaaactacgtggcgtagaaagctatggaatgatatgtgcagaggatgaaatcggggtgggaacaagccatgaaggtatcatcgttttgccacaagatactcctgtaggaatgtctgcaaaggaatattatcatgttgaaagtgattatgttattgaagtagacattactccaaatcgtgctgatgcttgttcacattatggtgtagctcgtgatttgtatgcatggttggtatgtcagggtaagcaaacacaacttcatcgcaatgatgtttcagacttttctgtggataatcatgatcttgaaattgaagttcaagttgaaaataaggaagcatgtccgcgatattgtgctgtcagtctgacaggatgcgaaattaaggaaagtcctaagtggttgcaggataaattgaggacaatcggcgtacgtcctattaataatattgttgatataacaaactatattatgtttgcttatggacagcctttgcattgctttgatgcagatatggttaagggacaaaaaattgtcgtcaagacgcttccggccggaactccatttacgacattggatggagtggaacataaattagacaagaaagatttgatgatctgtaatgcagaagaaccgatgtgtattgccggcgtatttggtggtaaaggatcaggaacgtatgaaaccacacataatgtgattttggaaagtgcttattttcatccgacatgggttcgtaaaagtgctcgcagacatggattaaatacagatgcaagttttcgttttgaacgaggaattgacccgttgggacagattgaagctctgaaaaaagctgccattttggcacgtgaattaagcgggtgtaaaatttccatggaaattgtggatatacagagtgctgttgctaaaccttttgaagtgcaacttgactatggatatgttcacgatttgataggaaaagcaattcctgttgaaactattaaggggattattcgtagcctggaaatgcagatcgtcggtgaaacggacaatggattaagcattcttgttcctccttatcgtgttgatgtgcagcgtccgtgtgatgtggtagaagatattttacgtatatatggctataataatattgagatccccaaatctgtaaaatctagcttgagcattaaaggcgacgaggatcgtgatgtgaaattgcagaatattgtttcagaagaactgataggaggtggctttaatgaaatcttgaataactccttgacgaaatcttcgtattatcaggatctaaagagctttagtgttgaaaatcttgtcgaaattatgaatccattaagttctgatcttgatgtattacgtcagactttactttttggaggattggagagcgtttcttataacgttcatcgcaaaaattcaggcttgcgcttttttgaatttggtaattgttatcattatcatgcagagaatgctaaggaagatgattctttgtctacttattcagaggagatgcatttgggactttggattacaggcaagcggattgagggttcttggatacatccagatgaagaaagttcggtcttcgaattgaaagcgaatgtacttaatatattaaaacgtttaggagttgaagtttcggctttgtctcatgctgatggatgcagtgatgtctttggaaaatcagagcaattgttgaaaggtagcaagttgcttgtagaatatggtattgtcaagaagacgcttttgcaaaagtttgacttgactggtgatgtctactatgctgatataaattggacaaatcttatgaaagcagtccgcaagaataaggtgacatttacggatataagcaagtttccgccggtgagtcgtgatttggccttgttggtagatcatgctgtgacatttaaacagattgaagatatcgcatttgcagctgaaaaaaaattactgaaacgagtcgttttatttgatgtttatgagggaaaaaatttggagccaggaaagaaaagctatgctgtaaattttatacttcaagatgagaataagactttgactgataaacagatcgataagataatgagcaatctggttcgtaattttgaaaatcagttaggagcaaaactcagataa

SEQ ID NO: 1090 - DNA, 1404 bp, Prevotella sp. CAG:617
atgagaagcgaaacaatatgtgcaatttcgacagctccaggaggagctatcggcattatccgtgtgtcaggttctgattcgatttcacttgttgaccaaatatttaaaagcgcaacaggaaaaaaattggaattctgtaaaggctttacggcccattatggtgaaatttacaataaagatcgtgttttggatcaggtgattgttacaatctttagggccccacattcatatacaggtgaagacttagttgaaatatcgtgccatggatctacctatattttacaaagcattatcaatgaattattggactcctcccctcacatacgcttagccacagctggagaatttacaaaaagagcttttttaaatggtaagatggatcttgcccaatctgaagcagttgcagatttaattgcagccgactcaaaggcaggtcacgacattgcaattaagcaaattaaaggagactatagtattgaattaaaaagactgagagagcatttcttgacgttcgcatctcttattgaacttgaattggatttcagtgaccacgaagatttggaatttgccgaccgttctaaattaaagattttattaagagacatagaaaatcaggtcactaatcttgtacattcctttaaattaggtaatgtaataaagaacggtgttccagtagcaataattggcaataccaatacaggaaaatcaacattattgaataccctactccatgaagaccgtgcaattacaagtgaaataaaaggaacaacaagagatactattgaagacattgttaaactgcatgatatactgtttcgctttattgatacagctggcatacgtaaaacttcagataaaatagaacgcataggaatacaaagaagtattgataaaataaaccaatcttcgattatattatgggttatagatgccatagaatctataacgtcgttaaatgagcaggcaaaggaggtcgttcctcttttgaaaaacaaaaactttattttcctatttaataaagaggatcttttagccaataacagtatccaaaaaacattgatggaatgggcaaatcaattaatccctcatgcaaattgcctatttatttcggcaaagaataaaacgcatattacagatttagaaaataaactaattcaaatagtaagaaatcttcaaagcactgaaagtaatattataattacgaacatgcgacattatgaagtattgaaaaaaatattatttacaataaatcgaataaacgacggatttgctcatcagattcccagtgacttattagctcaggatattcgtgagtgcatatcatatttgggagaaattctaggggaagtaacttcagatgaaatattgcataacatattttctaaattttgcataggcaaataa

SEQ ID NO: 1091 - DNA, 900 bp, Prevotella sp. CAG:617
atgaagaagattagagccgccgtagtgggatacggcaacatcggacactacgccctccaggcgcttgaagcagccgatgactttgaagtagccggaattgtgcgccgtcatggcgcagagaactgccctgaagaactgcagaaatacgacgtggtaaaagacatacgcgaactgaaagacgttgacgtagccatcctggccacccccacccgcagcgtagaggcctacgccaaggatatcctctcgctgggcatcaacaccgtggacagcttcgacatccacacacaaatagccgacctgcgccgcagcctgggcgaaaccgcccgcgagcacaaggccgtatccatcatctcggccggatgggatccgggaagcgactccatcgtgcgcaccctgatgcaggcactggcccccaagggcatcagctacaccaacttcggtcccggcatgagcatgggccacaccgtagccgtaaaagccattgacggcgtaaaggccgccctgtcgatgaccatccccaccggcaccggcattcaccgccgcatggtatatattgaagtggaagaaggtcacgacttccagaccgtagccgccgccatcaaggccgatccctacttcgtacacgacgagacgcacgtggttgaggtgccttgcgttgacgacctgctcgacatgggccatggcgtcaacctgacccgcaagggcgtgtccggcaagacacagaaccagctgttcgaattcaacatgcacatcaacaacccggcccttacgggtcaggtactggtatgcgtagcccgcgcctcaatgaagcagcaaccgggctgctacaccatgattgaagtgcccgtcatcgacctccttccgggcgaccccgaagagattgtacgcgcactggtataa

SEQ ID NO: 1092 - DNA, 705 bp, Prevotella sp. CAG:617
atgctgatggggcgagtctttcagcgtcctgagcgtttccggatgtttttcaaacagtatgcgaaggaactggcagggttgggggttgattcaatcggcatagttttattgatatcgttttttattggagcggttatttgtattcagataaaactgaatatacagagtgcgtggatgcctcattgggtttcggggtacacaacgcgtgaaattatgttgctcgaattttcttcctcaataatgtgcttgattttgtccggtaaagtggggtcgaatatcgcatcagaattgggtacgatgcgggttactcagcaaattgatgcattggagataatgggagtgaattctgcaagtttcctgattcttcctaaaattatcggcttggttaccatgattccgttgttggtcattttcagtatagtaagcggcattattggtgcttatgcaacagcatatattgggcacattattacgccggcagacctgacggcaggtatgcagcatgactttacgcaatggtttgtgtggatgggaatcatcaaatccttgttctttgctttcatcatagccagcgtatcgtcatattacgggtatacggtcgagggtggttccattgaagtgggaaaggccagtaccaaggctgtggtgtcaagcagtatgctgatacttttttctgatatgttcttaacacaaatgctttcgtag

SEQ ID NO: 1093 - DNA, 1023 bp, Prevotella sp. CAG:617
atgattgaacaaatacaagcattgttaagccaagtacatacgcttcaagctcatgatactaaagaacttgaagcattacgtatcaaatatttaagcaaaaagggtattgtggccgaccttatgacccaattccgttcagtacccgccgaacaaaagcgtgaagtaggaatgctgctaaaccagttgaaagatgctttaaaccagcggttggctgatttgcgtaatgaattgacgcaagaacaagacgacggaacaaaggctttggacttaacccgttcgccctatcctattaaactgggaacacgacatccgctttctatcgtaaaagcagaaatcattgatatattctcacgtctgggatttactctggcttccggacctgaaattgaagacgactggcatgtgttctcttccatgaactttccagctgatcaccctgcacgcgacatgcaagatacattcttcatcaagcgccaaccggacgttctgctgcgtacacacaccagttccatacagtcacgcgtaatggaacatacagaacctcctatccgcgtgctttgccccggcagagtctaccgaaacgaagccataagtgcacgcgcacactgttttttccaccaggttgaaggattatacattgacaaggacgtttcatttaccgacctgaaacaggtattgttactgtttgcacaagaaatgttcggcccagacacccaaatacgccttcgcccgtcctattttccctttacggaaccttctgcggaaatggatatcagttgtcatctatgtggcggaaaaggctgcagtttctgcaaaaataccggatgggtagaaattttaggatgtggtatggttgacccggctgttctcgaagccaatggtattgactctacacaatataagggctatgcctttggtatgggagtagaacgcatcacaaacctcaaatatcaagttaaggacttaagaatgttctctgaaaatgacgttcgtttccttgatgaatttacctctgcatactaa

SEQ ID NO: 1094 - DNA, 1281 bp, Prevotella sp. CAG:617
atgaaaaaagacactgaaatcttcgaattgatagaagcggaacatcaacgccaattaaaaggtattgagcttatagcttcagaaaactttgtaagcgaccaagtacttcaagccatgggctcatgccttaccaacaaatatgcagaaggatatccatcaaaacgatactacggaggatgtgaaattgtagacaaaacagaatccattgcaattgaacgcgttaaaaaactttttggtgcagaatacgctaatgtacagcctcattccggcgcacaagctaacgccgcagttttcttagcctgcctaaaacccggcgatacttttatgggactaaatctggaacaaggcggacatctttcacacggctcaaaagtcaatacttctggcattttatataacccaataggttacaatttaaaaaaagagaccggtaccgttgattatgatgaaatggaaagtttagctctagaattcaaacccaaacttatcattggaggaggatcggcttacagccgagaatgggattatgagcgaatgagaaacattgcagacaaaattggcgccatttttatggttgacatggctcaccctgcaggacttatcgccgcaggcctgttaaaaaaccctgttaaatacgcgcatatcgtcacctcaacgacacataaaaccttaagaggaccaagaggtggaataatcttaatgggcaaagatttcgaaaatccatgggggtatacgactaacaaaggttccataaaaatgatgagccaattgcttaatagtgctgtttttcctgggattcaaggtggccctcttgagcatgtaattgcagcaaaggctgtagcttttggcgaagctttgcaaccagaattcaaactttatgcccaacaagtaaaaaataatgccgattgtttagcaaaagaactaattaaaagaggctttaacatagttagtggaggaacagacaatcatagcatgcttgttgatttaagaacgaaatatcctgatttgacgggcaagaaagcagaaagtgcgttggtagcagcagacattactgtaaacaaaaatatggtgccatttgatgaccgcagcgcttttcaaacttcaggtataagaattggtacccctgcaataaccacaagaggattaaaagaggatatgatgccaataatagctgatttcattgaagaagttttaaattctccagatgacgagaatgtaatcaaatctgttcgtgaaaaggtaaacgaatgcatgatgaattatcctctatttgcctattaa

SEQ ID NO: 1095 - DNA, 1479 bp, Prevotella sp. CAG:617
ttaggtatgaaaaaaactacatttttttcgtctgcggtcttgttgacgctcttacaaggtgccacattaccattaatggcacaagaccaacaagttacgctgaggacgacaaaagcagtagggtcagaaatgacattcaaagtcaatgaccccaacgtaactgtcgactggggagacggcaatttagttaaggcccaatccacagaagttacaggcactgtaaaaggtgagaatattgttatctatggtaacaatacttggagcatgattgactgctcgaactgcgaattaagcgtgctgtcaataaccatggctcccaacatgcaaactctgatctgccgaaacaatagtttggaaggtatcagtctcattaaaagtgaaaaattgcaggatcttgactgttcttacaacaacatcaagtcactttctctattaacttgcacaagccttgagcgtttgaacgcaagtaacaatgcactaagtggaccacttagcatcagctcactggaaaatctgcaatatatcaatgtggccaataacgcgcttacttcagtatctgtatctggaagcagcaatcttgacatgcttaattgcagcaacaatcaaatcagcagtctcgacctgagcaaagccacgaaacttaccagtctggtttgccacaataataaaatcagttcaatcaattttagcagtacacaaggtgttccggcattgattgacattgtttgtgacaacaaccaactgaagacattgaatttacaaaattcatccgtcatttccaacatcagttgtacgaataaccaattaactcaagttgttttggcatcaaagcctgacgagaagccatattcttatttgtgttcaaacaactatttatcattgaaatcgttttcaacctcatacggccccacgggtgaaaaccttcagttcatgccgcaaaatgaatacgatatctccagctatacactctacgattctaatgccggaaattatgtgctttcacaaaactcagcagaaggtgcaacaacaatggccatgtctgaagagcgtaaagatgctgatggtagcttctacaataaaataggattttatgccgttgaaaacggagaaactaccgaattggtaaaaggtacggactataaagagtccggaaacggaaactacacgttcctaaaagaatttacccatgtatacggaaaaataaccaactcacgtgtagataatgtgtacgttcaaacaacgccgtttaccgttgtaaaggaaatgattaccggtatcacgaacgttgaagaaaacaatggtttggttgtaaacacagctgacggttgcattgttatcagcagtacaaaagctactcccgttaagatatatgcagttgacggacgtttggtttggaaaggagttgcatcctctacgccacaatcaatcagcttaaataaaggcgtatacatcgtaggtaaacaaaaagtttctttataa

SEQ ID NO: 1096 - DNA, 723 bp, Prevotella sp. CAG:617
atggaacagaaaatattaagatatttgtgcattataataattagtgtatgcactttagacgggtatggtcaagtaaagagtgattctttgcctaatgatagggtaagagggatacaatatgagacgggaacgcatcctatatcagcggagcaaattcctgtttttgcgggattttcgatttcagtggaccttgcaggtttggcaatgacacagatggccgtgtatggacaatatgagtctgcgttacgcttaaattttaaagaagcatatttccccattcttgaattgggcataggaaattgtaatcatacagatgaaacaacttcgcagcattatatggtaaggagtccttattatcgagtaggattagactataattttataaagaataagcatagttcaaatcgactttatggaggcatacggtatggtctaactttttataaatatgatcttgagggaaatgatattgaggatcctgtatggggcggttcaattccttatcattttgagtcagtatcttcaaacgcgcattggttggaattagttgggggattagaaacaaagatttggaagtttattcatgtagggtggagtgtacggtttcgaaaaatgctaaaacagaaaaaaaacgcaataggaaaatcctggtatgtaccagggtatggtaaaaataatgaaagcaattggggcggaacgtttaatttgatttttgatatataa

SEQ ID NO: 1097 - DNA, 603 bp, Prevotella sp. CAG:617
atgctacagaaagcacaaatccgaaaaattataagagaaacatacaaaaaaacgcttgaaaaagaacgtgatatgtggtctgctgaaataaaggctaaaattcttcaaatgccaatataccaacaggcccgacatatcatgctatatgctgcactccccgacgaagcaaacataacgtccattatatttgacccatctgcgatttccaaaaaaatttggtttcctaaaataatagatgcggagaccatcataccacacttatattcgccagaaaaaggattcaccaccgattctgaaaaaacaccatatcaaataaaagagccacgtggaaaaattcaatcggtttggcctgatttagacttaattatagttccgggattggcatttgatcatgccggtcaccgtttaggacgtggaaaaggcttctatgaccgttttctcagaaaatatccccaatgctacaaagtcggaatatgtttcccgtaccagcttgtaaatgaaattccagtttccgaacatgacataaacatggatctgattatcagcgtatcaaataaaatgtcagaaaaaaaagattcaggaagaactacagtttcattttaa

SEQ ID NO: 1098 - DNA, 798 bp, Prevotella sp. CAG:617
atgacgaaaaaattcatccatcatatcatggccgtcctgatgctggccgccgtgccggcagcaggacgggcacaaaaccgccagcccgcaggcggcgaggagtcgaccaccctgctcaaggccgccctgaagggcgtacacgtagagctgcgcgcaggtgtgctcatcggcggtacgtcgcccatgcccctgccgcgcgaaatccgcagcatcgagagctacaaccccacgctgtgcacctcgttcgagggagccgtgcaaaagagtttcgagcagtcgccctggggcgtaaagctcggtgtgcgtctcgaaaccaagggtatgcgtacccaggcccgcgtgaagaactaccacatggaaatgacggccgacgacggcggctacatggtgggtgcctggacgggccacgtcaccaccaaggtgcgcaacacctgcctgacctttcccgtgctggccacctactcgctgggtgagcgctggacgctgagtgccggcccctacctgtcgtggatgttcgacggcgaattctccggcagcgctttcgacggctacctgcgccacaccgaccccacgggcgacaaggccgaggtgagccgcgccagctacgacttttccgacgacctgcgccactttgagtggggcgcacaggtgggcgcgcagtggcgggcctacaagcatctggccgtgtatgccgacctggagtggggcttcaacaacatcttcccctccgacttccagagcgtcacgtttgccctctatcccatctacgccaacgtgggctttacgtacatcttctaa

SEQ ID NO: 1099 - DNA, 537 bp, Prevotella sp. CAG:617
atgaatgtgacagctgttattcagaaatattatcctgaggataatcaattgcggcgcatcctgatgcgtcatagtagcgacgtggcccgcaaggccgttgaggtggcccggcggcaccctgagctgcaactcgacgagcagttcctgcacgacggtgccatgcttcacgacatcggtatcttccttactaatgctccggccatctgctgcatgggcacagagccttatctgcttcatggcaagctgggagccgatttgatgcgtaaggaaggtctgcctgacattgcacgggtttgtgagcgccataccggcacggggctgaccgaggacatcatacgtgcgcagaatcttcctctgccacccggtgactacagacccgaaacacttgaggaacaggtaatttgctatgccgacaaattcttttcgaaaacacatctcgagcgggagcgtaccgtggaacagacggtcaaaagtttgcagaagtatggccgtgcatgtgtggagcagtttgaagcctggcaaaagatgtttggttaa

SEQ ID NO: 1100 - DNA, 717 bp, Prevotella sp. CAG:617
atggaagacaaattgaaaattcttctttgcgaagatgacgaaaacctgggcatgctgcttagagaatatctgcaggccaaaggatacgaaaccgaactctgccccgacggtgaagccggataccgtgcctttgccaaaggcaaattcgatatgtgcgtactcgatgtcatgatgcccaaaaaggacggcttcagcctggccaaggacatccgccagaacaatgccgagattcctatcattttcttaacggccaaaacgctgaaagaagatatcctggacggtttcaagattggtgccgacgactatatcaccaaaccgttctccatggaggaacttaccttccgtattgaggccatcctgcgccgtgtgcgcggcaaacgcaaagccgaatgcacggtttaccaaatcggtagctttaccttcgacacacagaagcaactgctcacccgtggcgaaaagaccaccaagctcaccaccaaggaaaccgagctgctcaccctgctctgctcacacgccaacgaaattctgcagcgtgacttcgccctgaaaaccatctggattgacgacaactacttcaacgcccgctccatggacgtgtatattaccaaactgcgtaaacacctcaaggacgacgacaacgtagaaatcatcaatatccacggcaagggatacaaacttattacgccggaacctaccgatcaggttgaggaagcctga

SEQ ID NO: 1101 - DNA, 1020 bp, Sutterella wadsworthensis 2
atggccagctacaaagtcggcattctcggcgccacgggcgccgtcggcgaacagatgcgaatcgtcctcgccgaacgcaagttccccatctccgaactccgcctcttcggctccgcccgctccgcaggcaaggtgatcaactacgagggccaggacatcgtcgttcaggaagccagcctcgaggccttcaagggccttgacctcctgctcggcgccgccgacaatcccgtcgccaaacagttcctgcccgaagccgcgaagatgggcatccacgtcgtggacaactccagcgccttccgccttgatcccgatgttccgctcgtcatccccgaagtgaaccacgaggacgtgaagctctccaagggcctcatcgcaaacccgaactgcgcgaccatcatcggcctcaccgccgtcaactcgcttcaccgccacgcccgcatccgccgcatggtcgtctcgacctatcaggccgtctccggcgcaggcaaggccggcatcgacgcccttgaggccgaagtcaaggccgccaacggccagcgcgccgaaggctcctgcttcccctatccgatcgcctacaacctgatcccgcagatcggcggcttcaacgaaatgggctactcctcggaagagatgaagatgcagaacgaaggccgcaagatgctccacgacgagaccatccgcttcgcctgcacctgcgtgcgcgtgcccatcatccgctcccactccgaggccatcacccttgagttcgagaacgacatcacgcccgacaaggcccgcgagctcctcgccgaagctcccggcgtcgtcctctgcgacgatccgaacaacggccagtacccgatgccgctccttacgagcgaccaagacctcgtctacgtcggccgcgtgcgccgcgacctttccgccgacgccgcgtccttcaaccgctcgctcacgctcttctgctgcgccgaccaggtccgcaagggcgccgcgacgaacgccgttcagatcgccgagctcatcttcggcctgaagtga

SEQ ID NO: 1102 - DNA, 1095 bp, Sutterella wadsworthensis 2
atgctgagcgccgccgacagcctgatgtgggacgccctcgaaatcggtccgcagtggattctgcgcgagaccgaagacgtgacgcttgccgaaaccgcgcttcgcgccgagctcaggcagcccgcaccggccgttcgctccgccgcgcccgctgctccttcgaggcctgcgccgcttcccgccgcacgatccaccgcactgccgccgggaatgcctcccgagttcgcgccccgtcccgcacccgcgagacccgcccccgtcgttcgtcccgtcgccgaaccgatttcaagcgccccgcaggcgcccgcactcgtgcttccgcccgaagttgtcgccgcctgtgaaaaggctgactgggcgacgcttgaagggcttgcaggcgcatgcacctgctgctcgatggccaaaagccgccagcatgtcgtcttcgccgaaggcggtcccgggatgcgcattgcgctcgtgggcgaggcgcccggcagcgaggaggaccttcagggcattccgttcgtcggcaagtcgggccagctgctcacgcagatgctcgagagcatcggcatcgagcgccgccgcgacatcgcgatcatgaacgtgctcaagtgccgcccgccgggaaaccgcaatcccgcgcccgccgaggtggcctgctgcgcaacctatctgcgcaggcagcttcttctcgttcgccccgacgtgcttctcatcatgggacgcttcgccatgcagacgctgctcggtctgggacccgacgcttcgatcggcagccagcgaggacgcgtgcacgaggtgacgatcggcgacttcggcacgaaggccgtcgtcagctatcatccgtcctacctgcttcgagctcccgatgaaaaggccaaggcctgggaggatctgacgctcttcaggcgtctgatccgcgaagcgggcatcaaactcgctcccgtccatcacacactgacaacaaggacggggtgtttccccaatggcgcaaagacgccgaagaagccgtcgtcatcctcatgggcgagggccggaggtaacatcgtcaatgacgaacaacaacgaggtccgggacgccgtgtcgccggaccgcactctctatga

SEQ ID NO: 1103 - DNA, 1176 bp, Sutterella wadsworthensis 2
atgagtcagactcagatcattcttatcgtggccgccctggtggtcattgccttcttcttctggcgctcgatgcgcgaggagcgccgcatgcgcgcaagccgaaaggcccgcctgcaggcgggaggcgacgttcgcaaggacgtgctcgccgaagagaagcccgagcctcgcgtcgagcctcagctcgaggacatggtggacgacgacgagccgcacgaggcggttcagtctgcctccagggacgaccttccgtctgaaaagccgcccgtctacgagcgtttcgccgaggagcagaaggcgcgccttgagcgcgaggccgcccgcggcgggcgaaaggcaggccgcatcgccggcatcgaaaagccgcccgtcgaccacggcatccagtgggtgctcgacgtgacgccctatgaaggcaagaccttcccgctcggttccatggactcccttgtcacgcagatccgacagctttcgctgccgctgcccgtgtcgctttgggcgaagtccgctgaggacggcctctactatccgtccgaatgcctgcctgcggaggccgttcacatcgtcgcgacgatcctgatcgccaatcgtgccgccgtgcttgacgacgtttccgcctcgagcttcctgcaggtgctcgagcagactgccgcccagaacgacgttgacgtgcgcacatcctgcgacatcaagacggcggtctcgacggctgttcagatctcccgcttcatccactactacgacaagctgattgaggtttcgatcgtccccgctccgcgtgaggagggcctgacgctcgaggaggtgacgaaggttgccgagggcgcgggcttcgtcagcgcgagcggccgttgggagcttcgaatcgacgaaggttccagagagcctctgatgacgctctcgctggcgggtgccgactcctcccagctgcgcctttcctttgacgtcccccttgccaacgtgccgcgcggcgacctcaagcgcttcttccagcttgcaaaccacatcgcctgccatctcggcggcgtctgggtcgacggcgcgggcaaccgcatcgaggctgcaggcggcctgatccttcaggacgagatcgagcatcaggacgcgcagatggccgccagcggcgtgcgtcccggctccgagcgcgcaaggctcctcttctcgagaagcgcctga

SEQ ID NO: 1104 - DNA, 402 bp, Sutterella wadsworthensis 2
atgtcgcagtttctcattgacaacagcctgctgatcgtcgtgatcgcggtttccgtcctcggtcttctcattcccgtcatcaacacccgccgctacgctcccgaagtctcgcccgctcaggcgaccgagctcatcaatcgccagggtgcccagatcgtcgacgtccgcaaggcggccgacttcgcgaagggacacatcgccaacagccgcaacattcccgccgaccagatccagaacgaattcggcaagctcaagcgcgagcgccccgtgatcctcgttgaccagaccggcgcgggctcccgtcccgtcgcccgactgcttcgcggcgtgggcttccaacgggtgaccatcctagagcgaggcatcgtcggctggctgcaggccaagatgccgcttgaataa

SEQ ID NO: 1105 - DNA, 648 bp, Sutterella wadsworthensis 2
tcgcgccgaatttctatgaaagatctgtccgtctacgttctggtgagcttcatcgcctgcgtcacacccggctcgggcgttctctacaccgtcacgaacggactgcgcggcgggctccgcacggtccttgcatctccgctcggcaccacgctcggcgtcggcctgatgtcgctcatctccgcgacgggcctcggcgccctcatcacctcatcgcccgcactctatgcaggcctgcagctcgtttcggccgccgtgctcttctggctcggttggggcagctggaacgcaggcgcagtgcgccttgacaagctaggcaggcttgagtccaacgactcgctcaccttcagcagcatcttcaagggcgccctgtacgttcaggcgagcaacgtgatgctgatcgtcttcctgctctcgctcatgccgcagttcatctcgcccgaggatgactacgtctcgcgcgtcacgctcctctcggtcctcttcgtcggaatctgctttctcgtacacctcggttacagcgccattgcggcggtggcccgcaagtggcttgcaggcccgaacttcagcatctggctcaaccgcgtcagcggcgctctcttctggcttctcgggctgagcgtcatctggaacgcactcttcaaccgctag

SEQ ID NO: 1106 - DNA, 954 bp, Sutterella wadsworthensis 2
atgatcaaaggcgaaaagaacaacatcgacctctcattcgaggacatgcagtttctgttggcgctctatgaaacgcagagcctcacgcagacggcgggcgacatgaggctcagcatgggcgcggcctcgcgcaggctttcgcatgtgagggaggtcttcggcgacgagctcttcgtgcgctcgggtttgtcgatgctgccgacgagccgcatgcgcgagctcagggaccgccttgccgagctcgtggaccagacgcgtcgacttctcaatcccgagccgcttgagttgcacgagatgaaccgcgtggtgcgcttcatttcagccgacaacggcatcgccacactactgagcgcagcggtcgagcgcttctacaatgccgttccgaacagccgctttgcgatcgagccgctcgacgtgagggtgctcgagaggcttcgcgccaacgaggccgacatggcattctttcctgcgacggaattgccgcccgactttcactcgctcaggatctaccgctcgaaaaagggcattctcgtcagggatggacaccccgtgatcgaggcctacgagaaggcgggcgtcatgacctgggagttgctcaaccgttggcccgccgtctgtgtcaccgcggggatgaaggacggcggcgcgaagagtgtcgagggacgcagggtgggcgtggtgctgccttacttcctgaccgttccctatgtggtggcgaggacggactttacgttcgaggggccgctcatcaccctcaggcgcttcatgatggactcgcagtttcagttcaggattctaccgatgcctgaggagtcgggccccttcgagccgaggctcgtctggcaccactgcagccacacggaccccttcctgcagtgggtgagggggctcgtggtggatgctgcaagaagcgaggcgaggctcctgggcgtgatcgacacgtccgaagagtga

SEQ ID NO: 1107 - DNA, 684 bp, Sutterella wadsworthensis 2
ctgaccatcctaagggggcctgtgtccgaccggacgcaggccctcgttctttcgcactcccccgtcttcttgactccttctcgacttctgcggtcggccgttataattgatgattccgaagcccttccaaggggcctccaacatcatcctgccatcccgaggatcatctccgtgacttcccgtcgtcatcttctcggcgccgccctcatcggcgcactcccgctcacaggctgcggcttccggctgcgcggctcctattcgacgccgttcaggaccctgtacctccagatgccggaaaactcgtaccttgcggtgcgtctcagacaggagcttctggcaggatccgacgtcacgatcgtgaacacgccctccgaggccgaagcgatccttgaactcctctccgactcccgttcgcgcgacgtcctctcgatcaacgacacgggccgcgcccgtgaatacgagatcacgctctcgctctccttccgagtgtcgaaccccagcggcatcgactacatggaagccgtgacgctcaccgccagccgagacctcacctactccgaatcggacttcctctcgcgtgaaaaggaggaggcattcctctaccgcgacatggaggccgacctcgtcaaccagctcatgcgccgcatcgaggcgatcaagcccccgaagcaggcgggaggctga

SEQ ID NO: 1108 - DNA, 372 bp, Sutterella wadsworthensis 2
cgattcactagaacattcactgtaaagggtgatgaaatgccgaaagtgacagtgctcccccacgaaacgctttgcccggaaggcctcgtctttgaggctgctacgggtgagaacctggcccgcgcgctccttgcgcacggcgtcaagatcgagcatgcgtgcgaattttcgtgcgcctgcgccacctgccacgtgatcatccgcgaaggcttcgactccctcgaggagcccgacgacaacgagcttgatcatctcgacaccgcttggggcgccagcgtgctctcccgtctctcctgccagacgaaggttggcgagggcgacatcacggtcgaaatcccgaagtacagccgcaaccacgcacgcgaggagtaa

SEQ ID NO: 1109 - DNA, 1245 bp, Sutterella wadsworthensis 2
gcaccgacgatccgttccaaaaaaggattcatgatgaagctgcccgtttaccttgactactccgcgacgacgccctgcgacccccgcgtggtcgacaagatggttccgtatctctacgagaagttcggcaatcccgccagccacagccacagctacggctgggaggccgagaaggccgttgaagaggcccgcggtcacgttgccgccctcattggcgccgatccccgcgagatcgtctggacgtccggcgcaacggagagcgacaatctcgccatcaagggcgccgcgcacttttacaaggacaagggccgtcacctcatcacggtgaagaccgagcacaaggccgtgctcgactccatgcgccatcttgagggcgagggctacgaggtgacctaccttgacgtcaaggaggacggcctcatcgacatggacgccttccgcgcggccatccgtcccgacacgatcctcgtctccgtgatggcgatcaacaacgagatcggcgtcattcaggacctcgagacgatcagcgcgatctgccacgagcacggcatcatcttccactgcgacgccacgcaggccgccggcaagatggacctcaacgtcgaccgcctcaaggtcgacctgatgagcctctccggacacaaggtctacggcccgaagggcatcggcgccctctacgtgcgccgcaagccccgcgtgcgcatcgaatgccagatccacggcggcggccatgagcgcggcatgcgctcgggcacccttgccacccaccagatcgtcggcatgggcgaggcctatcgtcttgccaaggaggagatggagacggagatgccgcgtcttgcgcgccttcgcgaccgcctctgggacggcatccgcaacaacattcccgaggtctacctcaacggcagcatggagcaccgctccccgcacaacctcaacgtgagcttcgcgttcattgaaggcgaaagcctgatgatggccatgaaggacatcgccgtctcgtccggctccgcctgcacgtccgcctcgctcgagccctcctacgtgctccgcgcgctcggccgcgacgacgagctcgcccacagctcgatccgcttcacgctcggccgcttcacgaccgaggaggagatcgactacgtgatcaagaccctcgtcgaaggcgtcacccgcctgcgcgagatgagcccgctctgggaaatgcaccagcagggcgtcgacctcaatcaggttcagtggtccgaacactga

SEQ ID NO: 1110 - DNA, 1029 bp, Sutterella wadsworthensis 2
atgaccggaaggcgcccgccgcttttcggttttccctttattagagccgtccgccaacgtctggacgacggacattcacagacattcagattcatcatcatgtccaatttcgaacgctgcgtcatcgccacccgcgaaagcccccttgccatgtggcaggcccttcacatccagtccgtgctgcgcgcccgctatccgtccgcgagcgtggagctcctcggcatgacgacgcgaggcgaccagatcctcgaccgcacgctctccaaggtgggcggcaagggactcttcgtgaaggagcttgaagtcgccatggaggcgggcgaggccgatctcgccgtgcactccctcaaggacgttccgatggagcttcccgagggcttcgacctcgtcgccgtgagcgaacgcgaggatccgcgcgacgccttcgtctccccgaagtacgcgagccttgacgacatgcccgccggcgcccgcgtgggcactgccagccttcgccgcgagctcatgctccgcatgaactatccgcaccttgaagtgcttcccgttcgcggcaacgtcggcacgcgcctgcgcaagctcgacgccggcgaatacgacgccctcgtgatggcctccgccggcctcaagcgtcttgagctccacgaccgcatccgctcgatcattccggccgaagtgagcctgccgtctccgggccagggcgccctcggcgtcgagatccgctccgacaacgccgtcatgcacgaggctctcgccttcctcaatgacccgcacacccgcgcctgctgcacggccgaacgcgccgtctcccgcgcgctcggcggctcctgccaggttccgctcgccgcctacggcatcatcgagggcggggagctttacctgcgcgccctcgtgggcaaccacaagaccggcgaagccatccgcagcgaggcccgcggtccctggacggagcctgaagcgcttgcggcgcgcgtggttgaggacctccgccgtcagggtgcagacgctatactgaaggctgttctcggttaa

SEQ ID NO: 1111 - DNA, 1482 bp, Sutterella wadsworthensis 2
atgacgacattcacatcctcgcttgagcggctttcagccgctcaagcgcttttttactcgggcacgggactcgacgacggcgcgcttctcaaggtgctcggccgcatgacgccggcaggcgcggactgggcggacatctaccttcagcagaccgtctcccgttcctggattctcgacgagggcgccgtcaagacgggcggattctccatcgacaggggcgcaggactgcgcaccgtctgcggcgagacctccacgctcgcctacacggacgtactcacgcccgtctcgcttctcgatgctgcaggcaccgtggtcgcctcggccgcctactcccccgagggcgccccaggcgtcgtcatccccgcctgcctcacccccggctcctacaggccctgctgcgggacggaggacgcatcctcgaacatgcacacgccacaggcgcttgagctcatccgcgaggccgacgccctggcgcgcgaggcggatcccagggtcacagacgtggtcgtcacccttcagtgcgagacggatgcaacgctcctctgccgccttgacggcctgctttcgggcgacatccgccccatggtctacctttcgatctcggtcatcgcctcggaaaacggcaggcgcgagcgagcctcggccggaggcggcgcacgcgcggggcttgagttcttcacgcgggagcgcatccgtaagtgggctcgcgacgccgtctcggaggcaatccacaatctcggcgccgcacccgcacctgcaggcatcatgcccgtcgtgctcggtccgggctggcccggcattctgctccacgaggccgtgggccacggacttgaaggcgacttcatcagaaagggcacctccgccttcacgggcaggatcggcatgcgcgtcgcatcccccggcgtcacggtcgtcgacgacggcacgatcggactagcgcgcggctccatctgcgccgacgacgaaggcacgcccgccgcgcgcacgacgctcatcgaagacggcatcctcacgggctacatgcacgacctcacgagcgcccgcgttctcggaaccgccccgacgggcaacggccgacgcgagagcttcgccacgctgcccctgccgcgcatgaccaacaccttcatgacgcccggggactgcgatcccgccgacatcgtcaagtcggtcaaacgaggcatctacgcgagcaacttcagcggcgggcaggtcgacatcaccaacggcaagttcgtctttgcgatgagccgcgcctggatgatcgaggacggcaggctcactcaccccgtgcgcggcgccatgctatcgggctcgggtcccgaggccctcaagcacatcccgctcatcggcaacgatcttgcacttgacgagggcacgggacagtgtggcaaggacggccagcaggtacccgtgggcgtaggcatgcccaccatccgcatcgatgcgctgaccgttggcggcactgcggaaaatgccgtttaa

SEQ ID NO: 1112 - DNA, 579 bp, Sutterella wadsworthensis 2
cctgatctccgaccccccagcgccgcaggccaagcctgcggcggcaaccaggaagtgaacatgctgcagaagtacgacgactccaatcctgctaatcagatcgaattgaccagccgtttcgtctggtcccatccggcacacatgatcgccacgttctttggtgcgggtcttccgtccaaggcgcccggcacctacggctcgctcgcgggcgcgctctccttcatcgtgctctctccggccatgacgaccgccgcgtgggtgattctctcgatcgccctcttcatcgcgggcgcctgggcagcggggaaggttgcggccgatctcggcgtcgaggaccacaagggcgtcgtcgtcgacgaggtggtcggcatctggcttctcttcgcgttcctgcctgcgggcaccctctggtggatcgcgggctttgcggccttccgcttcttcgacatcatgaagctgccgccggtcgacatcatcgatgaaaagatgaagaacggcgcgggcgtcatgctcgacgacgtggtcgcggccttctacgcctgggtcgtcgtcagcattctcggctggctcttcggctga

SEQ ID NO: 1113 - DNA, 786 bp, Sutterella wadsworthensis 2
atgcttcagtacgcacgtgaactcatcgcgaccatcatgcagaaggaccccgcggctcattcccgctgggaggtcgtcctcgcctatccgggctttcacgccgtgatgatccatcgtctgtcgcactggtgctggacacaggattggaagacggttgcgcgtgtcgtctcgcacgcgggccgctttctgaccggcattgaaatccaccccggcgccagaatcggccgtcgcgtcttcatcgaccatggcatgggcgtcgtcatcggtgaaacggccgaggtgggcgacgactgcacgctctatcacggcgtgacgctcggaggtacgagcctcgccgaaggcacgaagcgccatcccactctcgaacccaacgtcatcgtcggcgctggagccaaggtgctcggtgccttcaccgtgggcgagggcgcccgcatcggttccaatgccgtcgtcatcaagcccgtcgccgccggcgcaaccatcgtgggcgtgcccggccgccaggcgggcgagaacaagcccgacgaagcgaagcgcttcgatgcctacgccgttgaaaagagcgacgacccgtactccgtcgccatcaaggagctcgtgcgcgtgacgcacgagcagaacgccgtcatcgagaagctgagcgagcagatccgcgagctcggcggcaagggcgtcgaggacatcccgaaggtgaacgtggggaacatcggcgtctctacgcgccgtgcccgtcaccataggcagaagaaaaaggctgtcgagacgccgcaggatcctcagtcctga

SEQ ID NO: 1114 - DNA, 1089 bp, Sutterella wadsworthensis 2
atgtctcagacgaacgaatcgtgcacccgctttgcgaaacttcttggcatcgaggtgcccttcctcaatgctccgatggagggcattgccacgcctgagctcgtggcggccgtgtccgaggcgggcggtctcggcgtcattcccgccgccggtctcgctcccgacgagatccgcgcctttgccgcgcgcgtgaaggagctcacgcagaagcccttcgccgtgaaccttgctgtgcccgtcgacgcgcccgcggatgcggcggaacgcttcgagcgtttcggcgacgccgtctcgatgctgctcgaggagctcgagctgcccgcaggcgaaggcgcctcctatgccgaacgctacgatctcgagggctgcacccgccccgacttcttcgagcagttcgatgcggcgctcgaggtgaggcccgcagccgtcatctcgtccttcggcggcttccgcgagcccgaggaggagaagctcgccgaactcggcatcgtcaacatcggcaccgccacgacgctccgtgaggccaaggtcctgcgcgccgcgggctgcggcgccgtcatcgttcagggagcggaggccgcgggcccgcgcctctcgtttgaggatcccgaggacgctctcgtcggtctcatgtccctcgtgcccgccgccgtccgcgcgacggggctgcccgtcatcgcggcgggcggcatcgcctcggccgagcaggtgaacgcacttctggccatgggcgctgcaggcgtgtccgtcggcacggccctgctgacgacggccgagtccagcgcctgcgacgcgcaccgctactacgcggagttcggcacggcctgcgacaccgtactcacgcgcatctacaacggcaggctcagccgcgtgctcagaaacgcgctcgtcgaggccctcgacgactgggagctcatgacggccggctacccctctcagaaggccctgatgggcccccttgacaggtgtgcctccgaagtcggacgcaacgacctcgtcatgctgcctctgggacagtccgcaggccgcagcgcctacaggcggactgccgactgcgtgcatgcgctctttccccgtcgcgcagactga

SEQ ID NO: 1115 - DNA, 954 bp, Sutterella wadsworthensis 2
atgaagaaatttctcgttgcttttttgatctgcttcagcatggtgacgaccagcatggatgctgacgccgccaagcgcttcggcggcggaagctcctttggccgtcccgcaccgactttcagccagaaggctccggcgccgtccgccgcgcccaaggcgccccaacagcagaatgctgccggccagcagcgccagcagcccaacgccgctcccgcgcagcaggcccagcgtccgtccatgatgcgtagcgtcctgacgggccttgccgccgcactcggcatttccgcgcttctatcgctgctcggcattgagggcgcaggcctggtgagcctcatcacaggcattctcgctgccgtggcgatcttcttcgtgctgcgcatggtgctcggcatgatgatgcgcaagcgtgtccagacctcttccggctatgccgagccgattcagtacagcgacgtgcccaaggatgagccgcagcaggccgcccgtacgtacgaagcgcccgcggctgcttccggcgcccgcaccggtagcgtgatggaccagttcgcaggcggtgccgctcaggatgacggcgtgcgcgacatcacgcccgacgactttgaccgcaaggccttcctcgagacggcgctcgaacagtaccgcaagctgcagaaggcctgggatacgggcaacgtgatcgagatctccgacttcacgaccaccgaggtcttcactgccatcacgcaccagctgcgcgaacgcggcgctcaggcctacaagtccgacatcaaggagctcaagaacgagctgctcggcatcaccgagtccgacggcgtctacctcgccaacatccgctttacgggcaggatcgaaatcgatggtgaagtcgaggagttcgatgagacctggatcctcgaaaagcccgtcgaaggcgacgagggctggctcctcggaggcattcagcagaacgcttga

SEQ ID NO: 1116 - DNA, 579 bp, Sutterella wadsworthensis 2
atgatgagaaaggccgcatttctcgaccgtgacggcgtgatcaacatcgatcacgcctacgtccacaagatcgaggagttcgactgggttccgggcgtccttgaggccgcccgcgccctctcggaagcaggctacctgctcgtcgtggtcaccaaccagtcgggcatcggacgcggatactacgacgaagccgctttcacccgcctcaccgactggatgaaggcccgcttcgccgaggcgggcgcccccgtcgcaggcgtctacttctgtccacaccatcccgaaaaggcgaatccgccctaccgcatggactgcgactgcaggaagccccgtcccggcatgcttctcaaggctgccgaggacctcggcatcgacctttcgacctcgatcatgttcggcgacaagccgggcgacatgacggcaggccgcgccgcaggctgcgttgagcgcattcagctcggcaccgacggccttgaggcccccgttccctccgcggacgccaccggggccttcagaaatctggccgacgccgtcgcctccccctggttcgcacaactcaagcaaaggagtctcccgtga

SEQ ID NO: 1117 - DNA, 618 bp, Sutterella wadsworthensis 2
atgaagattcgtaccatttttctgctgttcgtcctcattctgatggcggtctttctggtcatcaactggacggcgctctcgaccgtcacggccgtcaacctgatctacaccgaaatccaggctccgctcggcgttctcgtcgtgggcggtttcgccgcggtggtcttcgtgctgctcgtctacatggtctggcagcaggccagcgtcacgcttgagcttcgcgccgcctacaaggaggctcgcaacgcccgcaccgtggctgacgacgccgaaaagagccgctttgccgaaagcaaccgcattctgctcgagcgcattgaaaagctggaggccctcatgacggcccgctccgacgagacgctcaccgccgtccgtcaggaggccgtccgtgctgaagagcgctacaaggctctcttcgacgaccagaagagggctcagggcgagctgaccgcccaggtccagacgcagatcggcgccatggaaaagcgcgtcgtcgagacgctgccctccgccgtttccgccgccgtgccgacgcaggctctggctgaagaagctgaaaagaaggcggacgccgaagaaagctgcgcccgcaagagcgtcttcaaggacctcttctaa

SEQ ID NO: 1118 - DNA, 1083 bp, Sutterella wadsworthensis 2
gtgccccgtcccatatacgctgaaattgatattcaggcgctgaagcacaatcttgcccgccttcgtgagagtgtcggcgatcgcaccctctgggcggtcgtcaaggccaatgcctacggccacggtcttgagaatgccgtcgaggccttcgccgatgcggacggctttgcgaccatcgacctgtgcgacgccgaacgcgcgcgccgcgcgggctggcacaagcgcgtgctgcttctggagggcttcttcgatgaaacggacatcgagccgcttcaggaccttgacgtcgagacggtcgtccactccatgtggcagatcgacattctcaagcgtctccagctgcgtgaggtgaaggttcacatcaaggtgaactcgggcatgaaccgtctgggcttcctgcccgtcgaggtgggcacgatctacgacctcctcacgtccattccgggcgtgaaggtgatgggcgtcgtcacgcactttgccaacgccgagccgagctatctcggcgatgcgcccgcatcggtctcccgacagctcacccgcatgggcaggctcgcgcattccgccacggcggcctgcatggccaactccgctgccatcctctggcatcccgaagtgggaggtgacggcgtgcgtgcgggcgttgcgctttacggcgtgagccctgactcccacatttcctccgaggagctcggcctcattcccgccatgacgctctcggcgaagatcatcgccgttcaggagattgcgccgggcgaggccgtgggctacggctcgcgctggatcgccaagcgtcccacgcgcgtgggcatcgttgcttgcggctacgcggacggttatccacgttcgatgcccgacggctctcccacgtgggtcgagggcgccatcgcgccgctcgtgggcgccgtctcgatggacatgctcgagatcgacatcaccgacatcccgtccgcaggcctcggcagccgcgtggagctctggggcaggcacctgcccgtcaaccgagtggcggtcgctgcaggcacgatcggctatgagctcatctgcgcgcttgcacgccgcgttccgcttcaaatcaagcactga

SEQ ID NO: 1119 - DNA, 495 bp, Sutterella wadsworthensis 2
accgttccgcaacatcctcacatggcacagcaaaccgaaaagacactggaaatctggaccgacggcgcctgcaagtgcaaccccggtatcggaggctggggcgcctacatggtctggggcgcgcatacccgggaaatgtacggcggcagcaagctcacgaccaacaaccagatggaactcacggccgtcatctcggcgctctcggctctgcgccgcaagtgcccgatcatcatccacaccgacagttcctacgtgaaggacggcatcacgaagtggatccacggctggaagcgcaacggttggcgaaccgccgacaagaagcccgtcaagaatgcggagctctggcagcagcttgacgaacttacctcgcagttcgacatcgaatggcgctgggtgaagggacacgcgggcgacccgggcaacgaaaaggcggacgagcttgcgaacatgggctgcgaagtcgcggccggcacgcgtcccgctccgaactattga

SEQ ID NO: 1120 - DNA, 714 bp, Sutterella wadsworthensis 2
atgaaccacatcgtcaaaagctacgaccgcgacctcgaggaggtcctcggcgaggtgatcgccatgggcaggctcgtgcgcgagcagctcgtcaaggcggccgacgccctcgagaagctcgacgccgacgaagcccgctccgtcatgacccgcgacgctgaggtcaacggctacgaggtctccgtcgacgcgaagatcgaatccgtcttcgcccgccgccagcctgccgcccgcgacctgcgcacgctcatcggcatgagccgcgtctccgtcgacttcgagcgcatgggtgacgaaatccgcaacatggcaggcagcgtcctagagctcaagggactcgacgactctctccttgagaaccgctccgccatcatcatggccgtcaacacggtcgcccacatgatcgacgactcgatcctcgcgctctcgcgactcgacacgaacctcgcccgcgaggtcatcgcacgcgacaggctcgtcgacgacgtctaccgcacgacgctcaggagcctgatcgtgcacatgatgcaggatccgtcctccaccgagggcgccatcgcgctcacttggatcggccgctcgctcgaacgaacgggcgaccacgtgaagaacgtctgcgaggccgtcatctacattgaggaaggtgcggacgtgcgtcacgagttctatactggcaaaatggaatcctgccgaaacggctctgccgaaggctga

SEQ ID NO: 1121 - DNA, 1113 bp, Sutterella wadsworthensis 2
cgtcaggcgttcccctcggatgaggatgcgcggccgccatggaccggacgggtgatcccgcccggttttacaacatcaaagtcgagatcagtgaacatgcaggatctttccgaactcatcgagtccgcgcgtcaggacttcgctcaggcagagcagcccgctgccctggaagacgccaaggccaagtacatcggcaaaagcggcgccgtgacggctctcatgaagagcctcggccagctcgcgcccgaagagcgccgcgcccgcggtcaggaaatcaacaaggccaaggccgctatcgaagccgcgctcaacgcccgccgcgaacagctcgctcaggccgccatgcaggccaagctcgccagcgaagcgatcgacgtgacccttccgggccgcgtccgcaccgaaggcggcatccaccccgtcatgcgcacatggatgcgcatcgaggagatcttccgctccatcggcttcgacgttgccgacggtcccgaaatcgaaagcgactggttcagcttcacggccctcaacaacccgcccaaccatcccgcccgctccatgcaggacacgttctacgtggaccgctgcgacgaggaaggccgccagctgccgctgcgtccgcacacctctccgatgcaggttcgctacgcccgcacgcatgaggctccgatcaagatcatcgccccgggccgcacctaccgcgtcgactccgacgctacgcactccccgatgttccatcaggtcgaaggcttgtggatcggtgacgacgtgagcttcaccgacctcaagggcgtctacagcgacttcctgcgccgctttttcgagacggatgacctcgtcgttcgcttccgtccgtcctacttcccgttcaccgagccgtccgttgaagttgacatgatgttcacgagcggcccgcgcaagggcaagtggctcgagatctcgggcgccggcgaagtgcacccgaacgtcgtgcgcaacttcggcctcgatcctgaaaagcacatcggcttcgcgttcggctccggcctcgagcgcctcacgatgctccgctacggcatcgacgacctgcgcctcttcttcgaaggcgacctgcgcttcctgcgtcagttcaactaa

SEQ ID NO: 1122 - DNA, 627 bp, Sutterella wadsworthensis 2
caaatattaggggtctatattggtggatcttttgtgataaacttcatttatcgaaactcagatcccgacaggttcgggggagataccaacatgtttactctgcctgctcttccttatgcgctcgacgccctcgagcccgccatgagccgtgaaaccctggaattccactggggcaagcatcatcagacctacgtcaacaatctgaacggcctgatcgccggcacggacttcgaaggtaagtcccttgaggaaatcatccgcacctccacgggcggcgtgttcaacaatgcggcccaggtcttcaaccacacgttcttctggcagggcctcaagccgcagggcggcggcatgcccgaaggcgcccttcttgaggcgatcaatgcaatctggggttcctatgacgccttccgcaaggcctttacggcctccgctgcgggcaacttcggttccggctggacgtggctcgtgaagaatgccgacggcacgctggccatcgtcaacacgagcaacgccggcacgccgctcacgggcgatcagaagccgcttctcgcgctggacgtctgggagcacgcctactacgtcgactaccgcaacgcccgtccgaagttcatcgatgcgttctttgac

SEQ ID NO: 1123 - DNA, 561 bp, Sutterella wadsworthensis 2
atgcgccaggaacagatctacgaagacgacgttgacgaaaacggctaccgcggcccctccaaatcccagctcaagcgcgagcagaacgcgctccaggatctcggacgcgagatgacgaagctcggcgacgagcagctcaagcgcatcggccttcccgacgaggttctcgtggaaatcgtcgaattccgccgcatgagaagcttcggcgcgcagcgacgccagctccagctcatcggcaagaagatgcgcaacatggatcccgtcgccgttcgcgaagcgatcgaccgcgtcacaggcgaatcccgcgccgccgtcgccctgcttcaccgctgcgagacgctgcgcgaccaaatgcttgcaggcgacgaagcgctcaccaaattcatcagcgagcatcccgaagctgacatcccacgccttcgcacgcttgtgcgtacagctcgcaaggagcgcgaggcacagaagccgcccaagagcgcccgcgagctctaccgctaccttcatgatcttctcgaagagcccatcagcctcttcgccgaagacgacgagaacgaagaataa

SEQ ID NO: 1124 - DNA, 846 bp, Sutterella wadsworthensis 2
atgtccaagaaatcacttcaagacctgcgcagggaggtctccggcttcaccgacgaaatccgtcgcgaactcaaggagcacgtatccgagatccgcgagaacctcgatcgacaggtcacgcgcctgcgcgcagaggtcgaggacgtgaaggaggagctcgagcgccgcttcggcaccgacgactcgcacgtcgtattccgcgcgctccccaagccccgtcgcctcaacatgccgctcacggaggtcctcgagcgccgccagacccgccgcaccttcagcgacgagcccctgtccgacctcgacatggccacgatcctctgggcggcggacggcatcaaccgctcgagcggacgccgcaccacgcccaccgcgctcgactggcgcgagaccgacatctatcttctcaagagcaacggcatctggcgttgggtgcccgaaaaaaacggccttctcttctgcgagcttgcggacctcaggagcgagaccttcttcgccgcgccgcacctcaaggttgcgcccgtgcacatcgtctacgtctccaaccgcccgcgcaccgagacgctgatttcacgcctcggcgagggcgtcgttgaaaaactcaggcactccgcctggacacccgaaaagctcgaggaaatgcgcacgcgcagcatgatcatcgacgtgggcgccaagattcaggccgtctatatggccgcagccgccatggacctctcctgcgtcgcccgcacgggcttcgacgcccaccacgtcgagcgcatcctgcgcctgcagaagggcgagtccgttgtcgccatccagacgctcggctacaggccgaactccatcctcgacgccatcaagtag

SEQ ID NO: 1125 - DNA, 1269 bp, Sutterella wadsworthensis 2
atgtcagttactggactgcagaccgaaggtctgaagtatgcaaaggcgattttcgacaccgtccgccgcatgtcggcggacacgcttggcgtttcccgtcagggctacagcgagcttgagacggacgtcctgcactacctgcagggccttggccgcgacatcggccttgaagtccgcgccgacgacgcaggcaacgtctggatgacgatgcccggccgcgaccgcacgcttcccgccttcgttgccggcagccatgttgacagcgttccgcagggcggcaactacgacggcctggccggcgtgaccgccgcgctcacggtcgcttggtggatgcaccgccatcaggtccagctcgagcgcgactacacggtcctcatgatgcgctgcgaggaaagctcctacttcggcaaggcctacgtgggctcgctcggcatgatgggccgcctgacgcagtccgacctgatgctgcgccaccgcacggaggacatcacgctcggccagtgcatctcggcctgcggccttgatcccagcaagctcaccgccggcatgccgatcgtcgatctgaagaagatcgcctgcttcgtcgaactgcatatcgagcagggtccgacgctcacgagcaacgacaaggtccgcgtcggcgtcgtcacgggcatccgcggcaacgtccgccacaagaacgtggtgtgccacggcgaaacggcccactcgggcgccgtgaacaaggagttccgtcatgacgccgtgatggccacggcggcgcttctgagccgcatggataatcactggcaggaatggctcgaccgcggcgaagacctcgtcttcacggtcggcgtcatccgcacgggtgcgaccgccgccatctccgtcattcccggagaagtgagcttcacgcttgacatgcgcagcctgagcgccgacacgtgcgagcgcttccaccagctgctgctcgaagaggctgccgcccttgaaaaggaacgcggcgtgcgcttcgacttcgacaagccgctctacacggcccccggtctcgtcgatcaggccctctccgaccgcatctacaaggccgccgaagacaacggcattccgtgcatgcgcctgccctcgggcgcgggccatgacgccgccgtgatcggcgccgccggcattcccgtcggcatgatcttcatcgccaaccagaacggctcgcacaatcctcatgaggaaatgatcatgaaggatttcatgacaggtaccgacctcctttggcagacggttcgtcagttcgactaa

SEQ ID NO: 1126 - DNA, 369 bp, Sutterella wadsworthensis 2
ggaggcgctcctgaagcgtcttccgaagcagcttgcgcagaccaggggcgagtgacggtgacggtgatggcgaagtttctgcggatgctggtcaggctttatcagctgaccctgtctccgtgggtgggaaggagttgccgattcgttcccacgtgttcaaactatgccattgaggcactcgaaaagtacggtgccgtcaagggaacctatctgaccatctaccgcctgctgcgctgtcatcctcttggagggcgcgggctggaaccggtgccggcgaagttccgctggcgctgctggtgcagagagtgcaggccggaagaacaagaagacaagggatctacggatcttttcaacatccaaaagaagtag

SEQ ID NO: 1127 - DNA, 651 bp, Sutterella wadsworthensis 2
atgccagtcatcaacaacttcgccgacctcaagcaggtcagcaaggccctcaaggaagaggccaaggcccgcgaggaggccgaaaagaagcgtcgtgccgaggaagcccgcaggcatgccgaagcgaaccagttcgccgccgccatggcggagttcggcgtccgcaagatgtcccagaagaagcttgccgacaccaaggctccgaagccccgtcccgtcgccctcaatctcggtacgggcgaggacaaggaacccgagtcgcagatgtcggaccttctcgacgcctccgtctttcttgaaaccgaagacggccgcatgatgcaccgcaagggcgtctcgcccgacattccccgcaagctctatcgcggcgaatggccggtcgaggcggcgatcgacctccacggcatgcgcgtcgacgaggctcgcgaagcggtcgcccgcttcatcctcgagaaccacatgagcgggcgccgctgcctgcgcatcgttcacggcgtgggctacggcagcaagggccagggcgttctgcgcgacatggtccgccgctggctcaagcagcgtcccgaggtgatggccttcgtccagtgtccgcccaacgacggcgacgaaggcgccgtgcgggtgctcgtcacgcagcagaagcgcgactga

SEQ ID NO: 1128 - DNA, 447 bp, Sutterella wadsworthensis 2
caagcgcccgacaacggagcaactaacatggctactatcaaagtcgacgtcgttagcgcggaagagtccatcttctccggtgacgccgagctcgtttcgctgcccggtaagtctggcgaattgggtattctgcctgggcacgtgcccctcatcacgctgatccgccccggttttgtccgcattcatctgccgggcaagaaggaagtggaacaggtgtttgtggctggtggcgtgcttgaagttcagcccgatctggtgactgtgctggctgatacggccgtccgcagcaatgacctcgacgaggccaaggctgccaaggctcttgaagatgcccgcgcacagcgtcagaatgcaacgggcgaaatcgagattgcccgcctcgaagccgagatggccgctctggccgctcagatcgtggcaatcaagaagattcgtcagcagcgttaa

SEQ ID NO: 1129 - DNA, 603 bp, Sutterella wadsworthensis 2
atgatggtgctttactcgggcatgacctgcccgttctctcacagctgccgcttcgtgcttttcgaaaagggctgcgagttcgagattcaggatattgacatgttccagccgatcgatgtcagttccctcaatccttacggtgaagtgccgatccttcgcgaacgtgagctgacgctttaccaggccgaagtgatcaacatgtacatcgacgaccgcttcccgcatccgcagctgatgccgcctgatccgatgcaccgcgcccgcgcccgtctcttcctctacattctcaaccgcgagatattctcccaggtccgcattcttgagaaccgtactctgagcgaagagatgcacgacaatgcccgccacaagctgcacgaccagctttccgtcatcggcagccgtctgacgaacggcatgtacctgcttggcgaagagttctcgttgctcgacatcatgctcgctccggtgctctggcgcctgtcccactacggcatcgagctgccgcgcagcgccgcgccgctgatgacctacggcgaacgcctcttctcgcgccctgccttcatcgactcgatgacgccgtccgagcgcgtgatgcgccgctga

SEQ ID NO: 1130 - DNA, 978 bp, Sutterella wadsworthensis 2
atgatcgaagtactgaagctgggtcccgtctgcgtcgacgttgagggcctttcactcaccgagcatgagcgtgggcgcctgcgtcatccgatgacgggcatggtgatccttttcacccgcaactacagggaccgggaacagctcagggcgctgtgcgacgaaatccacgccgtgcgtccgggcatcctcatcagcgtcgaccatgagggcggccgcgtgcagcgcttccgctccgaattcaccgatgtgcccgccatgtccgagatcgcggcgcacgaggacgccgaggcgcgcttcgaggcggccggtctcgtgcttgccgccgagcttcgcgcctgcggcgtcgacttcaccttcgcgcccgtgctcgacgtcgactacggccgatcggccgtgatcggctcgcgcagccttggcacgacgcccgagctcgtgacggcgcatgccgccgcgctcattcgcgggcttcgcaggggcggcatggcctcctgcggcaagcattttccggggcacggctgggccgaggccgacagccatacggcccttcccgaggacgaaagggatgcggagagtctgatgcgggacatgctcccctacggcaaactgcctgaacttgcatccgtcatgacggcccatgtggcttatcatgcctttgagggggaggtcgccaccttctcgaggcgcctcctgcaggacgagcttcgagaacggctgggctttcgcggcctcgtcttctcggacgacctcagcatgaagggcgccgcgggcggcagcgtgacggagcaggccgagaaggcgcttgcggcgggctgcgacatggtgctcgtatgcaatcgtcccgacatggccgacgagcttctcgcgaacctgcgttggactcgaacgcccgaattcgatgcgcgccttgcggggctcgcgcccgccgcggcttgcggcggtgcggagcttgaagaggcccgctcccttctggcggcctga

SEQ ID NO: 1131 - DNA, 672 bp, Sutterella wadsworthensis 2
cccgtcatggaatttgatttatccctgatcgtcaacagccttcccctgcttctcaagggcgcgggcctgacgcttgaaatcacggcgctcgccgtgggtctcggcctgatcatcggccttttcctcggtcttgcccagctttcgaagaatcccatcttccgttggcccgccaaagtctacgtcgacgtgatccgcggcacgccgcttctgatccagatcttcatcatctacttcgccctgccgaacatcatcggtgagcgcatcgacccctacattgccgccgtcgcggcctgctcgctcaactcgggcgcctacatcgccgaaatcttccgtgcgggcatccagtccatctcgctcggccagatgcgcgccggcctctcgctcggcatgacctacccgcagacgatgcgctacatcgtgctgccgcaggccgtcaagcgcatcatcccgccgctcggcaacgagttcatcgccatgctgaaggactcctccctcgtctcagtgatcggcttcgaggaactgacccgctccggccagctcgtcattgccgaaacctacggcacgatggagatctggacctgcgtcgcgatcctctaccttgtcatgacgctcaccatcagccagctcgtcggctggcttgaaaagcgctaccgtctgagcgacgagcgctga

SEQ ID NO: 1132 - DNA, 1152 bp, Sutterella wadsworthensis 2
atgtctgatcgcgattattacgaggtgctcggcgtcggcaaggacgcttccgccgacgacatcaagaaggcctatcgtcgcatggccatgaagtaccatccggaccgcaatccgggtgacaaggtcgccgaagagaagttcaaggaaatcggtgaagcctacgccgtgctttccgacgaccagaagcgcgccgcctacgaccgctacggcaaggcgggcgtggatcccagcgctgcgggcggtcccggcggcttcggtggctttggcaacatgaacggcgccgacttccagagcgccttcggcgacatcttcagcgacatcttcggcggtggcggcatgcgcggcggccgtgccgcccgcgagcagggcatccgcggcaacgacgtgcgcttcgagctggaaatctcgcttgaggacgccgccatgggccgcacgatggagatccgcgtgcccgcctgggacgagtgccagtcctgccacggtacgggctgcaagcccggcacgtctaggaagacctgtccgacctgtcagggccatggcgccgtgcgcgtctccaacggtctcttccaggtccaccagacctgcccgaagtgccatggttcaggccagatcatctccgatccgtgcccgaactgccagggcgtgggcaagatccgcacgaccaaggtcgtggaggtcaagattcccgccggtatcaacgacggccagcgcatccgcatgtcgggccgtggcgagccgggcatgaacggcggagagtcgggcgacctctacatcgagatctcggtcaagccgcacgacatcttctcgcgcgacggcgacgaccttcacaccgagcttcccgtctccttcgtgacggcggcgctcggcggcgaactcacggttccgacccttgagggcgaatcgcgcatcacgctgcccgaaggcacgcagtccggcaagaccttccgcctgcgtggcaagggcgtgaagaacctgcgcacgggcgagcccggcgatctcttcctgcacatctccgtggagacgcccgtcaacctctccaccaagcagaagaacctgctccgcgagttcgacgcctccctcaaggaaggcggcgacaagcacaatcccaagacgcagggtttcttcgaccgcatgaagagcttcttcaagtaa

SEQ ID NO: 1133 - DNA, 1089 bp, Sutterella wadsworthensis 2
atgaaagtttacggtgaacctacaagaagcatccgctcccttgacaacggcacggccgtcgagatcgtcgatcagacgctcctgccgtatcgctttgaaaagcgggtgctgggcgactggcgggactgcgtggaggccatccgcaccatgcgcgtccgcggcgctccgctcatcggcatcaccggtgcgtgggccgtcgtgctcgccgtcaaggagaatcccgagaacgacgccctgctcaaggccgccgaagtcatcgccaatgcgcgtccaacggccgtgaacctttcctgggccgtgcgcaggatgatgagcacgcttctgccgcgcgaccccgcgcttcgcttcgaggccgccgtgaagacggccgaggcgatgacgcaggaggacgtgatgacctgccgcgccatcggcgaggcgggcatgacgctcatctctgacctctacgccaggctgcgccgtcccgtgaacgtgctcacgcactgcaacgcgggctggcttgccaccgtcgactacggcacggcgctctcgccgatctacatggcgttcgagcagggcacaccgctgcacgtctgggtcgatgaaacccgtccccgcaaccagggccttctcacggcctgggagctcggccagcacggcgtgccctacacgctcgtcgccgacaatgcgggcggccagctcatgcaacagtgcgacgtcgatctcgtgatcgtgggcgccgaccgcattacgcgtcgcggcgacgtggccaacaagatcggcacctacctcaaggcgcttgccgccgtcgacaatgaagtccccttctacgtggccgcgccatcctcgaccatcgactggacgctcaacgacggaaagcgcgagatccccattgaaaaccgcgccgccagcgagcttctcgtggtcaacggcgtgggcagcgacggcgaaacgcgcaccgtccagatcgccgcacccgaagtcgccgtggccaaccccgcgttcgacgtcacgcacaaccgcttcgtgacgggcatcatcaccgagcgcggcatcgtgaagccgacggatctgaccgcggtatttgccgacttattaccaaaggcctga

SEQ ID NO: 1134 - DNA, 1773 bp, Sutterella wadsworthensis 2
atgagtgcggtattgctgaatccagagtctgcacggagcagaatcacggtgttgggccgttccgccctgatgcactcgaccaggggcgaagcacctcgagcatgccttgcggccgtcaattgtgcagttgtacacgccgatcggatagccctcgatgaaggccagcaacgacagatagcagttgcaatcgtagtgcgcgttgaattttcgtcctttctgaagaccatgggtttcgacgggcgtgttgtccacgtcgatgatgaggacctttttgcgggggccgtggcgaagaaagaagttccgcaaaaattcattgcctctgtcgagcagctcctcaggaatctcgcgctcaaatcggtagagcgtggagcaggaggccagcacattgcccacagcagcccgaaagccagcatcaacggcaaggaaatcgtgatcattgagatcctcgtatcccgccatcagggcatagaagcgctgtttgatgagatcctcgttcgagtaaagattggctcgggaagacttcggggaacgaacagcttgaagacagtcgccgaaacatgcaaaaagttcatcgaagaagcggcacttggagagccagtattggctaagaatgaggccggcgttctggaggatcggagcgggttccttggaaacacgaatttcgcgtcccaaagagtctcaaatttgggtagaataataggacatggtcatttttgttttgggtgtaaacgaaattatagcaaggatgaccattccttttggctgtcgcacagccgtttacaagaaaaaccggcctgctcgcaggtcggtttttttgtggctcatgcaaaattcgggctcggacgatggtcgttccgggattggaggaaattctcgatgtcgcatcttttgcaggccgttgtcggcgcagccgtcggcgacgctcttggcgtgccctatgaagggaaggaaagggacacctacgtctgcgagaacatgcagccccttggttggcatgaaaagcccgtcggtttctggtcggacgatacggccatgatcctggccgagctcgacagccttcgtgaaaggcagggctacgatgccgaggacgtgatgatgaagttcgaccgctggctgcacgagggggcctacacccccgacggcaaggcctacggctggggccgcacgacggccagggccgtctcgcgccatcgcagcggcacgcccgccgacatctgcggcggcggcgacattctcgacaacggcgcaggcgcactcatgcgcatgcttccctatgcgcttctcaacagccccgaccggctcgagatcgtcgatgcggctggttcgctcacgcacagccaccagatcagcatcgtcatctgccgtctctactcgtgctacgtcgacgagctccttcaggggcacaagcccgccgaggcgcttgaagcgctcattgagaaccacttcgtcgagattccggactactacctcccgaagctgcagctcatgccgcacctctcgcgcgtctccgtgccgaactccggcttcgtctccgacgtcttcatggcgtccatctggtgcctcatcaactccgacaactacgtcgatgcagtcctcaaggccgtcaatctgggcggtgacgccgacacgatcggtgcggttaccggcggccttgccggcatcatctacggccaagacggcgacaacggcattcccgtctgctggtctcatgcgctttcccgcatcgactacattgaagagctctgcacggcctgcgatggcatgatgcgctga

SEQ ID NO: 1135 - DNA, 1065 bp, Sutterella wadsworthensis 2
atgcgctacccagcagcaaaacttgagagccttgcccgtgacttcctcgaggccaccggcagcagcgaggacgaagcccgcgtcgtcgccgaacacatgatcggcgcgaaccttcgcggccacgacagccacggcgtgggcatgatcgccatgtacgcccagtacctcaacgaaggcaagctcattcccaacgccccgctcaacgtcatcaaggacacgggccccgtgctccagctcgacggttgccgaggctacggccagcgcatcggccgcgaggcgaccgacatggccatcgagcgcgcgaagaagcacggcatctgcatgtacacgatcggtcgcagctgccatctcggccgcatcggcacctacggcgagcaggctgccgccgcaggcatggtctcgatccacttcgtgaacgtcaaccacttctttccgctcgtcgcgccgttcaacggctccaaggcccgcttcggcacaaatcccatgtgcgtggcgatgcccggcaccgacgcgcacggtccgttcatcctggacttcgccacgtcgatcgtggcgatgggcaagacccgcgtcgcctatctcgccggcaagaagttcgacgaacccgtggtgctcgacgtcgacggtcatcccaccaacgaccccacaccgatgtggcaggaaggcgagaagggtgccctgatggcgttcgccaagcacaagggctcgggcctcgccatggcctgcgagctgcttgcaggcctcctcgcgcacggcgagaccatccagccgggccacgagcgcgacggcagcatcgtcaacaacatgacggccttcatgatcgatccgtccgtgctcggcaacctcgactggatgaaggccgaattcgatgcgatggtcgactacgtcaagagctctccggctcccgaccccgtcaacaaccccgtgctcacgccgggcgaacccgaacgcctccgcatggccgacaggcttgccaacggcgtcgagatctccgacggcgaaatggcggccattctgaacgtctgccaggccgcaggcgtgcaccaccactgggaagtcatctga

SEQ ID NO: 1136 - DNA, 951 bp, Sutterella wadsworthensis 2
atgacagtcatgaaggttctccttgcccagccgcgcggtttctgcgcgggcgtcacgcgcgccatcgcgatcgttgagcgtgcgcttgccatctacggcgcgcccatctatgtcaggcacgagatcgtgcacaaccgcacggtcgtcaacagtctgcgtgagcgcggcgcggtcttcgtcgacaatcttgccgaggtgcccgagggtgcgacggtcgtcttctcggcccacggcgtgccgagggcggtgtctgaagaggcggagcgccggggcttccgcgttttcgacgccacctgtccgcttgttaccaaggtgcatcgcgaggttgcccgcatgcgcgccgaaggacgcaccgtgctgatgatcggtcacgccggtcaccccgaggtcgagggcacgatgggccaggtcgacggcggcatcgagcttgtcgagaacaccgccgacgtagcagcgctgccctacacgaacgatgactcgcttgcctatgtcacccagacgacgatcagcgccgatgacagtcaggccgtgatcgacgcgctcaggcaccgcttccccttcattcaggaacccaagcgccaggacatctgctatgccacgacgaatcgccaggaggccgtcaagcttctcgcccgctcgggcgtcgacatcgtgctcgtgatcggctccgccacaagctccaactccaatcgtctgcgcgaagtggccgaacgcgagggggcccgcgcctatctgatcgacacggccgagcacatcgatcccaagtggttcgagggcgttgcatgcgtgggcatcacggcgggtgcctccgcccctgaatccctcgtccagggcgtgcttcgttatcttgaggccaacctcaacgccgagcatgccgtggcgctcgaaggcgtcgaggagaacgtcgtctttccgcttcccaagggacttcgcgaggaggatgccgactga

SEQ ID NO: 1137 - DNA, 1848 bp, Sutterella wadsworthensis 2
atggccgtctccaccgttgacatctatccgtccgggccgctcatcgcgatgctcggcaatccgaacgccggcaagacgtcgctcttcaacattctgacgggttcgaagcagaaggtcgccaactatgcgggcgtgaccgtcgagcgcgtcgagggccaactcatcggcgcgcccgagaagatccgcgtgctcgaccttccgggcacctattcctttcatccgcgctcgcccgacgagaaggtgacggtcgacgtcctcaagggcgtcgcgcgcggcgagcgcaggcccgacctcgtcgtctgcgtgcttgatgcgacgaacctgaggcgcggcctcaagctcgtcatggccgcgcagcgcctgaagctccccgccgtggtggcggtcaacatgatggacctcgcgcgccgccgcgggatcgagctcaaggccgaggacctctcgcgcgagctcggcgtgcccgtggtcgagacgatcgccgtgcgcaagcagggcatcgacaggctcaccgagcttctctccgacccgtccgcctggtcgtcctgggtgcccgaggcgaccgaggaggacgaccttgcgcgcctcaacaggatcctgcgcaagctcgggcttgacaagatcttccccgacgaattttccgaccgcatcgatcgcgtcgtgctcaatccttggctcggcgtgacgatcctgatgatcatcctcttcttcgtcttccaggcggtgttcgcctggtccgcctatccgatggagtggatcgaggagggcttcaacatgctcggggagctgtgcgccgagcacctgcccgacgggttcgtgaaggacctgctcgtcgacgccgtcatcggcggcgtgggcggcgtggtggtgttcctgccgcagatcctgatcctcttcttcttcatcctgctgatggaggagtcgggctacctgccgcgagcggcgttcctgcttgaccgcacgatgggctcggtgggcctttcgggccgctccttcctgccgcttctctcgggctacgcctgcgcggtgcccgccatcatggcggctcgcatcgtcggcaaccagcgcgaccgctgggcgacgatcgccattgcgccgctgctcacctgcggcgcgaggctgcccgtctacgccgtgatgatcgcggccttcgtgcccgacgtctccgtctggggcgtgggcctgcagggcctcgtgctcttcgcgctctactgtctcggcatggtgggcgcgctcgtcgtcgcctggatcctcaagcacacgacgggcaagggcgagaaccgcacgctgatgctcgagctgccgagctaccacctgccgcgcatcgacgcgctcgcgcacggcctctggcagcgcgcctgcatctatctgcagaaggtgggcacgatcattctggcgctcacggtcttcctctgggtgctgacgaccttcccgggcgcgcccgccggcgcgaccgatcccgcgatcaactacagcttcgcgggcatgctcggccgcgcgttggagcccctctttgcgccgatcggcttcaactggcagatgtgcatctcgctcgttcccgccatgggcgcgcgcgaggtggccgtctcggtgctcggcacgctctacgcgaccgcgagcgacgcggaggacgccctcgtgccgatcctgcagcacagctggacgatcccgatgggcctctccttcctcgccttcttcgttttcagcccgtcgtgcttcgcgacgctcgccgccatcaagcgcgagatgggcacctggaaggcgccggctgtcctgtgggtggcctacacgctcctcgcttacgccttcgccttcgtcgtctaccgcacggccctctgggtctgcggctaa

SEQ ID NO: 1138 - DNA, 471 bp, Sutterella wadsworthensis 2
atgggcattgaaatcgaacgcaagtttctcgtgaagtcggacggctggcggaagctcggctgcgccgtgcgctacgctcagggctacctctgcagcgacaggaaccgcacggtgcgcgtgcgaaccgtgggcgacaagggctttctcacggtcaagggacgcggaagcggcatcgcgcatcccgagtacgagtacgagatcccgtacaacgaggcccggaccatgctcgacgaactcgccgaaaagcccgtcatcgccaaaacccgcacgaagattccgtttgcgggcttcgtctgggaggtggacgaattcttcggcgacaacgagggcctcgtcatggccgagatcgagctgccatccgtggatgcttccttcgagaagcccgagtggatcggcgaggaggtgacgagcgatccgcgctactacaactcgatgctcgcaaggaatccgtacaaaaactggcggcgctga

SEQ ID NO: 1139 - DNA, 1473 bp, Sutterella wadsworthensis 2
gtgcacatcccacaagaccccagtcaactcgacgagaaaaaaatggccatttacgaccccaagtcccgcgtagcggaagagttcatcaacgatcaggaaatccgcgacacgctcgcctacgccgaagagcacaagtcggacgttccgctgctcatgagcatccttgacaaggccgcccagttcaagggcctgacccaccgcgaagccgccgtgctgctcgcctgcgacgtcaaggaggtcaacgacaggatcttcgagaccgccatcaaggtgaaggagcacatctacggcagccgcatcgtgctcttcgcgccgctctacctctcgaactactgcgtcaacacctgcacgtactgcccgtaccatgccaagaacaagagcatcgtgcgcaagaaactcacgcaggaggagatccgcaacgaggtgatcgcgctccaggacctcggccacaagcgcctgctccttgaggcgggcgagcaccccaagcacaatccgatcgagtacatcctcgagtccatcaagaccatctactcgatcaagcacaagaacggcgccatccgccgcctcaacgtgaacatcgccgccacgacggtcgagaactaccgcaagcttcacgaggccgagatcggcacctaccagctcttccaggagacctacaaccgcaaggcttacgaggagctgcatccgaagggaccgaagtccgactacgcctaccacaccgaggcgcacgaccgcgccatggaaggcggcatcgacgacgtgggtctcggcgtgctcttcgggcttgatctctgccgctacgacttcgtcggcctgctcatgcacgccgagcatcttgaagccgtctggggcgtcggtccgcacacgatctccgtgccgcgcatctgcccggccgacgacatcgatccggcctccttcgagaacgccgtgcccgacgacctcttcctcaagatcgtcgcgctcatccgcatggccgtgccctacaccggcatgatcatgtcgacccgcgaaggccagcgcatccgcaccgaagccctcaagctcggcatctcccagatctccggcggctcccgcacgtccgtgggcggctacgccatccgctccgtccaggagatggaggagaagaccgaacagttcgagacgaacgaccgccgctcgctcgacgaaatcgtccgctggctcctcgagaaccactaccttccgtccttctgcacggcttgctaccgcgccggccgcacgggcgaccgcttcatggaatgggccaaggacggcagcatcgccacgtactgccaggccaacgccatcatgacgatgaaggagtacatgtgcgactacgcctcgaaggaaacccgcgaggccggcgagcgcgtcatcgccaacgaactcccgaagatcccgcacgagaagatccgcatcgccagcgaaaagcgcctgatccgcatcgccgacggcgaacgcgacttccgcttctga

SEQ ID NO: 1140 - DNA, 966 bp, Sutterella wadsworthensis 2
atgcagattacgcttcgccagatgcaggtctttcttgcagtcgcccgcaccgagaacctgtcggttgcggcgcaggatcttgcgatgagcaagagcgcggtgagccaggccctgacggagcttgaggggcgcctcggcgtcacgctcttcgagcgcacccgcggccgactccttctttcggccgaaggcagacgcctcaagcccgccgccgacgagctcatggagcgcacagacgacatcgagtcgctcttttcgggtcgcacgacgggccagctcaggcttgcctgtacgttcacgatcggctccttcatgctctcggacctgatgcgcgactttcaggcgcacgcgggctggatgcccgaaatgcgcatcgccaacaccgccgaggtggccgaatcgctcctcaacttctcgaccgacatctcgatcgtcgagggccccgtcacaaatccgcacctcatcaccgagccgtggatttccgacgaaatggtcgtggtggcgcccaagggccaccgtctcacacagggcgtcgcgacctgggagcaactctctcgcgagcgctggattcttcgagaggagggctcgagcacccgaatcttcttcgacgcccagatcggccttcacctctccgagcacaacatcatcgcgaacgtcaacagcttcgaggcgatcgtcggcatgatcatcaacggcatgggcctcaccttcatctccgagcgcatccttcacgatccgttcttcggcccgcacctcaggcgcgtcaagtgtcccgagaccttcacaaggcagctctccttctgcatgcacaagcagaagtaccgctcctccgacctccaggctttcctcgccttctgccgcctttggggcgaacaacttctcgaacgcgagcacagccgcaggctcgaggaggaacaggcggccatggtcttcacaagtccctcccgattcagcggcgaggttgcctag

SEQ ID NO: 1141 - DNA, 756 bp, Sutterella wadsworthensis 2
ctgaggaggcggatcatgcgctttgacgtcgttacgctctttccggaaatattcgactcgatcacgaagtgcggcatcaccgcccgtgcgatgaagcgaggcctgtggtcctgccacacctggaatccccgcgccatgaccgaggacgtgcaccgcacggtcgacgaccgccccttcggcggcggtcccggcatggtgatgatggccgatccgctcgcgaagacggtcgacatgatccgtgcatccggcaaccgcggccgcgtcatctcctttgcacccaacggcacgaagctcaccgatgagcgcgttcgccgcatggtggccgaggatgagagtgtcgtactcgtgtgcggacgctatgagggcattgacgagcgcttcctgtcgacctatgtcgacgaggtggtgagccttggggacttcgttctctcgggcggcgagatccctgcatgcgccctgatggacgccgtagtgcgacagctccccggcgccatcaaggatctctccacgtcggacgagagctttgcgactgggcttcttgacgcgccccactatacgcgtcccgaagtctggcgcggcatggaggtgccctccgtgctcatttccgggcaccacgcaaacatcagcaggtggacgcgcgaagaaagtttgcgattcaccttgcaaactcgcccggacttgattaaaatcgcggattcttctggcaagttgagcgatgcggaccgcaagtggttgcgcgccaacggctggaagtaa

SEQ ID NO: 1142 - DNA, 777 bp, Sutterella wadsworthensis 2
ccgcccctgctccgcaccatggaaaagaactgcgaaaagcccgagttgacgcctgaagaactcgaggcgctcaagaagcgccacatccgctccttcgtcatgcgccgcggccacatctcggccgcccagaagcgcgcccttgacgagtcgctcccgcaataccagatcgagtacgcccccgagcttctcgacgccgacaaggccttcggccgccacgccccgctcgttctcgaaatcggctgcggcatgggcgagacgaccgccgccatcgcgcaggcccaccccgaggtcaacttcctcggctgcgaggtcttcgtggccggcgtcggcgcgcttgccaagcgcctcgacgagatgtccctcaccaatgtgcgcatcgtccgccacgacgccgttgaaatcgtgcgcgacatgatcgccgagaactccctcgacggcgtgcacatctacttccccgatccctggcgcaaggcccgccatcacaagcgccgcctcgtcgcccaacccttcatcggactcctcgcctcccgcattcgtccgggcggctacatccactgcgccacggactgggagaactactccgagcagatgctcgaagtgctcgagggcgaaccgctcctcgagaacctccacggcgccggcaacttcagccccgtgatgggcaacccgctctgcgagcgtccccgcacgaagttccaggcccgcggcgaacgcctcggctacggcatctgggatctggtctacatccgcaagcaacccgctccctctgcgtcataa

SEQ ID NO: 1143 - DNA, 690 bp, Sutterella wadsworthensis 2
atgcatttaacacgatttacagacctcagcctccgcgtgctgatttacctcacccacaacgaacgcaagggactcgttacagttacagagcttgccgaacgcttcaagtggtcccgcaaccacatggtcaaggttgttcacttcatgagcaccaagaactgggttcagactcaccgcggcagattcggcggcctcaccctcaagatgcacccgtccgaatacaagatcggcgacatcgttcagattcttgaggaacagggcgaactcatcgactgcttcgagccgcacgaatgcgcccttgccaaatgctgcaagctccgcagccttctcaacgaggccacccgcgacttctactcgcgcctcaacacggccacgcttgagacgctcacgaacagcgacgaaatcagggaaatcatctccggcaaggacctgctccgtgcccagcccgacgccccgacgccgccgagcagcgagctcatccgccttatggaggcgcgcgtcgcccgcgaactccgcaaggccagacagtatgcttctgcagcactgatcgccccaaaaaagccccgccaggcgcctgcctgcggggcttttccgttccgtcgttttcgctttttcctgacgcctacaccaggaagaacctcgccgaaacgccgaagacggccgcgagcttcgttgcgaactcgggcgtaa

SEQ ID NO: 1144 - DNA, 1206 bp, Sutterella wadsworthensis 2
atgatcacctacgccgaagccctgcgccgcctcatggagaaggcggtgcccgtcgagggaatggaaaccgttccgctcctctattcaacccaccgcgtgctcgccgaagacatcgtgagccctatcgctgttcccggatgggacaactcccagatggacggctacgcggtcagagcggccgagctggctgaggcgtccgaagatcatcccgtcgtgctgcccgtttccgaccgcattcccgccggtcaggttggctcaaggcttgcgcagggcagcgtcgcgcgcatcttcacgggcgcgccgatgcccgagggtgccgacacggtcgtgccccaggaaaacgtcgaggtgacgcccgagggcgtctgcatcaagtcccccgtgcgcgagggcgcatgggtccgccgccgcggctccgacgtgcctcaaggcggcgtcgtgctcaagaagggcgcccgcctgacgcccgccgcgatcggcatggtcgcgtccatcggccgcgcctacgtcaaggtttaccgccgtcttcgagtcggcatcttcttttcgggcgacgagctcgtgcaaccgggcgaacccctgccgccgggtggcatctacaactcgaaccgcttcatgatccgcagcctccttcaggagctcggctgcgaggcgctcgacctgggcagcgtgcccgacacgcttgaggccacgatcgaggctttcgagagcgcggccgcctcggccgacgtcatcctgacgacgggcggcatgagcgtgggcgaagaggaccacatcaagccggcggtcgaagcagtcggttcgctcaacgtctggcgcgtccgtctcaagcccggcaagcccctcgcgttcggcgaggtgcgtggcgtgcccttcataggctgtccgggcaatcccgttgcgggcttcgtggtcttcctgatgatggccagaccctacctcctgaggacgatgggcctcaccgacatcgacgtaaagcccatggccgtgagagccgacttcgactggctcaagccgggcgaccgtcaggagtttgtgcgcgtgcgccgcaacgacgagggcgggctcgacctctatcacacgcagaattcgcaggtgctttcctcctgcgcctgggccgacggtctcgtcgacattcccgtgggcggcaccgtccgcaagggcgacatggtcagctactacccgttctgccagttcttcgcctga

SEQ ID NO: 1145 - DNA, 513 bp, Sutterella wadsworthensis 2
gagacagacatggctgttgatattgttcccaccaaactcgacggtaccgaccttcgcatcggcatcgtggtcgcccgcttcaacgaatatgccggccgcggtgaattcgagtcctgcatggacgaactgcgcaagctcggcgtgatggaagaggacgtgacgaaggtgtccgtgccgggtgccctcgaaatcccgttcgcgctgcagaagctcgcccagacgggcgaatacgacgccctgatcgccctcggcgccgttatccgcggtgaaacctaccactttgagctcgtgagcaacgagtccggcagcggcatcacccgcgtctgtcttgactacgacattcccatcgccaacggcgtgctgacgacggaaaacgacgagcagtgcgaggaacgcatcgacatgaagggccgcgactgcgcacgctgcgccgttgaaatggccaacttcgccaaggagttctgcgtcgacgagttcgacgaggatttcgatgaagtgacctccgaagactga

SEQ ID NO: 1146 - DNA, 750 bp, Sutterella wadsworthensis 2
ttcactttgaacggcccgggacgcctgacggcgctgcaaaaccgaaaacagaatctgatcattatggcgcacttcgaaggcgaacggctcaaacgcactccacgcctcattcgacaagagaggcgggcatgtctaaaatatcctcctgcaggcgttcccagaggacgccacggtgatgacttcaaccctcaaaccacagccagaagacacaaattgcgcaactttctcaaggaattccaggcgttcatctcgaagggcaacgtcatggatctcgccgtcgccgtgatcatcggcgccgccttctccaacatcgtcaactcgctcgtcaaggacatcgtcaacccgatcctcggcgtgctcgtcggccgccccgacttcacgaacctcttcgtggtcctcaagcccgtcgaaggctacacgggcccccagacctacgaggccctcgtcaaggccggcgccacggtattcggctacggcgccttcctcacggccgtcgtgcagttcctgctgctcgccttcgtgatcttctggctcatcaaggtcgtcacgaccatccgcaagcgcctcgaggccgaagccgccaagcttctcaaggccgaagaggagaagaaggccgccgcgcccgctcccgcccccgcgcccacgcccgaggacgtcgtgctccttcgcgaaatccgcgatctcctcaagagcggcgccgcctcgaacgccgaggtcaaggccgccgtcgaaaagctccagcagcaataa

SEQ ID NO: 1147 - DNA, 1059 bp, Sutterella wadsworthensis 2
atgagcgaggtcgtacatttctatcaaacgggaaccttcaccgtaggcaaccgtcttgtcacgcctgaagagcgtgcggggcaggcctccatggagcgcaccaatgcgctcacgtccggtcaccgcgcctgtcagggctgcggcgaggcgctcggcgcccgctacgcggttgatgcggcgatgcgcgccgtgaacggccgtttggccgcggccaacgccacgggctgccttgaagtcttctcgacgccctatcctgaaacgagctggcagctgccctggttccactccctcttcggcaacactgcggcggtggcgaccggcatggccgccgccttcaaggtgaaggcgaagaagtcgggcggcgctgaaacccgcgtgatcgccatgggcggcgacggcggcacgaccgacatcgggttcggctgcctctccggcatgttcgaacgcaacgatgacgtgctctacatctgctacgacaacgaggcctacatgaacacgggcgtgcagcgctcgtccgccacgcctcccgccgcccgcacggcgacgacccaggtcgcgggcgacgaacccggcaacgcctggggccagggcaagaacgtgccgctcatcgcaatggcgcacggcattccctacgtcgcgacggcgaccgtggccgatcttcgcgatcttgagcgcaaggtgacgaaggccatgagcgtgcgcggtgcccgctacatccacattctcgtgccttgcccgctcggctggggacacggttccggcctgacggttcagatggcccgcatggctcagcagaccggcatcttccccgttttcgaggctgaatacggtgaagtcaccggcgtgagcaagatccgccgcaagattcccgtcgagcagtatctgaagccgcagaagcgcttcgcccacctgttcggcaagaacgcggacctcaccgtcatcgcccgcattcaggccatggcggaccgcaatatcaaggactacggcctgatcgacgaggaagaggtcgaaacgcatccgacggcggttcagggtgatgagcgtgctcatcacttttga

SEQ ID NO: 1148 - DNA, 1872 bp, Sutterella wadsworthensis 2
gtgactcagcaaacgcttctcgactccatcagctcgcctgcggacctgcgcaggctcgacgtgcaccagctcccgcagctcgctcaggagctccgcgcgttcatggtcgagtccgtctcgaagacgggcggccatctttcgagctcgcttggcgcgacggagctcgccatcgcgattcacacggcgttcaacacgcccgaggaccgcgtcatctgggacgtcggccatcaggcctacgcccacaagatcctgacggggcgccgcgagggcatggccacgctgagaaagcaccacggcctctcgggcttcccgaagcgcacggagtctccctacgacgccttcggcaccgcgcactcctccacctcgatctcagccgcactcggcatggccattgcggcccgccttgaggacaagaccgaccgttggcacatcgccgtgatcggcgacggcgcgctgacgggcggcatggcgctcgaagccctgaacgatgcgggcgtctggaaggaaggcgtcaggcttctcgtcatcctcaacgacaacgactgctcgatctcgccgcctgcgggcgcgctctcgaatcatctcgcgaagatcgtctcgacgcgcgcctacacgtgcgcgcgcgaaatctccaagcgcgtcctcaagcccgtgcccggactatgggacatcgccaagcgtatggagaagcaggcgatcaacttcgtgagtccgccctcgggcatcttctcgagcttcgacctcaactactacggtcccgtcgacggccacgacgtcgtcggactcgtcgaggtgctcaagaacctgcgcaggctcaactgcccgtgcgtgctgcacgtcgcgacccagaagggcaagggctacgagcctgctgaaatggatccgacggcctaccacggcgtgggcgtctttgatccgcttctcggccttcccgaaaagaagccgggcagaccgacctacaccgaagtcttcgggcgctggctctgcgacacggccgccgccgacaagcgcctctacggcatcacgcccgccatgcgcgagggctcgggactcgtcgagttcgcgcgccgctatcccgagcgctatcgcgacgtcgccatcgccgagcagcatgcggtcacctatgctgcaggccttgcctgcgagggcatcaagcccgtcgtggcgatctactcgactttcctgcagcgtgcgatcgaccaggtcattcatgacgtggcgctccagaacctgcccgtcgtcttcgcaatcgaccgaggcggtctggtgggcgccgacggcgcgacgcaccacggcttcttcgacatttcgcttcttcgcacgattccgaacatgacggtgatgacgccctccgacgagaacgagtgccgcctcatgctcaacacggcctactcgatgaacacgcccgcctccgtccgctatccgcgcggccgcggcccaggcgtcgaggtgacggccgggggcgggacgattcccgtcggccgctcgcgcaccctgcgaaagggcagtcgcgtggccttcctcggcttcggcagcatgacgaacgtgctcgctcctgttgccgaaaagctcgacggcacgctcatcgacatgcgcttcgtcaagccgatcgacgaggaggccgtgcttgaggccgcgcgtacgcacgatatgatcgtttgtgccgaagagggcatgctcatgggaggcgcctgcaacgccgttctcgaggtgcttgccgacaacggagtcgtcaggcccgtgatgcgcttcggcctgcccgacgagttcatcgaacagggcacgcaggccgagcttcttgaggacgtcggcctcacgtccgaggcgatcgagtcgaaggtcgccgagaggattgcaaagcttggcatctga

SEQ ID NO: 1149 - DNA, 768 bp, Sutterella wadsworthensis 2
ttggatccttttttttatccggctctgcaggccggacattccaacatgaatcttcttcgaggctggctcttctacatcgtcctgagcttttcgattctggtccttgcggtctgcgtgctctgcacgacgccctttgcgagcgtgaagtggcgctatgaggccatctgccgtccgtgggcgaagttcgtgctcgcactgcttcgcgtcatctgcggcatcaggctcgagatgaagggcatggagaaccttccgcccgccgacacgcaggcggtcgtgctgatgaagcaccagtccgcctgggatccgttctggctcggcgcctatcttcccgcgcccgcctgcttcatctacaagcgctcgatcaactggattccggtcctcggctgggtggtctgcgccatggacatgctggcgatcgaccgcagcaagggccgctccgccttcgaggccttcatgaagaagggccccgtgaagctccgcgagggcttctggatcagtctcttccccgaaggcacccgcgtgccgccgggagagcgcgtgcgctacaagacgggcggcgcccgcttcgcatgccagagcgggacgcccatcgtgcccgtctgccacaatgcaggccactgctggcccaagaactccatcgccaagcaacccggcacgatcaccgtgagcgtcggccccgtcatcgagacgaagggcagggatccgcatgaagtgacggccgaagtcgaaaaatggattgaagatgagcttgaacgaattgatgcctga

SEQ ID NO: 1150 - DNA, 798 bp, Sutterella wadsworthensis 2
tccccccgtcaggagttcggcatgtcaaccatcctctttcccagcccgattttcggtcccgtgcacagccgccgtctaggcgtttcgctcggcgtcaacctgctgcccgccgacggcaagctctgcagcttcgactgcatctactgcgaatgcggcctcaacggccagcaccgtcccgagctgaggatgcccacgcgtgaagccgtgcgcgaagcccttcgcgccaagctcgagagcatgaaggccgaaggcgtcctgcccgacacgatcaccttctcgggcaacggcgagcccacctcgcaccccgactttgagggcatcatcgacgacacgctcgcgcttcgcgacgagtacgcgcctaaaagccaggtgagcgtcctcaccaactccacccacatcgtcaggaacggcgtcttccgcgcgctcctcagggtcgacaacgcgctcctcaagctcgacaccgtcgacgaggactacattcacctcgtcgaccgccccacgagccgctacgacctgccgaagctcatcgagcgcatgaaagccttcgaaggccgctgcatcatccagacgatgttcatgaagggcgaatgggagggccgaagcgtcgacaacacgggggacgagtacgtcggcccctggctcgacgccctcagggagatcggccccagactcgtgacgatctacacgctcgacagggagacgcctggcaagaacctcctcaaggcgccccgcgagcgtctcgacgagatcgccgcacgcgtgaacgcgctcggcatcccgaccaccgtgagcggctga

SEQ ID NO: 1151 - DNA, 3054 bp, Alistipes obesi
atgcgctggtattcgaacatgagcgggaacggcggatttttcacgaaaaacgaacgaatgaaatacaacgcagagacagggccgacggacggcgaacggacatcgggctacgagttcatgaagcaccgcatccgcaagattctgctggtatgttgcagctacgacgggtacattctggaagaggacggccatatcgagcagcagatcaaccaggagtacatcgacctgaacatgtccaacccgccggcgctgctgcgcgtcagctcgacggccgaggcgctcgacctgctccgcgaggacgatcggttcgacttcatcctcacgatgtacaacgtgggcgaacccgacgtgttcgacttcgccaagatcgtcaaggagcgccaccggcatatccctgtcgtgttgctgaccagtttctcgaaggacatctaccgccgtatcgacgagcgcgacgcttcgggcatcgactacatcttctcgtggagcggcaataccgatctggtgatcggcatcatcaaactcatcgaggatgcgatgaacgccgaggaggacatcctcacagggggcgtgcaggccatcctgctcgtcgaggactcggtgcgtttctattcgacctatctgccggcgctctacaagctgatcctgcaacagaacaccgagttcctgaaagacgccttcaacgaacagcagcagatcctgcgcaagcgcgcccgtcctaaaatcctgctggcgaccaattacgccgatgccgtggcgctctacgagcgatataagaaaaacctgctgggcgtcatctcggacgtggggttcgtgctgcacaagggcgactccccttcgaccgagaagctcgacgcgggcatcgacctgtgccggctggtgagggccgacaacccgttgatgccggtgctgctgcaatcgtcgcagacggccttcgccgcgcaggcgcgcgagttgggtgcagggttcatcgccaagaattcgaagacgctgttgcaggagttgtcggacttcatcgccgctcggttcgccttcggcgattttctcttcaaagacctctcgacggggcgtgtgatcggccgggcgaaggatctccacgagatgcagcggctcgtcgcgtcggttcccgacgacgtcttcgagtacaacacctcgcagaacaacctttcgaaatggctctactcgcgcggactgtttccgctggccgcgtcgatccgccagctcaacaagagccatttccggacgaccgaagagcatcgcgcggcgctcgtgacgctcatccgcgactaccgcacgctgctggggcagggcgtggtagccaaattcgatcccgcgacctactccgacgccatcgctttcgcgcgtatcggcgaggggtcgctcggcggcaaggcgcgcggactggccttcatgaacagcatgctggtgaaatactgccagtacgccaaatacgagaacgtccgcgtgacgattccccgcacggtggtggtggcgaccgactatttcgacgccttcatccgcaacaacgggctggaatacgtgctcaccaccgagatgaccgacgaggagattctctcggagttcgtcagttcgacgcttccctacaagctgcgcgaggcgctgaaagcctacgtgcgcacggtgagcgggccgctggcggtgcggtcgtcgtcgaagctggaagattcgcactaccagcccttcgccggcatctattcgacctatatgatcccctatacggaggggaacgaagaccgccagctgcgtctgttgcagaaggcgatcaagagcgtctacgcatcgacctatttcgcggcgtcgaaggcctacgtgcagtcttcgcagaacctgatcgccgaggagaagatggccgtcgtgatccaggaggtgtgcggcacggagcaggacgggctcttcttccccacgctctcgggcgtggcgcggtcgattaactactaccccataggcgacgagacgcccgaagagggggtctgcaacatcgctctcggactgggcaaactggtcgtcgacggcggccgcacgctgcgtttctcgccccgctacccgcagaaggtgctgcaaacctccacgcccgaactggcgctgcgcgatacgcagaacgaggtgctggcgctcgacctgcgccccgaagcgttccgcacgtcgaccgacgatgcggtcaacatccggcggctgacgctgcgcgaggtggctccgatgcgccagacgcgcttcgtggcttcggtgtgggaccgcgagaacgaccgcatctccgattcgccgatggacgaggggcgcaaggtgattaccttcaacgccattctcaaatacaacacctttccgctggcggacatcgtgcgcgacatcctgcgtctgggcgtcgaggagatgcgctgtccggtcgaggtggagttcgccgtcaacatggacgtcccttacgggcagcagcggatcttcaatctgttgcagatccgcccgatcatcgacaacaacgacaaccgcgcgctcgactggcgccgcgtgccgaccgacgatgcgctcatctatgcccgaaacgcgctgggcgtgggcaacatgaacgacatccgcgacatcgtctacgtgaagcccgaacgtttcgactcgctctcgacgcaggcgatcgcgggcgagctcgacgcgctcaacgcgcggatgcgcgaagccggtcgcggttacatcctcgtcgggccggggcggtgggggtcgagcgatccctttctgggcattccggtcaagtggcagcagatcaccgaggcgcgcgtgatcgtcgaatgcggattggaacgcttccgcgtcgagccgagccaggggacgcactttttccagaacgtcacttcgctgggcgtgggttatctgacgatcaaccccttcatgggcgacgggcggttcgatgcggagcggctcggtgcgatgccggcggccgaggagggcgaatatctgcggcgcgtgagcttccccgcgccgctgtgggtctatatcgacgggcgctccaacaaggggatcgtgcgcaccgaacctcccgccggggaggagtag

SEQ ID NO: 1152 - DNA, 4236 bp, Alistipes obesi
atgagaaatccgatgaaaaagtacttatatcttgtctgcggttcgctgctggccctcgcgggatgtacgcgggatgccgatgtcgaacccgcccgtcccgtcgagagcggaaaagtcgttttgaccggtctttcgggagaggttacccgtaccggattcggcgaggcatccgagggagtcgtgccgttccggtggagcgccggcgactgcatctgggtcggcgacgtcaagagcgagccgctcgaatcctccggcgaaaagggcgccttcgttttcgaatccgtcgccgaagccgattcctacgacgtgatctacaatatgacgggttccgccgcccgcacggcgtcgatccccgccgaacagacacaggcggaggcaggtcgtcccgatctggggcgcaacggcgatttcggctatgcgacggccgatgccaaccgtacgttcgtgctgaaccacgcgacctcctacgtctggttcgacgtaagttcggccgacgtgacggccaggctcgaatcgatttcgctgagcgtgtcgggcggccatgccatcgccggcgaggcggtcttcgcggagggtgcgctcggtgcgtgcgagggttcgtcgtccgtcacgctgaatttcggcggggaaggcgtcgcactgccgacgcagcacagcgacaccgaggtattcgccgccatggtgctctatccggccgatctgtcggaggcgacagtctcggtcgtctacaccttcgccgacggttcggtctacatgcagagccgtgccggccgtcgactcgcgccgggcggtacgctgcgcatatcggctacgatcgctgccgccgactgcaagcgcgacggcgtcttctacctgaccgaaaacggtgttgcggaggagattcccgaatcggtcacctatctcaaagcggtgacgctgggcgaagggaaactcgccgccgccgacctctcggcgatcgcttcgcggttgaaggcgggcgcggtgctcgatttcgccgaggcgacctatgaagccgcggagttcccgacggtcttctcgcgcaagacgacgctgcgggagatttcgctgccctgcaatatcctgacgatgccctcgacgggcacctatgcgacagcattctacggttgtacgggattggagacggtcgcattgcccgacgggttgaccgagatcgcggcgcgggcgttctcgggctgctcgaaacttgtgtccgtccggttgccttccacgctgacttcgatcggcgagtatgcgttctatgactgcaaggcgctggccgacgtcgtcgtgcccgaaaagatcacgacgctttcgcgcagcctcttcgccggatgtacgggtttgaagagcgtgacgattcccgccggagtgaagacgatcgattcggggaccttcaacaaatgttcggcattggagagtatcgaactgcccgaagggctgaccacgctcggttcgcaggctttcatgaattgctcggcgctcaaatccgtccgtattcccgacggagtgaccgctatccccaatgagacgttcgcctattgcagcgtactcgaaacggtcgaacttccctcggccttgaagacgatcggcaatatgggattctacaaaaacaacgcattgcggagcatctcctttccggagacgttggagacgatcggcaccaactcgttcgatgaatgtcattcgctggccgatgtgacgatcgatattccggtcgttaccgattattcgttccgggattgcggctgtacgacgatcgttctgggcgagaaggtgaccgaagtcggacggaatgctttttacggctattccgatgagagcggaaacgtgaagagcatcacctgccgtgcgcagacgccgccggaactgggtcagacgccgttcgacggcatcggcaaaaatgtcgagggaaagaaatacctctatgttccggcggcctcctacgaggcttatgagaaagagtgggcgtccgtgatcggtcagggatacacgctcgaagacatcagcgatcaggagctgaccgacggtgtctggtaccgcgtttcgcgtgaggagaagtggacgacgacgatgcccgacaccttctcggcgctctatgtccgcaccgtgggcgagcagacgatctcggccgaggcgttgcagtccgtcgtcgccagactcgcggcgcagtcggcgcccgcgacgctcgatttcagcacggccgactatgtttccgccgaattccctgccttgctggccggtaatgagaagctgggcggaatccgtctcttcgaaaatacgacgtcgatcgccgacggggctttcagagggtgtacggcgctgaccagggcggtcgttccgtcgggcgtcgccgcagtcgggccgagtacgttcgaagggtgttccgctctggcggaggtcacgctgccttcgtccgtcgcatcgatcgccgacaaggcgtttagcggttgtgcagcgctgtcggagatcgcgctgggtaatgtgaagagcatcggcgacgaagctttcgccgccagcggattgaccgaggcgtcgctcggaggtgcgacgctcggtgcgaaggcgttccgcgactgtccggcgctggctgaggtcgaactcggttcgatcggcaccgttcccgccgaaagcttcaaggggtgtacgtcgctgacgtcgctgacggttcccgcttcggtgaccgccgtcgatgcgggtgcgttcgagggttgttcgaagctcgccgacctttcgctgggcagcggcgtgacgaccgtaggcgacagggcgttcgccgactgcggcctgacagcactggtgctgcccgacaatgtgacgtcgctcggcagcgaggtctttgcgggtaatccgacactcgcgtccgtcaagttcggagccggcattacggccgtcagcgacggagcattcgcagggaacgacgtcatcgaacggctgacgattcccaagacggtcgaggcgatcggtgccggtgcgttcgccggttggtcgaagctcaacacgctgaccgtttcgggcgatgcgctcgcttcgatcggcagcaaggctttcgagaatgccgtgcttttggccgacatctactgcgagccgacgacggctccgacggtcgcggccgacagtttcgcgggggcgggcgcttcggttcagggtgccaggaccgtccacgtcccgtcggtcgacgcctattcggcgtggactgcggcgtgcagcggttatacgttcgccgcattgggcgacgactacctgagcgaaggcgtctactaccgtgtttcggccggcgacaagtggtctgcggaacttccggcatccttctcgacgctcttcgtcaagacggcaggggacaatacggcgatgagcgcgtcgcagctgagtgcggtggccgccgccgtcaagggactgtccgccgcggcgaccgtcgatctgagcgaagccgtctacgagagtgcgacttttcccgccgtattcaaggacaacaaaaatctgtcggacatcgtgctgccgaagaatattaccgctgtggcgaagcatgttttcagcggatcgggtctgatcagggcgcacgtttcggcggctgtcacctacgacgtcaatacctatgcgtcgtgcgcttcgctcgcgagcgtcacgttcgacgaatatgtaccgaagatcactgacgcgatgttccagggctgtccgctgacgcaggtcgtgctgcccgccgaggtcacgacgatcggctcgaacgccttcaacggttgcaagtcgctggcgaaggtcaccttcggcaccaaactgaaaacgatcggttccgcagcgttcagtgggtgttcggcgctgacggcgctgatcttccccgatgcgacggaatccatcggacagaatgcctttgccgattgttacaatctgcggagcgtttcgttcggccgcggcatgaaggagatcggaacttacagttttaccggatacgactggacgggaacgggtcagggcggttgcccgctgctgggcgagatcatctgccgtgcggccactccgccgacgctggaggagtcttacggttccggaccgttcggcggatcgtacgagatcgtcgccggcagcaaggcggagacccgcgtcatccatctgcccgagagcgacgacccgtcgctgagtacgggcggcggctatgtgaattcgggctgggtgcagctgaccatggctccctataactttacgttcgtctacgacgtggaaccgaccggcacgtggaaatag

SEQ ID NO: 1153 - DNA, 2436 bp, Alistipes obesi
atgagtaaaagagataaaatcgaactgaaagaactggaatcgctgcccgaagcgctcgacggcaaccaccgcgtcatccccatcgtcaccggcgaggacgacacggtcgaagaggtcgccgtccccgaaatacttcccgtgctgacgctgcgcagctcggtgctgtttccgggcgccatcacccccgtcacggtgggccgctcgcggagcatgacgctcgtgcgcgacaccaacgcccgcaacgggatgctggccgccgtcctgcaacgcgacggcgacgtggaagagcccaaggcggaggacatgtaccgcatcggtacggccgcccgcatcatgaagatattggagatgcccaacggcaacctcacggtcattctcaacggtttggagaaggtcgagatcggcgaatacgtctcgtccgacccctatctgcaagccaaggtgaccccgttgaaggattcgacgcccgacgagaagaacgtcgagttcaacgcacttgtggattcgatccgcgacgtggcgctcaatatcatcaacatctcgcccaacatgcccaaggaggcgattttcgccatcaagaacatcgactcgcggcgaggtatcatcaacttcatctgcaccaacctcgaactgtcggacgaagaccggcagtcgctgctcgaagcgccggggctgctggcgcgcgcgcgcaaactgctcgaaatcctgatccgcgaccaacagctcatcgagttgaagaacgagatccaggagaaggtcaagcaggagatcgacaagcagcagcgcgactactacctccagcagcagatgcgcaccatccaggacgaactgggcgacggcgccgacgccgaactggacgagatgcgcgaaaaggccaagcagaagaactggcccaaggaggtggccgaactcttcgagaaggagttgcagaaactcgaacggctcaaccccgccgtagccgaatattcggtgcaggtaacctacctgcaactgttgctcgaactgccgtggaacgactgtacgaaggacaatctcgacctcaaacaggcgcgcgagcagctcgaccacgaccatttcggcctcgaagaggtcaaggagcggttgctggaacacctggcggtcatcaagttgaagggcgacctcaaatcgccgattctctgtctctacggccctccgggcgtaggcaagacctcgctgggcaaatcggtcgcagcggcgctggggcgtaagttcggccgcatcgcactgggcggcctgcacgacgaagcggagattcgcggccaccgccgcacctacatcggggcgatgccgggccggatcgtacagacgatcaagcggtgcggctcgtcgaacccggtcatcatcctcgacgaggtggacaagatcagcgtgtcgaaccacggcgatccatcgagcgcactgctcgaagtactcgatcccgaacagaacaccacgttccacgacaactacctcgatacggagtacgacctctcgaaggtgctcttcatcgccacggccaacaacgtcggcaatatcaatccggcgctgcgcgaccgcatggagatgatcaacatcccgggctacatcctcgaagacaagatccagatcgccctgcaccacctgctgcccaaacagcgcgaggcgcacggcatcaaggagcaggagctgatcctcacgccgcagatcgtcgaacagatcatcgccggctacacccgcgaatcgggcgtgcggtcgctcgacaagcacatcgccaagctggcgcgttcgcgggccaagcagatcgcctcggaggaggctttcgcacccgaactcggcgcgaaagaggtcgaaaagatcctcggcaaacccaaattcctcaacgaggagtacgaggtgggcggcatcgtcggcgtggtgacgggcctcgcctggacggaagtgggcggcgacatcctctacatcgagtcggtgctcacgcccggcaagggccgcctgagcctcacgggcaatctgggcgacgtgatgaaggagtcggccacgatcgccttcgaatgggtcaaggcacattgtacggaactgggtatcgatcccgagaaattcgagaagtacgacctcaacatccacgtgcccgaaggcgccattccgaaagacggcccgtcggccggcatcacgatggtcacgtcgatcgtctcgacctacacgggccgcaaggtccgcgaccgcatcgccatgacgggcgaaacgacgctgcgcggccgcgtaacccccgtgggcggcatcaaggagaagatactggccgccaagcgcgccggcatcacgacgctgctgctgtcggaggagaaccgcaaggacatcgaggagatcaagcccgactacatcagggggctgacgttccactacgtccgcaccaacgacgacgtactgcaactggcgctcgaaccgcaggcgcaacaataa

SEQ ID NO: 1154 - DNA, 3132 bp, Alistipes obesi
atggaacgatttttcgtcagccggccgatcttcgctatctgcatcgccctggcgatcgtgttgttgggcgcgatttcgattttcgatctttcgatcgaacagtatcccgacattacgcctcccgtcgtggaagtgaccgccagttacagcggagccgacgcggagacggtcaacgacgccgtggccacgcccgtggcgcagagcgtgatgggcgtgagcgacatgctctacatgcagtctacgagtgccaacgacggttcgatggtgttgcaggtagtcttcgacgtgggtaccgatcccgatctggatgcgatcttcacgcagaacaacgtcgccacctcgaccgcactgcttccctcgtcggtcgtcacgcagggcgtggtgacgcagaagacgatgacgggttttctgatggtcttcgcgctgcacagcgacggccgttacgacaacgaattcctctcgaactacgcttacatcaatcttcaaaaccagctgctcaaaatcaacggcgtgggcaaggtctcgatcatgggcgccggcgaatatgccatgcgcatctgggtcaagcccgatctgctgaactactacaacgtgtcgctcgacgaactgcggtcggccgtgctcgcggagggcggcatctaccctgccggccagttcggcgccgagccgtcgcccgaagggactacctatacttatacggtcaccatgccgcgccagatctccacggccgaggagttcgcggcgatcgtcgtgaagaccacccccgccggcgagcagatctttctgcgcgacgtggccgacgtggcgctgggcagcaagtcctacggcgtcgcttcggccttcggcgaagagccggccacgctgctggtcatctatcaggagccgggcagcaatgccgtggacgtaggcaaccgcgtgaaggcggccatcgggcggttgtcggaacggtttcccgacggcgtgagctgtacgacgatcgtcgattcgaccgagagcatccgctcgggcgtgaaggagatcatcctcacgctgattttggcgctcgtgctggtgatcgccattatctacctcttcattcaggactggcgggcgacgctcattccgctcgtcgccattccggtctcgctcatcggcacgttcatcttcttcccgctgttgggcttctcgatcaacatcatctcgctgttagggctggtattggcgatcggactggtggtcgacgatgcgatcgtggtagtcgaagccgcacaagtcaacatcgaacgcggcatgaaatcccgcgaggcggcgatcgaggcgatgcgcaacgtcgcttcgccgatcgtagccacgaccgtcgtgctgctggccgtcttcatcccgatgtcgttcgtgggcggaatttcggggcggctgttccagcagttcgccgtgacgatctcggtctcggtcgtgctctcggccttcaacgccctgacgctgtcgcccgcgctgtgcgccttgctgctcaaaccccgcaaggaggcggcgaagggtttcttcgccgcattcaaccggcggttcgaccgctggctggaaggctattcctcgcggatcgccgccaccgtgcgccacatggcgcgtaccgccgtgctgttgctggcgatcggctgtgtgatcggtgcggcatggtacttcatgcccggcggattccttcccgaagaggaccagggctacgtgatggtcgtggtgaatgcccccgaagcgtcgtcgctgcgggtgacgcaggaggcgctggtcggggccgaccgcatcatccgctcgctgcccgaagtgcagtatacctcctatgccgctgggttcaacatgttggccggcatcgccgaaaccgacagcggcgtggtcttcgtcaagctggtcgactactccgaccgcaaacgctcggccatgcagatcgccgcggcgctcaacgggatgctctacgaggggctgcccgaggccgagggcttcgccttcatcccgccgtcgattccgggtctgggcgtcacgtcgggcctgtcggccgttacgcaggatttggaagggcgcggtacggcttacctgggcgagcagacggtgcgttacctcgattcgctgcgccgccggccggaaatcgctacggccaccacgtcgttcaacgccggcgtcccgcagcgaaggctggtgatcgacaaagcctacgccatgcaggaaggggtggagctgagcgacgtctattcggccataacgacctatttgggcggtgcttacatcaacaacttcaaccgtttcggaaagttgtaccagacctatctgtcggccgcacccgattatcggacggaccgcacgtcgctcgacagctatttcgtgaagaacgcccgtaacgagagcgtgcccgtgtcggctttcgtcagcgtgcgcgacacggtcggcccggcctatatttcgcagttcaacctttaccgctcgatcgccctgaacatcgcaccggccgacggcgtatcgtcgaagcaggcgatggaagccgtcatggaggtggccggcgaggtgctgcccgccgacgtggatgtagcgtggagcggtacgtcgctcgtcgagagcaatgaatcgaagagttcgtcgctggtttacctcttgtcgctggcgatcgtcttcctggctctggcggcgctttacgagagctggggccttccggcggctattctgctgggagtgcctcctgccgtgctgggcgcctttgtgctgttgtggttcgctcatctgttcgactcgctcttcatcaacgacatctacatgcagatctcgctggtgatgctcatcggactggcggccaaaaacgcaattctggtcgtggagtatgccgaccggcttttcttcgagcagaagcagtcgctcgtcgatgccgccgtcggcgccgccaagctgcgtgtgcgccccattctgatgaccgccttcgccttcatattgggggtgatgccgttgattttcgccgacggcgtctactccaccgcccgcaacatcatgggcgtggcgctggtgggcggcatgttgttggccacgctgctcggaatcttcatctacccctcactctactacctgatcgcccgtctgggacggttcgagcgcaaacgggacttaaaatcgcagaacctatga

SEQ ID NO: 1155 - DNA, 2862 bp, Alistipes obesi
atgcagagttttttgcaggaggttgcagccgatctctaccggcgctacggagaggatgtttcgtcgctgcacattctcttcccgacccgtcgtgcccgccatttcttcatcgacgccctttcgcatctggccgaacggccgatgtggcagccccgttggctgacgatcgacgacctgatgcaggaggtttcgggattgcattcgggcgaacgcatccgattgatcgccgagttgtacaaggtctattcggcctgccacgacgaacctttcgacaagttctatttctggggcgagatgctgctcaacgacttcgacacgatcgacaagtaccgtgtcgacgccgatgcgctgttccgcaatatctacgagttgaaggagttggagtccgacgtctcctacctgacccccgaacagttggaggtgatccgccagttctgggccaatttcaccgacggagcgacgctttcggaggagaaacgccgtttcctggctgtgtggcggacgctgggcgacgtctaccacggtttccgcgcacggctgcaacgtcaggggatcgcctacggcggtatgatgcagcgcgccgcggccgagcggctgctggcgggcgatttcgctttcgccgagcggcggcgctatgtcgtggcgggattcaatgctctttcggcctgcgagaaggtgttgttccgttttctgcaacacaacgccgaaaccgatttctattgggattacgacgactattatctgaaaaacaccgaccaggaggcgggaatgttcgtgcgtgaaaaccatgcgtcgtttcctcccgtggtcgagctgtcgcacgataattttcgaaaagagaaggagttgacggtcgtatccacgccttcgaacgccgtgcagtgcaaatatgcaggccggatcctcgatgcgctgcgcaccggtgccgacggccggaaacggccgttggacaaggagacggccgtcgtgctgaccgacgaaaacctgttgctgccgctgctccatgcgttgccggagaaggccggcggcatcaacgtgacgatgggatacccgatcaagacgacccttgcctacgcctttctggaacggctcgtcgagttgcaagcgcactggcgcgaagggcgggaggggacgtcgttctatcatgtcgatgcggcgggtatcctcgcgcatccctatgttgcgcggagtgcgccgcaaacgatcgagcaactgcgccggacgatgctcgccgaccgccgtatccggatgaccgccgacgagctggggcagacgccgctgttgaagacgcttttcactccggcagccgagtggcgggagttgtcggactatctgctgcgggccgtggcggccgtcgcccgagagccctacgacggcgacgacgcccggcagcgggtggagtttctggctgtcatttccgagcagttgattcgattgcgcaattcgctcgaagcttgtgatatagaaataactacctcgatctatacatcgcttctgcggcggcacctgcaaaccgtgcggattcccttcgagggcgagccgctcgaagggttgcaggtgatgggaattttggagacccgcaacctcgatttccgcaacgtggtgctgctctcgatgaacgacgacaatttcccgggcaaccgcgtggcgcaggcttcgttcattccctacaacctgcgggcggctttcgatctgccgaccccagcccatcacgagggggtctacgcctactatttctaccggctcgtccagcgggcagaacgtgtctatatgctctattgtgcccatgccgacgagaagacgaccggcgaacagagccattatatctaccagctcgatttcgaaaccggtttccggttgaagcgcgtcgaggtgggggtcgacgtcaatctggcggagaatccgccgatcgaagtggcgaaggagggcgacgtctgggagaagctctcgcgtttcgtcgaccccgaatcgccggcgatgctctctccgacggcctttttccgttatgtcgcctgtccgctgcgcttctatttctactccgtggcgcggttgaaggccgacgacgatctgaccgaggaggtcgacgctccgatgttcggaacgattctccatgccgccgcgcagcggctttacgagcggatcgcgggggaggaacatccgggcgggacgctgcgtgcactggtcggaagcggggcggtcgaacgggccgtcgcggcggcgatcaacagcgagtacctgcaaaacgaggcggccgacgtgaaggagtatccgggaaacctgatgctggtacacggcatcgtctccaaatacctgcgtcacggcgtcgtcgcctacgatgccgcgcacgacgggtttcgcgtcgaggggttggagcgtcccgtcgaagactccttccccttcgtctcggccggccgtgaactgcgcgtccggttcggcggcatcgccgaccggatcgatcggttggacgacggccgcctgcgggtggtggactacaagacgggcgagtcgcaactcgaattcgcgggcgtcgaagcgcttttcaacggcgaagccaaacagcggcagtccaatgtcttgcagacgttgctttacgcgatgatgctgacgcactccgaaggttgcgaggcggtgccggcgctctactacgtgcggcggatgaaccgtcccgattacagccccgaactggtggatcgttccacgggcggcgtaggggaaggctattcggcctatgcggtcgatttcgagcggctgctcggcgagaaactcgccgaactgttcgatcccgccgtgccgttccgcgcgaccgacgatgcggagcacacgtgccgttattgcgattacaggcagatctgccggagataa

SEQ ID NO: 1156 - DNA, 3126 bp, Alistipes obesi
atgatcgatttcgggaaatgggctttcgccaatcggaagctcgtctatttcgtcgtcgccgtccttctggtcggcggcatcctctcggcctacgacatgtcgaagctcgaagaccccgaaatcaaggtcaagctggcgatggtcatagcgacgcgccccggcgcttcggcgcatgaaatggagttggaggtgaccgatccgttggagaagaacatccgcaccatgggcgaggtggagagcgtgaccagctcgtcgttcaacgatctggcgattttggaggtggagttgaaaagcacggtgcgcgacgccgacgtcgaacagtgctgggacatgctgcgccgcaaggcttccgacgtccagcggcgattgccgtcgggaacgtcggtcgtcgtgcaggacgacttcggactggtctacggaatgctctatgcgctcacgggcgacggtcttacggagcggcagctgtcggattatgccggcctgctcaaacgcgagctgggcgatctggacggtgtggcgcgtgtcgagatctacggcgaacgcgaagagtgcatcgacatttcgatcctgcccgaaaagatggcgatgctcggcgtcagtccggccgaggcgctggcgacgctcaacgggcagaacaacgtctactatgccggatattacgacaacgggcccgaccgcatccgcgtggccgtcgccgacaagttccgcgccgtgaaggagatcgagagcatggtcatccaggggcacgaggacgaccagctacggttgtgcgacatcgcgcgcgtggagcacggctacgccgaacccgtgcgcaacgagatgtcctacgagggccagcgtgcgctcggcatcgccgtcgcggcggcttcgggcagcgacatcgtcaaggtcggggccgaggtggaacgctgtctggccgagttgcaggccgagcgcttccctgcgggagtcgcctgccacaagattttctaccagcccgagcgggtcaaggatgcgctggggacgtttctgataaacctgatcgagtcggtggtgatcgtcgtggccattctgatgcttacgatgggtttccgcagcggaatgatcatcggcatcagtctggtggtgaccgtcgtgggatcgttcctgattctggggatggccgacggaacgatgcagcgcgtgtcgctggcggcgttcatcctggccatgggaatgctggtcgacaatgccatcgtgatcgtggacggcatcctgatcgacctgaaactcgggaaaccgcgccgcgaggcgatgacggccatcggccggaagacggcgatgccgctgctgggcgcgacgctgatcgccatcctttcgttcctgccgatcttcctctcgcccgatacggcgggtgtctacgtgcgcgatctgttcatcgtgctggccgtgtcgctgctgctgagctgggtgctggcgctggtgcatgtgccgctcatggccgacgcatggctcggtcaacctgctgctccggccggcggcgcgacgctctacgacagcgccgtctaccgctggctgcgtgcggcgctcggcttcggcctgcggcatcgctggtcgtcgatcgccatggcgctcgtgctggtggggctgagcgtctggggctacggttacatgcgtcagggcttcttccccgatatggtctacgaccagctctatatggagtacaaactgcccgaggggacgaattcgacccgcgtgaaggccgatttggaggagatccgccgctatttgaagagccgtccggagatccgctcggtggccgcttcgatcggcggcacgccggcgcgctacaatctggtgcgcagcatcgccacgccgtcgctttcgtacggcgagctgattatcgatttcgagtctccggaggcgctggaacgcaatatcgacgacatccagcagacgctttcggatcgctaccccgatgcctacgtcaagttgaagcgctacaacctgatgttcaagaagtacccgatcgaggtgcagttcacggggcccgatccggccgtgctgcaccggttggccgacagtgcgcgctgcatcatggagcgcacgcccgaggtgtgtctgattacgaccgactgggagccgcgcattccggtgctgaacatcgactacgaccagtcggccgcacggcgcatggggttgagccggcaggatatcgccgtctcgatgctgtcggctgcgggcggtattcctgtcggggctttctacgaggggacgcacaagaatacgatctatctcaaatgtacggaggccgacgggaagccggtcgacaacctggaaaacgtgccggtcttcccgatgatgcccaatctggcggggttgttcgacgaggagctgctcctcaaactcaaatcgggagcgatcgaccgcagcgagttgctggaatccgtcctgcataccgtgccgctgaaacaggtgagccgcggcgtacaggtcgagtgggaggatcccgtcgttccgcgctacaacggtcagcgtgcccagcgggtaatgtgctcgcctgcgcccggcatcgagaccgaggcggcgcggctggctgtcgccgaacgaatcgaggcgattccgcttccgtccggatacgcactgtcgtgggagggtgagaagggcgccagcgacgagacgatgcgctaccttttcaagaacgtgccgctcggcgtcgtgctgatgatcgccatcctgatcctgcttttcggcgattatcgcaagccggccgttattctctgctgcattccgctgctgggcatcggcgtggtgggggcgatgctgctcacgggcaaggtcttcaccttctgcgctattgtcggcgcactggggctcgtgggcatgatgatgaagaactgcatcgtgctcatggacgagatcggcgcgcagatcgccgccggcgccgatcccgcctcggcgctcgtttccagttcggaaagccgtctgcggccggtgatgatggcttcgctcacgaccattctgggcatgattccgctgctcggcgacgccatgttcgggtcgatggccgcgacgatcatgggcggactgctgttcagcaccttcgccacgctcttcttcgtgccgattctctatgcgttgttctttaaaatcaggatagatcgatga

SEQ ID NO: 1157 - DNA, 1818 bp, Alistipes obesi
atgcggaaaccaaccatgaaaaagatcatattaggtgcagcgctgtgcggactcctcgccgcaggctgctcgctcgacaagagctatctcaacggcccgaacgcattgaccttccccgcatccaaagcggaggtggaggcgggcgtattcgccgcctacaagggtctgacgctgatcgacgcctcctcgacgcccttccccggcatccaggacaacgccagcgacatcggcgcatcgcgtctcaacgccgctaactacaactaccagcagcagtcgaaacttcccaccgacaacgcatgggtcgaaaaggtctacaacaacatctacaagaccgcggcccgcgccaacctcgtgctcgacggcatcgacaaggtgcgcgatctgatgagcgaacaggagtacaacatgtacaaggccgaactgctgctcacgcgcgcctacgtctacgaatggggctgccagctctacggcgacattccctacatcgatcacgtgctggggctgggcgacagctatacccgcacgccgcgcgccgaagtcatcgacaagattctcaacgaggatctcaaagacgagatgctcgacttcctgccgctgcggcacaacaaggcgacctacggctcgacccgtctgggccgcgtgggcgcctacggactcaaagcccgcatctgcctgaactggggattcttcgaagaggccgccaaatacgccgacaaggcgctcacgctggccaaggatgccggctacgccctcgaaccctacgatacgcgcttctgcggcgaagactacaccaagggcgaacccagtgcgacgaacctcttcggcctgagcggccacgccaacagcgacgaatggatctgggccttgcagtacaacgccatgatatcgggcaaccagcacaacgccggatactacgccgcaccgcgcatcgccggaggctgctcttatttcagccccacgcagatgttcatcgacgcgatccagtgcaccgacggcaaatcgatcgccgaatcgccgctgttcgactacaaggagccctggaaaaaccgcgatccccgtctcgacctcttctgcgtgcggccgggttcgcgcgtgctgggaatgcagttcgaaaccaacccctcggttcagaagatcatgaactacaacgacaaggaggagggtgtgctggtggccaattcggaggcctacggcaccaagtcggagtacggcgccaacggatcgaagggcccctgcggctatctgtggcgcaaatacctcgacatcgaggagtacaggaccaacaacggattcggcaccaagtcggtctgcacgctgagctatccgctcatgcgtctggccgaattgtacctgatccgcgccgaggccaacatcgaatgggcgggcggcgatctgggcgtcgccaaagccgacatcgagaccatccgcggccgcgcccacatgcccgtactgacggtatcggaccgcaacgggctgcgttcggcactgcgttacgagcgcatggtcgagttgtgcaacgaaggattccgctggttcgacatccgacgctggggcattgccgaagaggtgatttcgggaacgctctacgctccggcatcggacggttcgatgtcgaacgccattcctacgatcgacgaaaactggcacgtgacctacaagggcgataccttcgacggaaagaagatcaacctgcgcaaattcatcgacatggccttcgacccgatgaaggactacctgtggccgattcccgaaagcgagcgcatcgccctgccgcagatcacgcaaaaccccggctacgcgggtttcgcagcggaataa

SEQ ID NO: 1158 - DNA, 4629 bp, Alistipes obesi
atgcgcaaagttacgaaaatattggggaaagtgttatcgacggcggttttgttgctgatcgtacttccgcttgcattgtctttgctgctgagcatcaacgccgtgcagaacttcgtcgtgggcagggccgcgcagttcgcgtcgcgcaaactcgaaacggtcgtccgtatcgatcgggtggatatcgggattttcgaccggatcacgctcgaaggactttatgtcgaggattacggcggcgatacgctgctctacgtcggtaagctgcacgccttcatcacccagttcggcattttcagcaacgggttcacgttgcgtcacggccggctgaccgacgggaagttctatcttcgggagatgcccgacggcgtgatgaacgtcaagcagatcgtgtcgcgtatggggcggaaggagaagaaggaagagagcgatttccgtctttcgatttccgcgctcacggtcgagaacctcgaattccgtcttgaaaaactgcaacatcgcaatccggtttacgggatcgatttttcggatatggacatccgcgacatcgacgccgtgatcgacaatttcaccatcgacggcggcgctgtcggcgccgagatcggccggttttccgcacgcgagaagagcgggttcgagatcgacgatttcggcgggaaattctttctggccaacggttgtatcggcatggaaaacgcgcggctggtaacgccgcattcgaacgtctcgatccctgcggtctcgatcgtgggcgattcgtgggccgaatacaaggagtatgtcgatcgggtgagcatgacggtcgaggtgcgcaattcgatgctttcgagcgacgacgtagcctacttctcgcccaagttgcgcgactggcggctgacgttgcgcaacatcaacctgctcttcgacggcgtggtttccgatttcaacgccgatctgaaaagcctttcgttcggacgcagcagccgcgtgcatgcgcgcggacgggtgacgggattgccgaagatcgacgatacgcacttctctctgacgttcgacgacgtgactaccgaggcggccgatctcggccaaatcgccgccaatgtcgctcgtaaggagttatcggccaagatgtccgcgatgatggatcgtgccggtgcgttgcggctgaccggcgaggtggagggaacgctcgcttcgttcgattcgaaattcgccctgtcggcacccgtcggttcggcagaggccgagttggcgatgcagcccgccgaccgccgtcgtctgcgtccggtgaaggggcgtatcgcggtgaccggattccgcgtcggggagctgttggagcagccgaatctgggaagcgtcagctgcgaggcggggttgaacggcgtcgtgggaaaggggctgatcgacgcgcgcgtcgacggcagcgtttcgcagctggaattcaacggctatgactacgattcgctgcgtttcggcggccgcctgaccgaaaagaccttcaacgggcacgtccgggccgacgatccggcgctccggttcgattttcagggcgaggtgggattcaatcccgaacggccgcactacgatttcgacctggatctgatccacgccgaccttgcccgtatgcatctcaaccgccgcgacagcgtctcggtgctttcggcgctggtcgaggcgcgcgcttcgggacggacgctggacgacctgaacggcaaggtgaccgtgggcgacgtggtctaccgctacaatgccgatacgctccgcacgacgcggcttacgctggacggacagaacagtgccggcagcaaatacctgtcgttgcagtcggaattcgccgacgcgaccttccgcagccggaccgattacaagaccgtcttcgaatatctgcggtcgagcctcgaaaaatacatcccgctgctctatgacgagcggaaggcacgcaaacgggccgccggcgccgtgagcgtcgtggacgactattcggtgctgtcggtcgacgtgaagcacttcacgccggtggccgacgcggtggccgacggcctgcaaatcgccgacggatcgcagttgcggctgttgttcaatcccgccaacgacaaactgtcgctcaaagcgacttcggagtacatcgaacgcgagcggatgctcgccacgcggctgaatctcaatgcgacgaaccgcggcgattcgctgtcggtctatctgcgttcggaggatttctacgtcgggacgtttcacatgccgcagctgtcggtcatgggcggtgcgcgcagcgaccgcctgcggctgtcggcgggattcaacgatacgacggcccgcgtctcggctctgctggggctcgaagcgctcgtcgggcagtcgccccagcgaggccggtcggtcgacgtgcggctgctgccgtcgcacatcagccgcaaggggacgacgtggcagatcttcgcccgcaacattcagatcgatacggcgcgcatagcggtcgaccggttcctggtgatgaacagggatcaggagttgctggtcgacggcgtggcttcgcgccaccggcgcgattcggtgctgttgcggttgaagaatttcgatctcgcgccgttcacccagatcgtcgaaaacatgggttatgtcatcgaggggcgcacgaacggtcaggcggtggtgaaatccgcgctcggaggtaccgagatcacggccgacatccgaatggacagcgtcgaggtgaacgacatcccggcgccgccgatgcgtttcacctcgatgtgggatttcaagaacgaccgcgcgcggctgacggtgaccgatcgggagaagcgcgatacgctcatacgcggattctacgcccctgcgacggtgcgttactatgccgaagcgcggtttccggggatccgcatgaacctgctcgatccgatgctcaaaggggtgatctccgatacgcggggagtggccgaggccgcgcttacgcttaccggtcagcggcgtgcggcgcagttgtcgggtgcgatccggatacgggatttccatacgaaggtcgattatacgcaggtgggttacgatgtgtccgaagcgctgctcacggtggagaacaaccggcttcggatgcagcaggtgcaggtggccgatcagttgggcaatcgggggatcatggatttcgacctcaatctgcaacatctgtcgaatatctcctattcgctgacgatgcagccccggcggatgctggtgctcaacaccaccgagaacgacaacgacctcttctacggcagggtcttcgccacggggcgcgcgaccgtcgcgggcgacaaggggagcgtgcgtatggacatcgtggcgacgacggacgacgattcggccttcttcctgccgctttcgagcaagtcgaacgtcgcgcgcgccgacttcatcaccttcgagacgccgcagcagaaggccgatacgctgaacatcctcgaacgcaagaagctgatgttcgaacgcaagcacaagccccaggccatcgagggcaattcgatggatatcgacatgacgctcaacgtgcggcccaacgccgacttccagctggtgatcgatcccacggtgggcgacatcatcaaggggcgcggcgagggaacgctcaatctgcatatcaatccccgttcgaacgtcttcgagatgtacggcgattatacgatcaccgaaggaagttatctcttcacgctccagaacatcatcaacaagcgtttcatcatcgagaacgggtcgacgatccagtggacgggcgagccgctcgacgcgcggctcaatatcaacgccgtctacaaactcaaaacctcgctgcaaccgctcatcggtacgagtgtctcgtcgggcggcggcgacatgaatctcaaccgtgcggtacccgtcgagtgcatcatcaatctgagcgaccggctgacccatccgaccgtcaccttcgacgtgaaggtgcctacggccgacgccgaataccagacgatcatcgccaatacgctcaacacgcagtcggccatcgccgaacagttcatgttcctgctcgttaccaacagtttccattccgacacgtcgggcggcggaaacaacctcggcgctgcggcttcggccgcgaccggtttcgaactgttgtcgaaccagttgtcgaactggctttcgaccgacgactacaacatcgtcttccgctaccgtcccaagtcggagctgtcgggcgacgaggtcgatttcgggttctcgaaaagcttgataaacaaccgtctgttcgtcgaggtggagggcaattacatgctcgacaactcgcaggcagtcaataaacagatgtccaacttcatgggcgaggcctatgtcacgtggctgatcgaccgtgccggaacgctcaaattgaaggggttcacgcagaccatcgaccgtttcgacgagaaccagggtttgcaggagaccggcatcggcatctattacaaggaggatttcaataacctgaaagacctcaaagagcggttgaaaaacaagttccgcagccgccgcaagcgacagcagctgctcgaacgccggcaggccgccgattcgctgcggctcgtcgaacgccggcgtgcggccgattcggtacgcagagcgtcgccggccgatacggtctcttccgcctcggtgaaaaaagacaagaacttaaataaataa

SEQ ID NO: 1159 - DNA, 2676 bp, Alistipes obesi
atgattatggcaggtacggataagaaatatgtagagactccgctgatgaagcagtactaccagatcaagtcggttcaccccgatgcgatcctgctcttccgcgtgggcgatttctacgagacgttcggcgacgatgcgatcaaggccagcgggattctgggcatcacgctcacccgccgcgccaacggggcggcgaccttcgtcgagctggcgggattcccctaccacgccatcgacacctacctgcccaagctggtgcgggccggggagcgcgtggcgatctgcgaacagctggaagaccccaagctggtgaaaggactcgtcaagcggggcgtcatcgagctggttacgccgggcgtcgttctgggcgacaaccttctggccaacaaggaaaacgtctacctggcttcggtttacttcggccggcagaccacgggcgtggcctttctcgacatttcgaccggcgaattctacgtggccgagggaccggacaactacatcgacaaactcctgtcgaatctctcgcccaaagagatcatctaccagcggggattcgacgagcggttccggcaggctttcggcacgaactactacacctacaagctcgacgattgggtcttttcggaggaactgaaccgcgaaaagctctgcaagcagttcggcacgcagtcgctcaaagggttcggcatcgaccacatctcggcaggcatttcggccgccggcgccatcctctactatctggaattcaccgaacacaaggagatcggccacattgcatcgatctcgcggatcgaccaggacgactacgtctggatcgacaagttcaccatccgcaacctggaactcttcactaccaacggttcgcgcgacaggagcagcttcgcaaacgtgatggatcgcacgctcacgccgatgggcggccgtctgctcaaacgctggatagccatgccgatccgcgacatcgggcgcatcaaccggcggctggacgtggtacagcgcttcgtggaggacagcgatctggcggaagccgtcggcgagcaggtctcgctgatcggcgacctggaacgcatcgcttcgcgtatcgccgccgcgcgcgtgacgccgcgcgaactggtgcaactgaaaaattcgctcgctgcgatcgaactgctcaaagcgatcctcgaatcgacggacgacgggaatctccaccggctcgccgccgagatcgacgtgctggcgcagatgcgcctgaaactcgaacgggagatctatcccgatccggcgaacaaccagattcagaagggcggcgtaatcgccgacggggtcaatcccgagctcgacgacctgcgccgcatcgctctgcacggcaaggacgtattgcagcagatccagcagcgcgagagcgaactgacgggtatcccgtcgctcaaaatcggctacaacaatatcttcggatacttcatcgaggtgcgcaacgcccacaaggagaaggtacccgatacgtggatccgcaagcagacgctttccaacgccgagcgttacatcaccgaggaattgaaggagtacgaagagaagattctcggcgccgaagaccgcatcctgacgctcgaacaggagatttacaatgcgctgatcgccttcgtttcgcagtcgctgtcccaactgttgcgcgatgcacacgccgtggcgcgcgtcgactgtttcctgtcgttcgcccgcatcgcgcgcgagcgcaactacgtgcgccccgaactggacgacggggcgcgcatcgacatcgaacaggggcgtcatccggtcatcgagacgctgatgcccgtgggcgagaaatatatccccaacgacatccggctcgacgacgaggagcagcagatcgtgatgattaccggtcccaacatgtcgggtaagtcggctctgctgcggcagacggcgctcatcatccttatggcgcaaatgggctcgttcgttccggcacgccgggcgcacatcggcgtggtggacaagattttcacccgtgtcggcgcgtcggacaatatttcgcagggcgagtcgaccttcatggtcgaaatgctcgaatcggccagcatcctgaacaacatctccgaccgcagcatcgtgctgctggacgagatcggccggggcacgagtacctacgacggcatttcgatcgcctgggcgatggtcgaatacctgcacaaccaccccacggcccatgcgcggacgctcttcgcgacccactatcacgagctgaacgagatggaaaagatgtacccgcgcgtgaagaactaccacgtcacggtcaaggagatgaacaacacgatcgtcttcctgcgcaagctcgaacgcggcggcacggaacattcgttcggtattcatgtcgccaaaatggccggcatgccggcgtcggtcgtgtcgcgcgccgacgagattctcaaaaacctggtgaaggtctacggcacagacgagatcgtgccgagcaaaagccccaaactccgagggcgcaagcaggcgtcggtcaaggatgcggtcgaagaggccgacaagggggcgtcgatgcagttgtcgatgttccagctcgacgatccggtgctggtgcagatccgcgatcagatcaagggactggacatcgattcccttacgccgctcgaagcgctcaacaagctgaacgagatcaagaagatcgccggtatctga

SEQ ID NO: 1160 - DNA, 3258 bp, Alistipes obesi
atgaaacgttacaaccgttggaacaacatcgtgggatgggcggtcttcgccgtcgcggcgctgacctacctggccaccatggaaccttcggcaagcctctgggactgctcggagttcattgccacctcctacaagctcgaagtgggacatccgcccggagccccgctgttcatgatgatggcgcgtctggccacgatgctggcaccctcgaccgagtacgtgccgctgatggtcaacgccatgaactcgctggcgagcgccttctgcatcctgttcatgttctggacggtcactcacctcggccgccgcatctactcggcgcagggccgcgagctgaccgacgccaacatgtggaccgtattgggtgcgggcgccgtcggcgcgctggcctacaccttcaccgacaccttctggttctcggcctacgagggcgaggtctacgccctctcgtcgatgttcacggcgctcgtggtgtggctcatgctcaaatgggaagaccaggccgacgacccccacgcgacgaggtggctgatcctgatcgcctacctcatgggactctcgatcggcattcacatcctcaatctgctgaccgttccggcgctggtctacatctactatttccgcaaatacgcgaccgtgaccttcaagggattctgcatcgcatcggtcatcgcgctggcgatcctctggttcatcaacggactgattatcccctacacggtctacatcggggcgatggtcgacgtactgttcgtcaatacgttcggcctgccggtcaactcgggcatcgccgtcttcgcactgtcgctcttcgccctgctcgggtggagcgtgtggtacacccaccgccgcggccgcgtggtgtggaacacgctgctgctggccaccacgatgatcctgctgggatacagttcctacgctacggtcacgatccgcgcggcggccaatcctccgatgaacagcaacgacccgtcgaatccccatgcgctcttctcggtgctcaaccgcgaccagtacggcggccggccgctgctctacggcgcctactactcggcgccggtcgaaagcgtcgtcgagtcgacgcgctactacatcgacgacgaaggccgctatgccacggcctccttccccacgggctacacccacccgcagcagttcatgcacctcttcccccgcatgtggaactacgccaagagccccgacgaatacaaacagtgggcagcctaccgcaccaaggtggagacgctgcgcgacgagcagggcaacgtcctgcgcgacgagaaagggcagccgctgcgcggcgaggtgctcgactacggcacgaagcgcacctacgacgacggctactccgagccgcgcgtcatcacggagccgacctttttggagaatctcaactacttcttctcctaccagctcaactacatgtactggcgctatttcctgtggaacttcgtcggccgccagagcgacatccaacccgccggttcgacgacgatcaccgacggcaactggctgtcgggaatcgacgcgatcgaccgcatctacctggggccgcaggagaatctgccgcgcgaagtggccgacaacaaggcgcgcaacacctactatttcctacccttcatcctgggcctcatcgggttgatctaccagctcaaccgcgacccgaagaacttcctgatcgtgctgtcgctcttcgtgatgatgggtatcgcgctggtggtctacttcaacacctcgcccggcgaaccgcgcgaacgcgactacgtttacgccggatcgttctacgccttcgccatgtggatcgggttcggggtgatggcgttcaaggacctcatcgtccgcctcaccaagcgcgacgaccgcacggccgccgtggcggcgaccgtcatcggtctcgtggtgcctggcattctctgcgccgagaactgggacgaccacgaccgttcgggccgcacctacgcccacgacatcggctggaactacctgcaatcgacgcttcccaactcgatcatcctcaactacggcgacaacgacaccttcccgctgtggctcaaccaggaggtcgacggcctgcgccccgacgtgcgcatcatgaacacgagctatctgggcggcgaatggtacatcgacgagatgaagacccgggccaacgaagccgccggcgtgcccttcaccctgccgcgcagcaaatactggtaccgcaacgactacgtgcccgtctacgagcgcgtgaaccgtccggtggaggcgcgcgaagccatcgagttcttcgccagcgacgaccagcgcaccaaggtgcagctgtcggacggttcgtcgagcgactacctcccctcgaagacgctcatgctgcccgtcgacaagcagaacgtcctgcgttcgggcatcgtcgcagagaaggacaaggatctgatcgtcgacacggtctatatcaagctgtcgggcgactacctcaacaagggcgagctgatgatcgtggacatgctctcgaactacgactggacgcgcccgatctacctcacgcagccctacatcttccagaagttcgggctggtcgactacctgcaattcgacggctacgcctaccgtttcgtaccgatcctcacgccctaccgtcaggcgggcgaagtgggacgcatcgaccccgaatatgccgtgccgctgctgctcgacgtcttccgctacggcaacctcgacgacgagaaggtctactccgactacttcacgcagtacaacctctcggccgcccgcgcccgcgaagccttcgcccgcgtggccaaggagctgatccgccgcggcgacgagaagccgaacttccccgacagcctcggcatcaccgaagccaccaaccgcgagctggcgatccgtctgctcgacgaggggatgcgccgtatgccgcccgcgcaggtgcgctacacctcgaacaacacgctgcccttcatcgaagcctattatgcggccggcgccgcagacaagggcgacgccctgatgctggactacgcccgcaacctgatggagtacgtcgactattacttccagttcgacggctggcaatacgattcgatcaccgacgcactggacgagaaactcgacctgctgggcaacctctactcgatggccggttacctcaaacgcgacgccgtgctgaccgagctgaacgcctactaccgttcgctgggcgtcacggaggaggagctgatccagcccgattcggcccacctcgactacgaggtctccgacacggccgcggtgaattga

SEQ ID NO: 1161 - DNA, 2790 bp, Alistipes obesi
atggcatcgacccaatccaaatcggcaaaggcctccgcaacgcgctccgacggcgagagcgcgcggtggattttcggcctgctgctgctctttgccggaatctttctggtggcgtcggtggtcttctactacttcgactggcgcggcgattacagcgcgctgcacggcatcggcagcgagaatcccaatttcgacgattcgatcgacaacccctgcggccgtctgggcgcatggacggccgagatgctcgtcggccgttcgttcggtttgttcgggatcgtcgtcccgatcatcgtgacgatgatgggcgcgcgcatcctgcgccggcggcccgtccttttccaccactcggtgctcagctcgctgctggtgctgatcctggggtcgctgacgctcggcgtcgccttcgacgacgggtggggaatgttcaacagcggctggggcggcgcctgcggcatcgaaatgggacgcctgctgagcggaagcatcggtatggtggggtgcttcatcgtgttgctgggcggctggattctgacgggcgtcttcatcaaccgcaatttcatcaatacggtcaaccgcgccggcaacgtgctcgtcgacaagagcggcaagctggtgggaacggtggcgcagaaggtgccgtcgttgcagtcgctcgtcgtctcccgtccccgggaagaggaggacgacgagcaggcgacgcctgcggagagcgacgtgcgcgaagtgcggccgacccctccgcccgcgcccgtcgcggaggaggagccgcagcgggagcgggccgtcagccctgctgccggtggggcgcaggccgcggtcgcggccgacggcgaggaggacgatcctttcgtcgtgcaccctgtgggcgtggctcccgtttcgggcggcgtgcagaccgtcaacgactactatgcccgcaaccgtgtcacggacgacgatccgttcgaggagcatacgctcggcgcggaagagccggagggtgcggacgcagcgccgctgccgtcgcggctggcgggcgaggaggacgaattcgtcgagatcgacctttcggacggcacggacgatacgggcggtgcggtgccggccgatactccggcaggggcggaggatgccgatgcggaggagaatcctttcctggacgacgacgaacctttcacggtgaaggatgcgggtgcgcccgcggcggccggcgatgcgcccgaaggggtggtggtgaccgtcgaggagcaccacgatgcgctgttggacgaacaccggatcacgaccgaagcctacgacccgttgaaggatctggtcaattaccgccgtccgtcggtcgcgctgctcgaagattacctctccgactcggaggtgaccgacgaggagatttacgagaacaagtcgcgcatcgaggagacgctcaaaaatttcggtatccccattcagcgcatcaaggccacgacgggccccacggtgacgctctacgagatcgtacaggcccagggggtcaagatttcgcgtatccagaatttgcagaacgatatcgcgcaaagcctcaaagcgctgggtatccgcattatcgcaccgatccccggcaaggggaccatcggtatcgaggtgcccaaccgcaacaagcagatcgtgtcgatgtattcggccgtgcgctcgatgaaattccaggaggcgaaggccgaactgccggtggtgatcggccgcacgatccagaacgagaactacgtcttcgatcttgcgaaaatgccccacctgctggtggccggtgccacgggacagggcaagtcggtgggactgaacgccattatcacctccttgctctacaagaagcatccggcgcagttgaagttcgtgatgatcgaccccaaaatggtcgagttttcgctctatgccaagatcgaacggcatttcctggccaaaatggagtcggaggaggaggccatcatcaccgatccgcgcaaggcggtctatacgctcaattcgctctgcatcgaaatggagaaccggttgtcgctgtgcaaggacgccggtgcgcgcaacatcaaggagtacaacgagaagttcaccgcgcggcggctcaatcccctcaaaggacaccgctacctgccctacatcgtagtggtggtcgacgagttcgccgacctcatcatgacggccaaggaggtcgagggccccgtgatgcggctggcgcagaaggcgcgtgcggtgggcatccacctcatcatcgccacgcagcgtcccgacgtgaaggtcatcacgggcggcatcaaggccaactttccggcgcgcatcgctttccgcgtgatgcagatgatcgactcgcgcacgatcatcgaccgtccgggcgccgagcagctgatcggccgcggcgacatgctcttctcgaacaacggcgaactgacgcgcatacagtgcgcactggtcgatacgcccgaagtggagcgcatcgtggagtatatctccaagcagcagagctatacgtcggcctacaacctgcccgactatacgcccgactcgggcggcggcgaggcggcgctgggcagcgagagctccgcaccggtgaaatacgactcgaaattcgccgagatcgcccgcgacgccgtgtcgcaggggcagatctcgacctcgatgatccagcgcaactacgaagtgggcttcaaccgtgccggccggatcatgatgcagctcgaacgggcgggcatcgtggggcggcaggagggcgccaaaccgcgcgatattctctatcacgacctgccgagcctcgaagcgaagttgcaggaattgggtgttttctga

SEQ ID NO: 1162 - DNA, 2880 bp, Alistipes obesi
atgaaaaaactgtttctggtcgatgcctacgcactgatctataaatactattatgcgtttctgacgcggccgatgcgcaaccgtacggggatgaatacgtcggtcgttttcggtttcgtgaagttcctgcgcgacatcctcaaacgcgaaaatcccgacctgctgggtgtggcgttcgatccaaagggcggaagtttccgccgcgaactctaccccgaatacaaggccaaccgtcccgccacgccggaggacatcgctctgtcgatcccctatatcaagcggattctggatgcgatgtgcgtgccggtgctcgaagtcgagggattcgaggccgacgacgtgatcggtaccctgtcgcagaaggctgccgccgaagggtacgaggtcttcatggtgacgcccgacaaggattacgggcagctcgtgcgcccctgctgcaagctctacaagcagaagggcgacggcatcgagatcgtcgactgcgacgccatccgcgcacattacggattcgacgatccgacgctcgtgcgcgacgtgctggcgttgtggggcgatgcctcggacaatattcccggcgtgccgggcatcggcgagaagggtgcctgcaagctggtgcagacgtggggaacggtcgagaacattctctccaacgtggagcggatcaagggcaggcagggcgagagcatcgccgcgtggggcgacaaattgctgcttgccaagaggctcacgacgatccggctggacgtgccgatcgaattccgccccgaggagttgacgatgtgtccgcccaatctggacgaactgcgtgcgcttttcgccgaactggatttcacgatgttcctgcgcgatctgcaaaacggggcgccgctcgaagagagcgacgggccgcggcaggacccgcagcgtcagctggccgagatggcgcgggccaaatcggctgccgccaagaaggcggcgctggtcgggcagggcgatctcttcgcaccggccgatccggcgcctgcggcggcagcgcccgtggcggacgatgaggaggtcgacgaaacggatgcgctgcctgccgaacccgagatggagagtgcgcagacgacgcctcacgactaccggatcgtccgcacggccgacgaactgcgcgcgatgatcgccgagatacgccgttatccggagttctgtttcgatacggagacgactggtttcgacctcttcaacgaccgcatcgtgggcatgtcgttcgccgtcgtgccgcacgaggcctggtatgtgccctgcgacgaacgttcgacgccggagtatgccgggctgctgcgtccgttgttcgaggacgaaacgatcgccaagatcggccagaacatcaagttcgatctgatggtgctgcggcgtatcggtctggcggtgaggggcccgaagtacgatacgatgatcctccattatctgctcgatcccgagtcgcgccataacatgaatgcactggcggccaagtacctcaactataagccgatcgagatcgaaacgctcatcgggcgcgggccacgtcagctgacgatggatctggtgggcgtggagcgcgtggccgagtatgcggccgaggacgccgacgtgacgctgcggctcaaacgggcgctgcttccccagatcgaggaggcggggctgcacgatctctatttcgacatcgaggagccgatgatcgaggtgctggccgacgtcgagatggccggcgtgcgcatcgactgcgacgcgctggcgcattacgccgtggaactgaaccgccgcatggcgcagcttgaagccgatatccgcagcgaagcgggcgaggcgtcgctcaacatcaactccacgcggcagttgggcgaggtgcttttcgccaaaatgcgcatcgccgagaagcccaagatgacgcgcacgaagcagttcagcaccgacgaagagtatctgcaaacattcgcgcacaaacaccggatcatcgacctgatcctcgaataccgcggcgtgaagaagctcctttcgacctacgtcgaggcactgccgcagctggtcaaccgccgcacggggaagattcatacctcgttcaaccaggccgtgacggctaccggacggttgtcgtcgaccaatcccaacttgcagaacattccgatccgcgacgaactgggcaagcccattcgccgcgccttcatcccgtcggacgacgaccatgtgctgctgtcggccgattacagtcaggtcgagttgcgcctgatggcgcatctgagcggcgacgaggcgctgatcgcggcattcgagcacggcgaggacatccatgccgcgacggccgcgcggctcttcggcaaaccgatcgatacggtgacgggcgacgagcggcgcaaggccaagacggccaatttcggcatcatctacggcatctcggccttcgggttgagccaacggctcgacattccgcgcaaggaggccaaagagatcatagagggctatttcgcctcctaccccaaggtgaaggagtatatggagcatgtggtcgagcgggcgcgcgaggtgggttacgtgacgacgatcttcgggcggcggcgttacctgaacgacatcgcgtcgcgcaatgccgtggcgcgcgggctggccgaacgcaatgccgtcaacgcccctattcagggcagtgcggccgacatcatgaagatcgcgatggtgcatatcgccgaagcgttccgccgcgaaggaatccgctcgcagatgattttgcaggtgcacgacgaagtggtgatcgacacgctgcgcagcgagttggaccgcgtgcgcgaaatcgtcaccgaggcgatggagcaggcggcgcatctcaaagtgaaactgatcgccgaatgcggtgtgggcgagaactggctcgatgcacattga

SEQ ID NO: 1163 - DNA, 2430 bp, Alistipes obesi
atgaaaaataatccatttctatctattctcatcccgctttggggagttgtctccttgctggcggggtgtgccgacggcggcgatgcggtgagcctgttgcaggtcagcgccgcgagggtcgaggtcggaaagaacggactgaccgccgacggccgcatcccgtcgatcgaggtcgagtccgacggttactggcgcgtgttcgcggagtcctccgccgcgtgggtgcggaccgatccttcggctgcttcggggagctgtacggtgacgttgagcgtggaggccaacgacggcccggcccggacggccgtgctgcggatcggctgcggcgacggtacgacgcaagaggtcgaggtgcgtcaggagggcgccggctcccgcttgcgctactatgaagattcgttcggcgccggtgccgacgaggccgtcgcaccctccgattacgaggatttccgcatcgcgggctgcggtgcgctcgaaacggtctacggggccgaacgggcgacggtggccgccgacgctccttcgacgggatacgaaggtgcgagcggcggcgggaatatcgtcctggctgcgggcggactctttacgctgggaccggtcgatgtgaagggtgcgctcgatctgcgcttctcgacggggctctatctgccttcggccgaagcggccggaagcgtgcggttgcaggccagccgcaatgcgacgcaatggatcgacgtgccgttcgcggtcgcgccggaggcagggtggagttgtccgatgaccgctttctacattgccgaagacgtgacgcagctctggttccggctctcgaccggggccgatggcgtgcggatcgacgatccggcactcgtcgagggagaggaagccgagggcgaattgctcgaactgggcggggagctggcagcgccggaggggctcgaatgcgcgatcgccgaacggtcgctcaccttctcgtgggatgccgtgcgcaacgccaagagctacgattacgaactgtatacgaaacagggcgtgcgggtggccgaagggtcgacgccgctgacgacggccgccgtcgaggggttggagatgggtacgacctatcgtttctcggtgcgtgccgtacctgccgaagggacgatttacagtgcgtcggaggccgccgagttggaggcgacgaccgtcgggctgctgcccgatcccgaggtgcgtctgctgcgcaagacgcacgggatgctggtcttcgagtggacgaaggatccgtatacgacgacctacggccgccgttacaatttcgtgttggtcgaccgcgacagcgtggtcgtccgtcagcagagtcgggtgaattacgccagcaacgctacctacaacctctcttacgtctacaaccggcaggcgttcggcggattgcagccctcgaccgattacagattctatgtgcagtatgtttcggattccgagcaatacagggattcgaattgggtctgctgcgaggcgacgaccgatccgcggccgcagttgccgatcggttgcctgctttacaaggatttcgaagaggcgtggttcggcggcagcgccatcgatgtggcgtggggacagcacccgtcgggcaatcagctcgatctggattacgatgccgaggagagcatcgaactctatgtggtctacccgattcgttgtatggaggacagtttcaatacggccaagctgcccgaacagtatcgtcgcaaatattggagcggctgggattggagcgatatcggtgaaaaagatatcgccagaaagtcgaatacgggactgttcctgatctgcggggccgtgaagttcggcagcggttcggcctacggccgtatgaccacgccggcgctggggcagtacggtctgagcggagtttcggatatcgtcgtctcgttcaaggcttgtccctacaccgaaccgaatctgaccacgggcaatctgatggtttccccctatattctctgcggcgcgaccttcaatatctcgatctgggcgggtgcaggtacgttcgagaacggttcgaccgagatgacgctcaccaatctcacccccgatcagaccgatgcccagggcaacggacattattcgtggacggagcattcggtgcggatcaagggtgccgattcgcatacccgcgtctccatctcgaccgttgcgcagaaaggctactatcgcatgtggttcgatgatctgatgatcgtgcgcgacgacggcggtcagagcgaaggatcgtcgggctcgggttcgggcggcgattacggcgacggcggcgacggtttcgatacggagggttccgcctcctcgggcggttcggccggagggggatcctatggcgacggcggcgacgggttcgatacgggcggcactccgggcggcactccgggcggctcggcttcgggcggcgattacggcaacggaggcgacggtttctga

SEQ ID NO: 1164 - DNA, 3081 bp, Alistipes obesi
ttggggctgttgaccgtcgcctgcgctgcgccggacgggcgcaatcttccggctgcggaagatttcgagagcctgagcgcgcagttcgcggcaccttccaaggagtacggctcggcgccgctcttcgtctggaacaaggtcgtgacgcccgaacggatcgacgaagcgatggccgacctcaaagacaagggcttcggcggcgtcttcgtacacccccgtccgggcatggtgacgcagtatctcgacgacaactggttctcgctcttccgccatacgatggagaagggccgcgaactggacatgaacgtctggatctacgacgagaactcctatccgagcggtttcgcgggcggccacgtcaacgaggcgatgcccgagagctacgacgagggcgtggcgctcaaatacctgcgtgccggggtgctgcccgatacggtcgaccgcttcttctgctgcctgcgacgcgaaggcgacgccttcaccgacattacggccgaagccgtttcgcggcgtggcgaaaagggcgattactacctcttctacaaggcttacaaccccacgtcgccgtggtacagcggcttctcgtacgtggatctgatgcacgagggcgtggccgacaaattcatcgaactgacgctcgacggttacaagaaggtcgtgggcgaggagttcggcggcaccgttccgggctggttcaccgacgagccgcagatcgtggtgaccgaccgcgagtcgatccgctggacacccgacctgttcgatgccttccgcgcccgctggggatacgatctcgaacccaatctggtctcgctctgggaggaggtcggtccgtggcggcaggtgcggcacaactaccgcgacgtgctgatgaatctcttcctggatcgctacatcaaggtctgccacgactattgcgagcgcaacaacctggtcttcaccggccatttctgggagcacgggtggcccgacatggggcacaaccccgacaacatggccatgtacgcctggcagcagatgccgggcatcgacctgctgtacaacaaattcgatgtcgaatcgcccaatgcccacttcggcaacgtgcgttctgtgaaggaggtcaacagtgcggccaaccagatggggcgcgtgcgcaagctgagcgaatcctacggcggcggcggttgggacatgacgctgcgcgacttcaagcgtcagggcgactgggaatatgcgctgggcgtgaacttcatgaaccagcatatcgcaccgctgagcatcgccggtgcgcgcaagtacgactatccgcccgccttcacgccccattcgccgtggtgggagtattaccgcgagctgaacctccacttcgcccgtctgtcgctggcgctctcgtcgggcggccagtacaacgacgtgctggtgctcgaacccaccacctcgatctggatgtactacacctacaacgcgccgcgcccgaaccgctggcggacgatgggcgaggagttccaggccttcatcaccgcattggaacggcatcaggtggagttcgatctggggtcggagaacatcctgctcaaccacggttcggtcaagggcgaccgcttcgtcgtgggtaaacgcgcctacgggacggtggtgctgccggcgcagatggagaacgtcgacgccgcgacgttcgacctgctcgaacggttcgccgcgaagggcggccggatcatcgcctacggtacgccgcagtatgtggacggtgcgaggagcgccgaggcggaggccttcttcgccgatccggcgaaggtgacgcgcgccgatgcgggcgaaccgatcgactactcgctcttcgctacgcccgaaatcgcattcgatgcgccggagggcaactacctcttccaccatcgccgccgcatggacgacggacagctgttgttcctcgccaattcgagcctcacgcgccccgtccggggtacggtgacgctgcaagggcgtcaggccgcgctgctcgatacccgcacgggcgagatccgcggctacgaggcgcagcgcgagggcgaccggctgacgatcgcctacgatctccatccggccggcagcctgctgctctacgtcttcgacgaggagcgcgaagggttggcacccgcgcctgcgcggcgcgtgctgacggcggttcctgccgcgggaggtctgacggcgaagcccgacgcgcccaacgtgatgacgatcgatttctgcgatctggaactcgacggcaaggtctatccggatctgaacagttacgacgcggccaaactcgcctaccagcatcacggcttcaaggccggcaatccgtggagcacctcggtgcagttccgcgaccataccgtgcgccgcgacaccttcacgatgggcggattcaaggcgtcgtaccggttcacggtgacgtccggtgtcgaccgcagccgcttgcaggccgtcgtcgagcagcccgaactctaccgcgtgacgctcaacggcgtggagctgaaagccctgcccgacaagcactggatcgatcccgaaatgcgcttcatgcccctcggcgatgccgtgcgcacgggcgagaacgtgctgacgatggagtgctcgccgatgcgcgtgctggccgagatcgaaccgatctatatcctgggcgatttccggctcgaaccggccgccaaagggtggaacatcgtcgctccgggcgatttcgccgccggcagctggaaggcgcagggctggccctgctatcccggcaaggtgacctatgcgcgggagttcgatgtcgccgaaaaggcgccctactacgaagtggcgctgggcgagtggaagggtacggtctgcgaggtgctcgtcaacggccgttcggccggtatcgtctatgcggagccgtatacggtcgacgtgacggagtggatcgtggcgggccgcaaccgtgtggaggtgaaggtcgtgggcagcaactacaacctcatggggccgctgcacgccgcgcacttcaaacggatcacgccggccttctggcgcggggtcaaggagtatccctccggtaaggactacgtgcagcaggactacggtctgatgggcgatttcaccctcgcggcgggtcgttga

SEQ ID NO: 1165 - DNA, 3534 bp, Alistipes obesi
atgaaaaaacctgaaaacttgctaacgattccgggtataaaatcgttttgtctcggaatcgttgtgtcggcggcgctgtttctgccttcgcaggcgtcggctgacgacatctccctgaacctgaaaaacgtaaccgtgaagcgggcgatcgccgctctgcaacagtcgcactattcgctcacggtcgatgccagccagatcgacatggagcgtcggatcacggtcgcggcggaggacgaaccgatcgagaacgtcctcgcacagatcttcgcgggacaggacgtgagctatgaaataaacggacggagcatcgtcgtcacgcgccgtgccgtgccgcgcgtggccgaaaaggccgtgtcgcggacgctgagcggcgtggtgcgcgacgacaagggcgccacgatcgtgggggcgacggtcgtcgtcaaggggacgaccaccggcgtgacgaccgacatcgacggccgctattcgctgcgcgtgtcggcggacgatcccgtgttgcagatttcgttcgtgggctaccggacggccgaagtggcggtcgcaccggcgcagacggtcgtggacgtgacgctcgccgcctcgtcgatcgacgtggacgaggtggtggtcgtggggtacggcacgcagtcgcgccatacgctcacgacggccgtgtcgaagatcgccggcagtgcggtggcggcggctcccgtgacctcggtgggcgacgccctgaaaggcaaggtcgcgggtatgcaggtctcgacgaccaactcgctgccgggcgaggcgccgacgttcctcatccgcggcggttcgtcgatcaaccagagcaatgcgccgatcgtcatcgtcgacgggatcacgcgcgccatgaacgacatcaaccccaacgacatcgagtcgatcgaggtgctgaaagacgctgcggcggccggcatctacggctcgcgggcgtcgaacggcgtgattctgatcaccaccaagaaaggtacggtgggcaaggggccggagatcgtcttcgaggggcagatcggctgggagtcgccttcgcgcaaatgggatttcatgaatgccgaggagttcctgtcgttcgtgcgtccggcgatcgccgagtcgtacaacggcgcgtcggtgctcacgtcggccacggccgccggcacgggcaacggcgacggctcgatccataccacgcgcttcctgggcgacggcgaggcggttcccgcaggctggcggagcatgaccgatccggtgacggggcgcacgatcgtcttcaccgataccgacgagcagggacattggttccgcgacgcgctgtgggcgaaggcctacgtgggcgtgacgggcggcaacgagaacgtgaaatacgccgcgtcggtgagttatgccgacgacggcggcgtggtggcgatgaccgactactcggtcttcacgatgcacggcagcgccgatttcaagatttcgaagcggctgtcggcctcgacgaccttcgacctgtcgcgttcgatccgccacccgctcgtcgacaactacttcaacagcctcggacgcggtctgctgatcgcgcccacgcaccgcgactacgacgccgacggcaacctgctgcgcggcggcgacaacaaaaactgccacacggcgatgtggtacgagacctactacgaccgcgaatgcgccgacaagcgcgccacgggcaacttcaacctcaactgggagatcgtcgacgggctgaccgccacggcgcagtacgccatgcacgactacaactaccgcggcagctactactacaagggcaattcgctcgaacagactcgcagctgcaccgagacgcgcacggagacgctgcgcgatcagttcacggcctacctcaatttcgaccgcacgttcaagcgccaccagatcggcgtgacggccggttacgactacatggccgagcgctaccgctacctgacggccaattcgacctatgcgccgtcggacaaggtgcccgtgctccaatcgggcggcaacttcacggccagcaacaaggatacgaaggaggtgctgatctcctatttcggccgcgtgaactacaacttcgacaagcgctacatcctctcgttcacggcccgtgccgacggttcgtcgaaattcgcgccgggcaacaagtggggcttctttcccgccggcgccgccgcatggaacgtctcggacgagaagttctggaacgtgcggccgatcaacgacctgaaactgcgcgtgagctacggcatgacgggcaacaacggcatcgggttgtacgacgcctacggttcgtacagcacggcgcagaactacgccggccactcgacgacgatcgcctcggcgatggccaacagtgcgctgcgctgggagactactacgcagttcgacatcgggttcgatctggggatgttccagaaccgcctgcgcatcgtggccgactactacaacaaggtgactgacaacatgatcttctcgatcacgctgcccgacacgtcggcctactcgtcggtgaaggccaacgtcggttcggcgcgcttctccggtttcgaactggaagtgcactcgatcaacgtgcagaagaaaaacttcacgtggacgaccgacctgacctacacctacaaccgcaaccgggtgctgtcgctgcccgacgagtacaagtataccgacgtcgacggccgcgacgcatggcgcatcggcggctatacgatgaccgagagcggctaccgcttcggcggcacggccgtgggcgaaccgctgggacgcatctacggctacaagatcgcgggcatcatccagtcgcaggccgaggccgacgcggcgctctacgacagccagtcgcacggctaccgccgttcggacggcttctcggagaataccgattcgaaatacaaggggcgcaaggacatcggcgactacgagtggtgcaaccgcgagggttcggcgcgcctggccgacgggcgcgagcagatctcgtcggaggatatgttctatctcggctcggtgatcccgcattcggtgggcggtatcaacaataccttcaaatacaagaacctctcgctgtcggtctatctcgactacgcgctgggacactcgatctacaactacttcaagtcgcgcgtcttccagaacggcatgggcagcaacaacgccaacctcgacaagatggtctacgactgctggcgctatccgggcgatacggaggccaagtacgcgcgcttctacgccaacgatcccgactacggcaaccgcaacttctcgcgcatctcggacttcaacgtcgagaaggccgactatctctgcatccgcgacgtgacgctcgcatacgacctgcccgtgcgctggattaagaagctgggcatgaagaaactcacggtgagcgtcacgggcaatacgctctactacttcaccaaggtttcgggttcgatcagccccgaaagcggcgccggcgccgacggcaatctctacaagagtacgtcgacgggcgatgccacgggcaacatcgcgcccaatgcccgcaaggtgctcttctcgctcaaatgcgtcttctaa

SEQ ID NO: 1166 - DNA, 2016 bp, Alistipes obesi
atgatccgacgcttgtggaaaaccctgaaactcggcttcgaccgctccttttcgggcgccagctggaaacagatcacctggctcttcggcattctggccctcgtgctgggcttctcgctctggatcaaaagctattgcacagccgagctacacgacatgcgcatcctcgaactgctgctcgatcccggttcgttcgtgttgcaggatggcgatccgctgggttatgaacgcctgccgctgctggcgctcaccttcctcggcgcgatcttcttcaccggaggactgatctcggtcgtttcgaacatcctcacgggacgcatcgcccgtttcagacaaggcgaaatccgctaccgcttcgacgggcatatcgtcctgctgggagccaacgacacggccgcaggactgatccgcgaactgcacgccgagccggagaaccgccgccgcgacatcgtgctgctcacgcagagcgatgcagaggctctgcgccggaagctgcacgccgaactttcgcccgccgaggagcgccgcctcatcatcctccacggtcagcgcgactcgcgcgaagaattggagaagatccacatccaccgcgccgaccgcgtcttcgtgctgagcgacgacggcgaactggaacacgactcggtaagcatcagcgcgctggttcagatttcggcgattctcggcgcagcgcaccgccgcgatccgctgccctgccacctgtcgttcgaataccagagttcgttccaggtcttccaactggccgatttcgaagaggccgagcggatgaagagccgcatccacttctcggcgaccaatttccacgagaactgggcgcagcgcgtgctggtgtcgggctgctgcaactgcaacggacgggatattctctatccgccgctcgaccgcgacggcatccgggcgcaaagcgaccgctacgtccacctgatcgtcgtgggcatgagccgcatgggcgtggcgatgggcgtcacggcggcccacatcgcccactaccccaacttcgtcacacagggtatccgcacgcgcatcaccttcatcgaccccgatgcggaacgggagatgaactttctcaaaggccgttacgaaccgctcttccggttgtcgcaccacacgctgcgcaaattcgacgcggccggcagcgaaacgaccaacgtccacaccccgcaggaggattttctggacgtggagtgggaattcgtcgcaggaggcatcgaatcgccccacgtgcgcaaactgctcaaagactggacggccgacgaaaaggcgctccccacgctggcgatctgcggcaactccgcaccggaaaacgtcgccgccgcgctctacctgccgcaaccgctctacgaccggcaagttccgatcttcgtctatcagaaggagacggccaccattctcgaaatcgcccgccgttcgtcccgttaccgaagcgtatatccgttcggcatgatgtgcgaaagctacgacgccacactcaaacagcgcatccgcaaggccaaacgcatcaactacgtctacaaccatttcaccgatgcaaaaaaagctgcgaaaaaagcagcggacgaactcaatgaaaagttcgacttcaaaactttcgcagccggattcgaaattgccgattggccagacgataagatcgaccaatactggaacgatcaatcgctggcgttccaatggtcgaacatctacgccgccaacgccatccccgccaaactccgctcgctgggtatcgatccctgccgtccgcatccgctggacgggcaggaggtggagacggcggcccgtgtggaacacaaccgctggaacgtggagcggctgctgatgggttaccgtccggccaccacagccgaacgggagcgggcgaacgccgacgacgaatataacgaaatgttgaaaaaaaagtatttcatccatatcaatatcgccccttatggggagattcccgaagaaaccaaagaaaacgaccgcatcctgacccgcttcctctaccgcgtggaacagtga

SEQ ID NO: 1167 - DNA, 3099 bp, Alistipes obesi
ttgccggattttggctatcttcgcgaagatttgccgatcggcgatcggaacgatcccgggagaaagataaaagagaagatgagacgaacgattttactgtttgtgacattgttcaccgcgatggaaatttatgcccagtcgggtagcgtggcggcgaccgtgatcgacgcctcgacgcgcgagggcgtgccgggtgccgtcgtggagtttgcgccggcggatcctgcggcgcagaaacgttacttcacgacggggtacaaggggcgcgtcgaggcgacggttccctacggtatctacaaggtttccgtttcgtttctgggctacgaaacgcttgaaaaggagctgaaactgtcggccgccaaaaagtcgctcgggacgctcgagctggcgccttcgtcgaccgagatcgaggccgtggtcaaggaggtgaagtcgatgcgtacgtcgcagaagggcgatacggtgagctacaatgccggagccttcaaggtgacggccgatgccgatgtcgaagggctgctcaagaagatgcccggcatcaccattaccgacggcgaggtcgaggcacagggcgagaccgtgaagaaggtcttcgtcgacggcaaggagttcttcggcgaggacgtaacttcggcgatcaagtcgctgcccgcacaggcggtcgacaaggtcgaggtctacgacaagttgagcgatgcggccgaattttcgggtatggacgacggcgaggggtacaaggcgatcaatatcgtcacgaaacccaacatgcgtcagggccagttcggcaagctctatgccggttacggctaccagcccgaaacagaaggaacgacgtcgaaccacaagtacaacgtgggcggcaacgtcaatctgttccacgggtcgagccgcgtgtcggtgatcgggttgttcaacaacgtcaaccagcagaatttttcgttcgaggacattctgggcgtgtcgggaggttcgggcgtccgcggtggcgtgggggcgctgatggtgcggccgcagagcggcgtggcgtcggtcaactcgttcggcgtcaactactccgacagttggggaaagaccggccggcaggacaaggtgacgttgcaggccagttatttcttcaaccgtacgacgaccaagaactactcgacgatagacaagtggtacgaaactccgtcgccgatcgatacgctgcatacggacggctattcgaacaatacgaacggtaaccaccgcctcaatgcccgtctcgaatggcgtatttcggagaaccagtcgctcatgtcgcgcacgggactcagtttccagagctacgatccttacagcacgacttatggccaccagtggggagagagcggtctgcgcgtggtggacaatttcagcgacggcggccgcacgggagtcaatctgaaccagtacctctcctatcgcacgaagctgggcaaggacggccgcacgctgacgctcgacggcagcgtgcgctatcggaacaacagaggagatacggacagctattcgaaccaggcgcggggtatcgatcccgatctgatcgtcgttcctacggataccctgctgctgcgttaccagcgtgcgcattcgccgtcgttcagctacaacctgcgcggcgacgtgacctataccgaaccggtttcgcagtatgcgcagctgagcctgcaataccgtgtggcctataactatcaggagagcgacaagaaggtctacgtgacgccggacgaccggttcgaaacggctggcgtcgaacccgatccgagcctgtcgcaatcgtccaacacgggctatctgacgcatcgtatcgggccgggtttccgtatcgtgaagggcaagaaccgtttcgtggccaatgtctcctaccagcgcgcccaactgacgggcgaggtgctctcggcgacgaaggtcatgggggcgggcgacgatgcgaagacgtcgcacggattcaacaacctgacctatttcctgatgggacagctcaacatcaacaaggagaattcgatccggctgttcatcaactcctcgaccgacaatcccggtatcggcgagttgcagaacgtctacgatatctccaacgcgcagagcatctcgaaaggtaatccccatctgcgcccctcctactcgaacaacgtgcggttccattacgtgaactccaacgtcgagaagggacgtacgttcatgtggatgttctcgatgcagaatacgtcgaactacatcacgtcgagcatggcctacgacgtggaggtggaggtcccgaccggcgaagtcgacggcggcggcgatcccgtgaccgaaacctacaatccgcacacctattccacctataccaacatggacggctactggaacctgcgcacgcatctgagctacggattgcccgtctcgttcctgaaaagcaacctcaatgtgatggcaggcgtcaactacacgcttacgccgacgctggtggcgcgcaaggcgaccgacggaagcgtctatctgaacaacggcgaaatcgtcggcggcgagcgcaacgacgccagccgtctgagctacgatttccgcgccgtgctgggcagcaacatctccgagaacgtcgatttcaccctttcgtggcacggtgcctacaacatcgcgaaaaactcgctggtcgtcaacgattccgataacaagaaccgctatttcaaccatgtggcgaccgcggcgatgaagttcgtcttcctgaaaagcttcaccttcacggggaatgtttcctaccagcagaatatcggcttcacgaacgattacgacaactcctacgtgctgtgcaacgtctatctgggcaagaaggtcttccgcaaccgtcggggcgaggtgatgttcggcgtcaacgacctgttcgaccagaatacggccttctcgcgcacgaccggttcgggatatacccagaattcgatcaacagcgtgatcggacgctactataccgtgcagttcgtctacaacctgcgcaatttcggcaagcgcggttccaaggacatcaaggattacgacggcatgggggcgctgggcggaaaccgcaggggtgtcggccgtccgcctatggggcctcctccgggcggcagaggcccgatgttttga

SEQ ID NO: 1168 - DNA, 1680 bp, Alistipes obesi
atgaaacgcactcttctcacactggcagccgcgcttttcctgctgcccgcatccgcacagcaagtccccgaatggctcaaagaggggattctctaccacatctacccctcctccttcaaagacagcgacggcgacggcatcggtgatctggaaggcatccgctccaaactgccctacgtcaaaagcctgggcgcgaacaccatttggctcagccccgtcttccggagcgaattcgaggacggcggttacgacatcaccgatttctaccggatcgacccgcgtttcggcaccaattcccagttggtgcagctcgtccgcgaggcccacgacctgggcatccgcgtctgtctggatctcgtggcgggccacacgtcggacaaacatccgtggttccgtcagtcgtccgaagccgatccggaactgcaatacagcgactactatatctggagcgattcgaaggattcgttcccgaccaagaaattcgttcgcagcgacgccgcgcgcgacggcaactacatgaagaacttcttcgacatccagcccgcgctcaactacggctacctgcatcccgaccccgcgcaaccctggcagcaggggtacgacgatccgggccccacggccgtacgcaacgaattgaagaacatcatctcgttctggatggacaagggcgtcgacggcttccgctgcgacatggcccaaagtctggtcaagggcgacgacaagcagcacacgggtacgatgcgcctgtggcatgagttgcgcagctggttcgaagcgaaatatcccgaaggaatcctgatctccgagtggagccagccgcgccagtcgctccgcgccggattccacatcgacctgctgatccacaacggcgccggcaccgagatctaccgcacgctggtctgccagaccgacgaccgcggcacgaaagagaccccctgcttcttcgactacgaaggacgcgggcaggtgaaggcgttcgccgaaaactaccgtatcgaatacgaagccacgcgcgagctgggttacgccgccatgcccacgtgcagccacgacatctggcggctgaaccgcttcgaccgcaatacgcccgaacagttgaagacggcgctcacgctcttcctgacgctacccgccgtaccgatcctctactacggcgaggagatcgggatgcgcaacctggaagacgcccccgtcaaggagggcagctacacgagccgcaaccgcagcagctgccgcacgccgatgcagtgggacgactcgcccaacgccggcttctcgaccgccgacgcctcacggctctacctgccgatcgatccttcgcccgcacgacccaccgtcgcggccgaggagcgcgacccgcagtcgattctcaactacgtcaaggggctcatcgccctgcgccgccagacaccggcgctcggcacgcagggcgcatggcgcttcgtgagcgacgtcgagcaaccctaccccatggtctacgcccgcgagctggacgggcagaaatacctcgtcgccctcaacccgtcgaagcggagtgcgacggcgcgtttcgcctcggaaggcgccgcggccgaagcggtctacggcacgggcgacgacgcgaaatacacctcgaaaaacgggctgtccaccttgaagatgaaacccgtctcggcggtcatcctgaaaataaccgaataa

SEQ ID NO: 1169 - DNA, 3660 bp, Alistipes obesi
atgaaaagacaattcttaggtagactcctatcgctgttccttgtcggaacggtggtagccggagtcggttgcaaggactacgatgacgacatcacgagtctgaacaaccggatcgacgagctgacgacggggcagatcgcctccgtggagaagcagatgcagtctctgcaaaatgcggtcgaccggttggacggggttgattcgggcttgaaggacgaaatcgaggcgttgcagggcaaagccgagacgcaggccggagagatcggaaagttgcaggaggagttgggaaaggcggcctccgcatcggaagtcgaagcgctgaaaaaacagatcgagacgctcgaaagcgataagagcaagctggagaagcggatcgaggcgctcgaaagcgcccgcacgagtttgcaggatgaaatcgacgccgtgaagggttcgctggcgaactacctgaccaagagcgacgccgaggcgacctacgccaccaagacgacggtcgagagtctgtcgcagctgctcaaccagatcaaggccaactacgtttcggccgaagggctggcttcgacgctcgaaggttacgtgaccgacgccgaactggccgattatccgacgctgaccggcttacaggaggcgatccgccagagcgagacggcgatgaagaactcgctgggcgaagcgatggagccgatcctggcgaaatataacttcgtccaaaaggatgtgctcgatctcgaaatccaggatttgcagaagcagatcgatgccctcaacggcaagcccgacgccgacggttcgctggccaacatcaagagccggctcgaagcgctcgaaaatgccgagatcaaatacgacgagtcgaacgccgccttcacgaagggcgtggaggactgcatcggcaaggcgctcgccaacgacggcgcgatcgatcaggccattgccaatgcgattaaggatgtcgccggtgagtacgaggggacgatgcaggatctgaaaaacctcatcgacggcctgcgcatggacgtggatcagctcctgagccgtatccagagcctcgtctatgttccggcttacgacgatcacaaggcgtcggtcaacgcgctctactatgcccccgaaggcgaggagcccgttctgctggcgaacggtacggtggagatgaccttccgcgttacgcccgtcgaggctgccggacagctcgtggccgcctatgccgccgagcccgagatgttctcgctggaaatggaacaggtgaagacgcgcgctacggtgcctgcgctgaatattcagaaggtcgaggccgacgagacgggcaacggccgcttcatcgtgacagcgcttcccaccgatttcacccccgacttcttcacgggtaaggtttcgtacagcattgcgctgcgcgtacagaaagcctacgacgcggaggccgggaacgactattcggccaatgtggtttcggattacgtgaacctcgtgccggcgcgcgccgacgtgaaggccgtcgtgctggctcctgccaaggaggacggttcgatcgacgccgaccggatcgtcgctgcggacggcgaagtggcctacgagattccctacgacgataccgacatggtcgtcgaactgatgaagggctacaaactctgggctaccgacggcgaagcctactacgatctggctcagctcgccgacatgggttattcgctcgaagcgcccgtcgtggcctgcacgagcaaggcattcaaagccgacggcacggagttggagtcggctgacaagggcaacttcgaggttgcgaacggcggggaggaagtctgcgacgagacggtcaagctgatcgccgccgacaagtcgacgcgcaacaactacctgctcaccgagcacgcctatacggtcgctgccgcctacgatgcgctgaacccgaccttcaacagccgtgtgacgatcgtcaagaccaagcgcggcgtaacgctcgacctgttgaagtacgtctggaactactccgatttccggacggtctacgaagccggcggcgagtacgaaggttccgagcgcgaattcacgctcaaagtaaccgagtcgacgcttcctcaggacatcacgcccgagaacatcgtgacctactggaaccagggcggcagcgccgtggtgaaggccgtcgagctcgacgcggagggcaagccgaccgagaccgtcgacgacaatgtgaaggtggttcccgtggcttacgatgccgacgagggctatacgctgcgcgtttcgggatacaccttcggcaagcgctatgccgtcgaagcgtcgagcgagttcgagaacgtacaggtgacgatcgccttcgagaccgagttcgttgcactgcccgagaagatcgaggttacgcttcccgccgctacgctcgcatacgatgccaccgaggagctgttcgtagccgaggatacctccgttgtcggcgaactcttcgagcaggtgaaggatcacttcacggatgccgccgaactggctacgtcgcttacccgtccttactatggaggctcgcccaacagtgcgaacgcattctatacggctgtctgcggcgaccggacgttggagaagaattactggttcctcgacggttcgaatcctgcgacgatcacccgcatcgccgtggccaacgacggcaagatgacctcccacatgcaggtcaatcgtgccgatgtggagaccgacgccgacgtattcgccttcgagacgaagctcgttcccaactacggcctgccgatctatgtcaagggcgaggccagggtcgagattcccgcctatgccgcgcagcacgtcgacgcatgggtctacaacgcggatggcaagtggcagtcggatgtgaaggggctttggacaccgagtttcggatcgagttcagaaccgagtatgctcacgggcttctcggtagccgacatcgatctggaagacgccttcacgatcgtcaagaaggatgcgcagggcgtatgggtaccggtatcggacgatgagatcgctgcacagaaactcgtcttcgcttacgagattcccgcgacggctcccgctcacgacggcatcgagatcgccggtaacaaactctcgtattacggccgcaacgaatccgtgcccgtcgtcggtatgctttcgatcgacggtatcgtcatcggcaacgccttcacggccgtgaacgactatacgtcgtatgaggtcaacaagtacgatccgatccgctcgttcacgcagtcggagaccgtcgaaatcccgacccgcacggccgaggcgacctatacgaagaatatctgtgaggtactttcgctgcgcgatatgcgcgacgccgacgatatgaagggcttcgagctgatcgaccacgaggcgacgctggccgatccgtggatcacgggcgacgacaccaacggtttcgctacgggcgtccgtcccaacagcgacgaagtcttcgggctggaagcgatccgcatcgtcagcttctcggtgacctatgccgacaacggattcgacgcttcggcggcactcggcgaccgtgtaactgtcgacgagacgaccggtcagatcaccttctcgaatctcaataacctctcgttgcagaaggatgtcgacgtgacggtcaacgtcgaggtggcttatccctgggccgtaaagagcggtaaggtgacttacaagatt

SEQ ID NO: 1170 - DNA, 2145 bp, Alistipes obesi
atgcgtttgcttctgcgctcgacttttgctatctttggcttcgccttagatactgtctcggcacaatcaaacatgcgtttgcttctgcgctcgacttttcgtatctttgtaaggacaatgcggccgctggccggcgatccgctccggcgggcgcgctccggacgcagactggcaggggctaaattaaaatatacggatatgaacagcaaatacgctttgcccaaagacggaggattgatcgtcgactcggctccgagcgacatcatccgccgctatgaaaagattcccgcctcggtcttcgaacacgaatccgaaggcgtggggtatgtcgccgacctgatcgtgcgggcgatcaagaaacacaacgaatattcgctttcgaacgagattttcgaggacgtgcagcccttcgtgctgggactcacgaccggccgaacgccgctggggctttaccacgagctggtgcgccgctaccgggacggcatggtgagtttttcgaacgtcgcggtttacagcctcgacgaattctacccgatcggggccgacgagccgcagagccgcaactaccgcatccacgaggagtttctcaaccatatcgatatcctgcccgaaaacatccatattcccgacgggacggtgcccgaatcgcgcatctcgcgttactgcgaatcctatgaccgggcgatcaaccacatcgacctgatgattatcggcgtcggagagcaggggcagctcgggttcaacgagcccggctcctacgagaagtcgcgcacgcggctggtgcagctttcgcacgactcccgcaagatccagtcgtcggccttctcggggatcgacgatacgcccaaaatggccattacgatggggatcgataccatcatgcgcgccgacaagatcgtgctcatggcatggggcgaggagaaggccgacgtgatctgcaaggtcgtcgaggggcagatcaccgatcaggtgcccgccacggcgttgcaggagcatcacaacatcgaggtggtgatcgacgagaacgccgccggaaagctcacgcgcgaggttgcgccgtggctggtcggcccctgcgagtggacgcccaagttcacgcgcaaggcggtcatctggctgtgcggcgtggtggggaagccgattctgaaactcacccactcggactacatcgaaaattcgctgggcgaactgctcgaagccaaagggccttacgacaagatcaacatcgacgtcttcaacgacctgcaacataccattaccggctggccgggcggcaagcccaacgccgacgactcgacgcggcccgttccgtcgaagccctttcccaaaaaggtgctgatcttctcgccgcaccccgacgacgacgtgatttcgatgggcggcaccttcatccgtctggtcgaccacgggcacgacgtgcacgtggcctacgagacgtcgggcgatttcgccgtcaacgacgacgtcgtcctgcaacagctcgatacggtgcgcgaactgggtttcgcggatcgtttcgatgaggtgaaacgtcttatcgccggtaaagtgaaggggcagcccgaaccgcgcgagctgttggacatcaaggcggcgatccgccgcgccgaggccaaggccgccgaccgttcgttcgggctcgacccgtcgcacgtccatttcctgaacttgcctttctacgaaacgggcggattgaagaaggcgccgctttcgcagcgcgacatcgatatcatcgtcaagctgttgcgcgagatcgaacccgaccagatctacgccgcaggcgatctggccgatccgcacggcacgcaccgcacctgcatggaggccgtgctgggagcgttggaggtcgctaaggacgacgcatggctcaagaattgccatctgtggctctatcgcggggcctggttggagtgggatctggggatggtcgacatggccgtgcccctttctcccgacgagctgatcaagaaacgtcacgccatctaccgccacgtgtcgcagaaggatatcgtgcccttcccgggcagcgattcgcgcgaattctggcagcgcgccgaggagcgcacgcagaataccgcccgcctctacgacaagttgggcatggccgaataccaggccatcgaggtcttcgtgaaaatgttttaa

SEQ ID NO: 1171 - DNA, 3315 bp, Alistipes obesi
atgaaacgaactctgataacatcacttttggcatcggctcttcttttcggcggcggatgcagcgacgacttcgacgactccgccctgtggaaaggggtcgacgagatatacaaccaactcacggaactcgaaaaacaggccgatcaactcaacgaccagatccggctgctctcgtccatcgtcaacggcggagccataacctcgatcacgcaggacgccgagggcaacgacgtcatccggttcaagggggccgacaatatcgaacacagcgtcaccgtcgccacgaaggacgacgtctcctcggcaccgatcctcggtacgaaagaggagaacggcgtactctactggacgactaccgtcgacggaaacaccgattttctgaaagacaccgacggctcgaaaatccccgttgcggggcgtactcccgaaatggccgtcgacaaagagggttactggaccctcaacggccggcgattgaccgatgcgtcgggaaacccggtgaaagccgaaggaaagcagacgtcgctcatcacaggaatctcgcgcgacgacaacggcaacgccatcttcacgctgggcgacggatcgaccgtatccgcaccgatattcgacgccttcaacatcgtcttcaagatcggcgacaccgtcttcgacgacgagtacaccgtcgaggacgtttcgcagccactcacgatcggttacgagatcacgggcgaaaaggccgacgaagcgatcctgaaaatagtgcgctgcgagcagctcgaggccgtagtcgacacctcggccgaaaccgtcgtcgtaaccttcgaagcgcctttcgaagaaggatgcttcgccctgatgctctgcgacctgcaagagaacgtgctgatccgcatggtgcgtctggcgtcggcgagcgccaaacccgaatattacggtatcaaaaccgcggacgacctgcgcgaattcgcccgggccgtaaatacggggcgcaactacgaccgctatcgcgatgaaaccggcgacgtcgttctgctggacgatgtcgacatgaacgggatcaccgaatggaccgccatcggaacgaccgaacaccccttctccggcaagttcaacggcaaaggccatacgatccgcaacatcgcatggacggccgatgccgcgaaatcgacggcgcacggtctgttcggcgtactgaatcaggcctccgtccggaatctcacggtcggcggctcgggcgatcggatcatcgtccgggggactgccgcagccggtacggccatcgcgggcgtagcggcgttcgctacggaatcggtcatcgaaaacgtcgccaacaacgtctcgatctcgttcgaaggcgaagaccccgccgacacgccggtgatgcttgccggcatcgtcggacagatgtccggaacgactctcggcggacaatccgccgaagcggggtgtaccaataacggcgacatcacctcaggagcgatcgccaacaccggaaacggaggcaaaggcatgcaggtagccggcatctgtgcgtacatcaaaaatacagacggcaacttcatgggtcactgcaccaacaacggacgcgtgaacgcaccctccggacgcggcggagggctggccggaaccttcgagaagggaaccatcgccaactcgacgaacgccggactcgtcgaagacgacgcagtcggacagtacgccggacagaaggacaaatacggcatcaaacgcatgggcggtctggtcggaggttcgacctcggcggagtgcatcatcgagaactgtaccaattccggaaacgtcatctcgcacctcggctgccgtacgggcggattcgtggggcacaatgccggcacgatccgcacctgcaagaacaccggcgccatcatcggcaacgtgaccgtcgccggttcggactatcacggtcccggatgggcctgcggctataacaagagtgcatctctcatctcggactgcatcggacacggattcgtcggcgattacgacacgtacaaagactccccgacgacggctcccgcagccatgcacacctcggccgtctgtcacaaacgttcgaactacgacacagaggaaaacaccgtggactggacgcttccgtcctactacgattgggagctcaaacagaccgtcgcacttcaccccggagtgaaatacacctactacgaattcaccaacctaccgcgcaaaatgcacgtactggaactcgacctgacgaacgacgccgtggagatatccacctcgatggccgacgacctcgtacccaatcccaacggcaacaacaacagcaacaacggcaaaaacatccgcgagacactttcggaaaactgcaaccggaagcgtgccgaaggacaaaacatcatcgccggcatcaattcgggcttcttcaattcgcatgacggattcccccgcggactgcacatcgaggaaggacgccccgacttcgtcaacaacaagagcgtccgcacgtcgctgaccaaccatgcgaatgccttcactttcttcaaggatcgtacggtgagctgcggcaaaaagaccttctccggcaaaatcgaagtcggcggtacggaatacgaataccactcgatcaacgacacgatcctgcgttcgggcagcacgttgcaagaagccaacctctatactgcacggtacaagaaaataccccatcccgacgctccctcgctgaccaatacgctctccaaaaaggcgctctacgtcgtcgcgaaaaacaagtcgggcaatcccgtgacggtcaacgacggctggttcgaagccactgtaacccagatcgcggacggtcgttcgacggagctcgccgaagcgccctatctgacggccctcgacgaatgggccgtacagctcaccggcgcaacggccgaaacgctcgccggaaaactctccgtgggttcgacgctccgcatccgcgcagacgtgacggtcaacggaatctcgaccccgattctgacacagaactccacgatgtatcagttcatggtcgacggcgaagacaagagtttcgacacagacaaatacgacccgatgacttacgtgggcatcgacaaggccggaacgaaagtctgcttcttcgtcatcgacggccgtcaggactggatttcgatgggcgtaaaattctatgaaatggtccgcatcgcccaaaaattcgactgctggaacgtaacgagattcgacggcggcggttcgacggccatgtggctctacaccgacggcgccggcaaggtggtcaaccagccgtccgatgcgaaaggcgaacgctcgtgcatgaactacctccacgtgcggatcaagcaataa

SEQ ID NO: 1172 - DNA, 3294 bp, Alistipes obesi
atggatattgtaaccggtataatcaaactcctgttcggttcgaaggcggacaaagaccgcaaggccatcgaaccctatgtcaacaaaatcaaggaggtctacccctccatcgccgcactttcgaacgacgaactccgcggccggagccaggcgctgatgaagcagatcgccgatttcatcgcccccgacgaggagcgcatcgtcactctgaaagcgcagctggaacgcgccgaaaccgcactcgaagagaaagagaagatttcgaaggagatcgacgagatcaccaaacgcatcgacgagaagatcgaacaaaagctcgacgaaatcctgcccgaagcgttcgccatcatgaaagatacggcgcgtcgtttcgccgagaacgaaacggtcacggtcacggccaacgatttcgaccggcagctggccgcctcgaaggatttcgtcacgatcgacggcgacaaggccgtctacgccacccactggctcgcgggcggcaacgacgtcaaatgggacatggtgcactacgacgtgcagctcttcggcggcgtggtgctccacaagggcaagatcgccgagatggccacgggcgaaggaaagaccctcgtagcgacgctccccgtattcctcaacgcactggcacgcaagggcgtgcacatggtgacggtcaacaactacctggccaagcgcgactccgaatggatgggcccgatgtacgaattccacggactatcggtggcctgcatcgacgatacgcagcccaattccgccgcccggcggcaagcctacatggccgacatcaccttcggcacgaacaacgaatacggcttcgactatctgcgcgacaacatggcctcgtcgcccaaagacctcgtgcagcgcaagcaccacttcgccatcgtcgacgaggtcgactcggtgctcatcgacgacgcccgcacgccgctgatcatctccggtcccgtccccaagggcgacgaccagctctacgagcagtaccgccccgccatcgagaatctctacaatctccaaaagaatctggtgacgggactcgtggccgaggccaagcagctgatggccgacggcaagacggaagagggcggcatcaagctgtaccgcgcccacaaaggtctgcccaagtacaagccgctcatcaagttcctctcggagcagggcatcaaggcgcagatgcagaagaccgagaacatctacatgcaggacaacaaccgccgtatgcccgaaatcaccgacgacctcttcttcgtcatcgacgagaagctcaactcggtggagctgaccgacaagggacacgaggcgctgtcgaaatacttcaatgaagacggattcttcgtgatgcccgacatcggcgccgaagtggccgagatcgaaaagggcgaagggacagtcgaggagaaggcgcagaagcgcgacgcgctcatcaacgactacgccgtcaaatcggagcgtgtgcacacggtgcaccagctgctcaaagcctacgccatgttcgagaaggacatcgaatacgtcgtgatggacaacaaggtgaagatcgtcgacgagcagacgggccgtattctcgacggccgccgctattcggacggcctgcaccaggccatcgaggctaaggagcgcgtgaaggtcgaagcggcgacgcagaccttcgccacgatcaccttgcagaactatttccgcatgtatcacaagctggccggtatgaccggtacggccgagacggaggcttcggagttctggagcatctacaagctcgacgtagtggtcatcccgaccaacaaaccgatcctgcgcgatgaccgcgaagatctgatctacaagaccaagcgcgagaaatacaacgccgtgatcgacgaaatcgtgcggctggtcgaagcgggccgtccggtactcgtcggtacgacgtcggtcgagatttcggagttgctgagccgtatgctcaaactgcgcgggatcaagcacaacgtcctgaacgccaagcagcaccagctggaagcgcagatcgtggccgaagccggccgtacgggacaggtgaccatcgccaccaacatggcgggccgcggtaccgacatcaagctgtcgcccgaagtgaaggcagccggcggtcttgcgatcatcggcaccgagcgccacgaaagccgccgcgtcgaccgccagctgcgcggccgcgccggccgacagggcgatccgggttcgtcgcagttcttcgtctcgctcgaagacgacctgatgcgtctgttcggctcgggccgtatcgccacgtggatggaccgcatgggcctcaaagagggtgaggtgattcaggccggcatgatgaccaaggcgatcgaacgcgcgcagaagaaggtcgaggagaacaacttcggcatccgcaagcggctgctcgaatacgacgacgtgatgaactcgcagcgcgaggtgatctacacgcgccgccgtcacgccctctacggcgaacgcatcgaaatcgacctgaacaacatcatgtacgacttcgccgaagcgttcctgcaagcgcacgaaggcgccgagttcgaagatctcacctacgaaatgatccacgaagcggccatccaacccacgttcgatgccgaaaccttcgccaaggccaagcacgacgaacaggtggagctgatcgtcgccgatctcaaagccgcctacgcacgccgtgccaagctcatcgccgatacggtgcgccccgtcatggaacgcatctacgaagaccgcaaggatcagctcgacagcaacatctacttcccgatcacggacgggcacctgggctacaacgttccggtcaacctgctgcgctgcaaggagacggacggtgccgaaatcttccgcgtcttctcgaaggtggtgatgttcaccaccatcgacgacgcatggcgcgagcacctgcgcgaaatggacgacctgcgccagagcgttcagaacgccacctacgagcagaaggacccgctgctgatctacaagttcgaatcgttcggactcttctcgaagatgctcgaaaagatcaaccgcgacgtactctccacgctcaacaaggcctacattcccgtccgcgagcagaacgccgaagccgtgcagcgcgaacgtcaggaacgcgccaaggtcgacgtcaacaaattgcaggcttcgcggatgcaggccgctgcgcaggccggtcagggcgaacgcggccccacggctccgatccacgtcgaaaagaaggtcggccgcaacgacccctgcccctgcggatcgggcaagaaattcaagaactgccacggaaaaggactttaa

SEQ ID NO: 1173 - DNA, 2157 bp, Alistipes obesi
atggtcgaagaggcgctcagccacgtagcggttcccgcacaggctcccgccggacgttcgaccgattatttcggggagttggtcttcgggcgcaacgtcatgcggcggtatctcgaccgcgagacctacgaagcgctgatccagaccatggaacacggcacgcccctcacgcgcgaagtggccgacggcatcgccgcaggcatgaagcagtgggcggtggagcacggcgccgaccactacacccactggttccagccgctcacggggggaaccgccgagaaacacgactccttcgccgaacccgacggacggggcggcgtgctcgaagagttctccggcaagctgctcgtccagcaggaacccgatgcctcgtcgttccccaacggcggaatccgcaacacgttcgaagcgcgcggctactccgcctgggaccccgcgtcgcccgccttcatcgtcggctcgacgctctgcatcccgaccgtgttcatcgcctacacgggcgaggcgctcgactacaagaccccgctgctgcgctcgctggcagccgtcgacagggccgcgacggaagtatgccgctacttcgaccgcaacgtctcgaaggttttcagctacctgggctgggagcaggagtacttcctcgtggacgaagcgctgtgggccgcacgccccgacctggtgctgacgggccgcacgctcatgggccacgaatcggctaagaaccagcagctcgaagaccactatttcggcgcgattcccgaacgcgtgatcgaattcatgcgcgacctggaatacgaatcgctccggttgggcattcccgtcaaaacccgccacaacgaagtggcgcccaaccaattcgagctggcgcccatttacgaggaagccaacctggccaacgaccacaaccagctgctgatgacgatcatgaacaagatcgcccgccgccacaacttccgcatcctgctccacgagaagcccttcaagggggtcaacggttcgggcaaacacaacaactggtcgctgggcaccgacacgggcgtcaacctgctcgggccgggcaagacgccttcggagaacctccaattcatcacctttctggtcaacgtcatggcggccgtctaccggcacaacggcctgctcaaagcctcgatcatgagcgccaccaacgcccaccggctgggagccaacgaagcgccgcccgccatcatctcgacctttctgggcgcacagatttcggccgtgctcgaaaaactggaagcgagccgcagcgatgcggccatcaccttctcggcgaagaacatgttcaagatgagcggcatctcgcacatccccacgctgatgctcgacaacaccgaccgcaaccgcacctcgcccttcgccttcacgggcaaccgcttcgagttccgggccgtggggtcgtcggacaactgcgccgacgcgatgctgacgctcaacacggcggtcgccgagcagctcacccgcttcaaggaggccgtagaccgacacatcgagagcggcatgaaaaaggagaaggcgatctacgaggagctcaaaaagctcattcgcgagtgcaagccgatccacttcgacggcaacggctattccgacgagtggaaagccgaagcggcccgccgggggctcgactgcgaaacctcgacgccgctgatcttcgaccgctacctgaccgccgattcgatccgcatgttcgagagcacgggcgtgctgaacaaggtggagatcgaggcccgcaccgaggtgaaatgggagacctacaccaaaaaaatccagatcgaagggcgcgtgctgggcgacctgacgatgaatcacatcgtcccgatcgcctcgcgctacgaggcgatgctgctggacaaggtatacaaaatggcacagatcggcgggctggacgcctcggccgacatcgacctgctcaaaaagatacaggggcacacggccgccatccagacgctcacgatcgagatgatcgaagcgcgcaagaaagccaaccgcatcgaaaacgcacgcgcgaaagcgatcgcctaccacgacacggtggaggtctacttcgaggagatccgccgccacatcgacaagctcgaagagatcatcgacgaccagatgtggacgctgcccaaatatcgggaacttctgttcatcaaatag

SEQ ID NO: 1174 - DNA, 2208 bp, Alistipes obesi
atgaacaaaaccctgaaacctctctttgcatgcctgttttcgggcctgatctgcaccggcgcagcagccgcggaaccgcaggtcatcaacatcaagaccgacggatcgtcgatggtcatgagcgtgacttccgacggcgaagtcctgttccaccatttcggaggacgcatcgacgacgcgacgcccgtaaccggaatcaagagctaccgccgcacggatcacggcaccgacaacctcgcctactcgacgatgggcggccgcaacttccgtgaacccgccctgcgcgtgacccatgccgacggcgacatgaataccgaattgcgctacgtgtcgcacacgacccgaacgctggccgacacgaatgtcacccgaaccgtcatcaagctgaccgacacgaaccaggcgctcgacgtcgaactattctatacggcctatgccgaggagaacgtcatcacgacgcacgcagtcatccgcaaccgggagaagggcagcatcgtgctgcacagcttctattcgtcgtcgctgcccgtcaaggcacgcagttacctgctgacacacctctacggcgcgtgggcgcgcgaaagtcaggtcgaccacacgctgctcacgcatggttcgaagagcatcgagtcgcgcaagcaggtacgcacgacgcataccgagaatccggccttcatgattacgctcgacagcgagtcgttcgacgagaattacggcgaggtgatcgcaggagcactggcatggagcggtaatttccgcctcaacttcgaagtggacgaattcaacgtgctcaacattctggccggcgccaatccctatgcgtcggactacacgctcggcgcgggcgagtcgttcaccacgcccgagatgatctatacttacagctccgaaggcgcgggcggcgcgagccgccacctgcacgactgggcgcgcaactacggcgtatggcacgggcatacctacgccccgacgctgctcaacagctgggagggcgcctatttcacgttcgatgccaagacgctcacggagatgatcgacgatgccgccgacatggggctggaaatgttcgtgctggacgacgggtggttcggcaacaaatatccgcgcaacgactccaatgcgggactcggcgactggcaggtcaacgcgaagaaactgcccgagggcatcgattacatcgcatcgtacgcccaccaaaaggggatgaaattcggtatctggatcgagccggagatggtgaacccccgaagcgaactggccgagaaacatcccgactggatcgtgaaggcgggcaaccgcgaaataccccgtatgcgcaaccagtggcttctcgatctgagcaatccgaaggtgcaggatttcgtcttctcggtattcgacaatacgatgaaactctcgcccaatatcgactatatcaagtgggatgccaaccgccacgtcgaaaatgcagggtcggagtacctgcccgaggacaaacagtcgcatttctggatcgattatacgcagggcttctacaaggtcatggaacgcattcgggccaaatatcccgatgtgctgatccaggcctgcgcctcgggcggcggccgcgtggagttcggcgcaatgaaatacttcaacgaagtgtggaccagcgacaacaccgaagcgctttcgcgcacgcgcatccagtacggtacgagccttttctatccggcgacggtcatggggtcgcacgtgtcggccacgcccaaccatcagaccggcaatatcacgcccatcaagttccgcttcgacatcgcctgcgcgggacgtttgggcatggagctgcaacccaagcggatggacgacgcggagaagcgattcgcacggaaggccgtcgccagctacaaggcgtatcgcgatatcgtcatggagggcgacctctaccgtatcggcaccccctatgacgataccggctactacgggatgatgtatgtctcgaaggacaagaaaaaggcggtgctcttcacctactgcatccgctaccagagccgcacgctgatccccaagttccgcctgcacggcctcgacgccaaaacccgttacaccgtccgggaacagaacacggacaaaaaaaggttctggttcgacggcggcaccttcacgggtgagtacctcgccaatgcgggcatcaatcccaatctgagcaaaatctacgacagcgccgtattcgtgctcgaagcacaatag

SEQ ID NO: 1175 - DNA, 2322 bp, Alistipes obesi
atgttgcgcaaatcgctcgcttttgtcgtcgttgcactcctcctcgccgcgggggcgtcggcccagagcgtcgggctcgtgctgagcggcggaggggcgaagggactctaccatatcggggtgatccaggcgctcgaagagaacgagattccgatcgattacgtcgccggaacctccatgggttcgatcatcgcggcgctctacgcggcgggctattcgccggaggagatgcgcgcgatcgtcgattcggggcaggttcgggagtgggtttcgggccgcatcgattcgcgttacgcctcctattaccgccagatgcaggatcagccctcgatgcttacgctgcggctcaatctgcgcgacgaggagaaacgcagcgatgccaagaacaagtcgcggctggtgctgccgagccatctcatttcgtcgtcgcagatcgatctggcgctcgccgaactgctgacgccggcttcgacggcctccggcggcgatttcgaccggctcatggtgccgttccggtgcgtggccagcgacctggtggcgcgcaaaccctatgtgctcaaaacgggcgacctgggcgaagcggtgcgtgcttcgatggccattccgctggcgttcaacccgatcgagaaggattcgatgctgctctacgacggaggtatctacgacaattttccgtggaaacccctcgacgaaaccttccgtcccgactacctgatcggcagcaaatgcacgtcgggcaacaccgaacccaacgccaaaagcatcatggaccaggtgtggatgctcaccatggagaagaccgattacgacatgccggccggccgcagcacgcttatcgagcgggcggtcgacgtttcgatgctcgacttttctcaggccgacgccattatccagtcgggttatgacgatacgatggcgctgatggactcgctcaaaagcgccgttccgcgccgcatgtcgcggggcgaggcgctgcgccgccgcgccgccttccgcgaacgctgccccgagctgcttttcaaccgctacgcgatcgaggggctgaatcccgcccagacgacctacgtgcgcgacaacatgcagctcgaccaccagcacgacggcgaaccgaagatcctttcgttcgagcgggtgaaggacaaatacttctcggtgctggccgacggcaatttctccaccgaatacccctatatgcgctacgatccgaagtcgggctattacggcatcgatttccggctgacgaccaagcccgactacaaaatcctgatcggcggtaacatctcgtcgacggccttcaaccaggcctacgtcgggttcgaataccaccgcatccgccatgcggccaatcgctactacacccacctgttcctcgggccggtgtcgtcggccgtcatgctgggcggacggacggacttcttcctctggcggccgctgttcgtcgattattcgtacaacttcacggcccgcaactacaagaacggcaatttcggcaacctcacgtcggtgtcgaacaccgagtcgatgaagtttctggaaaacttcctctcgctgggattcggctttccggtcacgcaccgcagcgccttcgtgatccggctcaacggcggacaggagcgctactattacagcctcgaccgcgcctcctacaaggagaactactacgaggatctgaccacgctcaactacatttcgccgaagatcgagctgcggcgcagttcgctggacaggatgatcttcccgcactccggtacgtcgctctcgctgtcgggcatctatctctacggccgcgaccgtttcgtgccgagtccctattcgcgcgacgagcagcggctgcgcaagtcgaagcgggatgtctcgtggtggggcgcccgcatcgtgtggaaccagtatttccagatttcgggcagcaaatggttttcgctgggttacggcgccgaggctgtcgtgacgacgatccccacgctgagcaacgacaaggtgacgcgcatgctgatgccggcctaccggcctacgctccattcgcagacggtctacatgcctgagtaccgtgccaagcgctatgcggcggtcagcgtgatgccgaccttcgatttcagcgaccggttcttcctgcggacgggcatctacgcgatgttcgccgagcggttccgaccgaccgacgacaggatgcgttacatcgtcgacgcgtcgctggtctatcatacgggcatcggcccgatcagcctctcgctgacgaagtacaacgtcaagaactgggacaacctcttcctgaccttcaatttcggctatgcgatgttccgtccgcgcggaatccactattga

SEQ ID NO: 1176 - DNA, 2034 bp, Alistipes obesi
atggcaagtttgaacactttacggaccaagttcggcgcgcttctgtcggtgattatcgcactcgccctcttggcattcattctgtcgttgaagaccgacatgggcttctcggacaacgatccgaaggtcggcgtgatcgacggcgacaagatccgctactccgagtatctgaatcagtacgacgccatcaagaaccgcaacggcggcgtagaggcttcgaccgatcaggagtccgaccagctggccgccgcgacgtggcaggcgcttttcgccgaccacgtgctcgtccccggcttcgagcggatgggtatcgaggttcccgagcaggagcgtctggacatggtcagcggcaagatcccttcgcaggccttctattcggctttcggcgatccgcgtacgggggcttacaacgctgccgccgtgtcgcagttcctgtcgcaggccgcttccgacgcccgcgcgcaacaggcgtggaacgacctgaacgagcaggcccggctggaacgcgccgtgcagaaatacgccacgctgatcggcaagggcgcctatgtcaacaaactcgaaatcgaggacggtgtcgatgcggccaaccaggtcttcggcgggaagtatgtcgccaagcgttattcgtcggtgcccgattcgctggtgagcgtctcgtcgggcgagatcaagtcgttctacaacgcccataaggagatgttcaagcagtcgccgtcgcgcacgctgtcgtacgtggtcttcgaggtgaacgctacggacgacgatatgctgaacctcgaaaaggaggtgcgcgccgtcggcgagaagttcgacgccgcggaggacgtgaaactcttcgtgcgtcaggatcgccacggcgagatcgccgaccgttatgtgacggcggcgcagttgggcgaacaggccgaggcgcttgtcgcgggcaagatgttcggccctgagttgaagaacaacgtctggacgatggcccgtgtggtggagagccgcatggctcccgatacgctcggtctgaaaatgatcgtgcttccgtataccgccgagaaactggccgacagtctcaaaacggtggcgacgagtgagaatttcgccgatctgtcgcgtcagtattcggccaacgaggagttggccgccgcaggcggcgaggtgggcgtctaccccttctcggccttcaataccgtaatggccgaagcgctttcggacgccagaaagggcgacgtggtgaaggtgatgagcggcgacgccatccagctcgtcaacgtttaccgtgccgacaaaccctcgaaacattacaaggtggcgacggtaagttatcccgtggaggcttcggccgcaacgctgcgcgacgttcacaatcaggccagcaccttcgccgtgaacgccaaaggttccgccgccgcgttcaacgaggccgcctcgaaggctgccgtgacgccgcgcatagcgacgctcaacatgggtgaccgctcggttcgcggtctggaaggttcgcgtgaagtggcccgctgggcctacggcgcggacaagggcgacctgtcggagattttcaaggtcggcaaggactatgtcgtggcgctgctcacggagattgacgacgacgagtacgcttcggtgaagaaggctgccccgcagattcagaaccgcctgctgcgcgacaagaaatacgactatatcgtgaagaacctctccgatgcgtcgctcgcaggcgccgccgagagcttcggcagcgaggtgaccgatttcaaggacgtgaccttcgggtcgttctacatcgacggtgcgggtgtcgagccggcgctcgtgggtgcgatcaccgagacgaccgagaaaggcaaggtttcggctccggtcaagggcatttcgggcgtttacctcttcgaggtgactgcgatcgatccggccgagcggcagcagacggccgaggacgagaaggtgcgtgccgaagcgatggccgagggaatgatgcagcagcgcctcctgccggctttgcaggagatggccgagatgaaggatttgagcggccgttatttctga

SEQ ID NO: 1177 - DNA, 3336 bp, Alistipes obesi
atgaaaagattcgtccaatttctgggagccgcgactctgctgctctcctttacccaatgttcggaagacgcgacgaccgactccgcaccttccgtacaaggttccgtcaaactgaccgcatccatcaacgaaacgcgaaccgaactctccggcaacgacgtcctctggaaatcgaacgaccgcctcggactgttctgcggtacgaagttcgtcaacgcacccttcacgacgacggccggcggcaccacttcggccgatttcacgggcgatccgaccgatccctcgggttccgaggccgaggtattctacgcctactatccctattccgcccatgcggtgctggaaggcagcgtcgtatcgggactctcgatccccgctgtgcagaccttcgctacgaaaagcttcgccaccgaactctgcccgatgaccacgtcgggcgccgattacagccgtctggcgttccgcacgataggcaccgtactcaaattccaggtgacggggcagaagaacgtgacgaaaatcgaactgaccggcaacgacggcgaagcgctggccggcgattacacgatcgatttcgtcggagagacccccgaaatgaagttctccggtacggagacgacgcttacgctcacctgtcccgaaccggtcgcgctgaacgacgcctcggcgacagagttttatttcgtgctgccggccggcgtcgagttcacgaagggtatcaccgtaaaggtatacaccgacgacaacgccgaaccgatggtcaaagagtacgcctcaccgctcacgacacgccccaacaagctcgtaacggtcaaagcgttcacctattcggttcccgtcacttcgatcgaggaagccaacgaagcgttgtctaagggaacgtcgggagtgacgatcacctccacgaccgacctgacggtaccttcgaccctcgaaattcccaatgcgttcggacacggaacctccacgtcggtcgagatcgaacaacccgtttcgaccgacctgacgatctcggagaagacgacttcggacaaggagcttcccgagacgctttcggtggagatggagaccacggcttcgctgatcgtcgacacgcccaacctgaccgtttcgctcgaaggctcctatacgaccgtcgaagccaccacggccgaaaacacgctgatcgtagccaaaaatacggtcatcgagacgctgaccgtcaaaaagggaaacgtcaagatctacggaaccgtcggggagatcgtcaatgaagggacgggcaagatcatccgctgcatcgacgcccaggatgaggtcgaacgcacgctcgccgacacccgctgcgaccatatcctgatcgagaaacctgccggaacgctcgatttcggcggagggacgacgaccaagcaggtctgcgtcgaagccagcgtgacgatcgccaacctgatcgtatcgcccgaaaaggagcaccccgtaatggtctccggcgataacgtcaaactgacgctcgacggcgtgaaactcgtctgcaacgcagcgaaaacctatgccgtaaactgcctggacggagcaaatcccgacgtaaccctttcgaactccgaaatcatcgcactgggtaccgactgccgtgccgtcagcgtcgtcaacacccgtgcgacgagcgacacgtcctacatcacgttcgacaacacgcaggcacgcacgtcgcagacggcgatcggaaaccgcgaatacacggccgatgaaatcaagtacttcacctcgcgcgtggccgacggcaactattatccgcgcggcatctccgtcggctcgacgggcggcaaggtgaacatcgccctgcggaacaactcctgcatcgaaggattcttctacggcatcaatatcgccggaatcaccgaaccggtcgacgtcgcgatcgacgactcgcggctcgacggccgcgccgccctcaacgtccacggccagaaatgcatcttccgcgtcaaccgttcgacgctcgtgggccgcaactatttcggcggcccgacggaggacttcgccacggtcgttctggatcgtgccgtcgcaacgtcccacagcaacacggtgacggtcgccgactccgaaatctactcctacaacaaaccgcagacggcgaccaaccaccagtattccatcgacatccgctcgctgcacaacaccgtcgagctgaaaggctccacccggctgatcgaagttggatcgacggaataccccgcccgcctgaacttcatggtttgctacgataattcgacggacaacgtcgtcaacgtcgatccgggtgtgaccgtatcgggaaaagagggggccaaagtgcttccggcaacggtctgggacggcagatcagtttacgcaccggccgccgatgccgacggcgactaccccatttacgaagcggccgagttgaagtggatcgccgaccagatcaacagcggcaattacctctacctcgaagccaaggggcgctatgcacaggtttacctgatgaacgacatcgacctgaacaacaagccgtggacaccgatgggctgccagaaccactcctatacactgagcggcgtcgacaaatgcgccttctacggcgaattccacggaacgggccacaccgtctccaacctcaacgtcgacatcgttgccgacgccaaaggattcatcggcaagacgttgggcaaggaggcgtcgatcagggagctgacgctgaaaaacgtagcgatcccattgaacgacgatgccgagattcagggaaaatgggtcggagcgctggtcggctgcatgggcggcgataccaatgtctcggactgccatgtcgaaaacgtgacgatccacgccccgggcatgtatcgcataggcgggctggtcggcgtatggacgaatacctcgcggcagaatgcgacggcgacggtcgagaactgttcggtaaaggacgctacgctcacggcaggatacgccatcggcggtttcatgggtacgattcagccccagaagcctgcggcgggctacaatacgatccggaattgcagcgtcgagaatatctcgatcacgcataaagaccagtattgctggggagacgacccgaactatgccgcatactatcccgagaccggtcattattgttacagctcggcacccttcgccggcgacgtgaacaacgtcaatttggaaaaatgtaccgtcggcggctcctgccccatcgccgatgccgacggccacaacacctacatgtcggcaacgtggaccaaactgccctacatgggcgaagtcggcggaaacgcctgcatcgacggcgtgaaagtttcggccgacccgacgccggccgaaggctacttcacgaagtaa

SEQ ID NO: 1178 - DNA, 2688 bp, Alistipes obesi
ggccggatgcgacaaaatgtcgccgtcggcgggttggcagggcttttgcgtggaagagggcagaaacaaaaaacaaaagatacgactatgaatgtaaacagtttaacgatcaaggcacaggaggcgttgcaggcggcctatacgctggcgcagcaacgcgggcagcaggccatcgagccgctgcacatgctctcggtgctcatccgcgacgacgacgcgctctgcacgttcctgctgggacgcgtaggcgtcaacgtgcgcggcctgcgcgacgaggccgaccgcgccgtgggttcgctgccgcaggtgacgggcggaaacggcgaacagtatttctcgcaggacgcctcgcgcgtcatccagcgtgcggtggacttcacaaagactttcggcgacaagtatgcgtcggtcgaacatctgctgctcggcctgatcgccgaacgcggtgcggcggccgacctgctgaaacgtgcgggcgctaccgagaaggagctcatcgaggcgatccgcaccttccgcaagggggcgaccgtcgattcgcagaccgcgtcgcaggagttcaacgcattgggtaaatatgccgtcaacctcaacgaacaggcgcgttcgggcaaactcgatccggtgatcggccgcgacgaggagatccggcgcgtattgcagattctctcgcgccgcaccaagaacaacccgattctcgtgggcgaggcgggcgtcggcaaaacggcgatcgccgagggcatcgcccaccggatcgtcgacggcgacgtgccggagaacctgaaatcgaaggtgatcttctcgctcgacatgggtgcgctgatcgccggtgcgaagtatcagggcgaattcgaagagcgtctgaaagccgtcgtacaggaggtgatcgcctcggaaggcgaaatcctgctcttcatcgacgagatacacacgctcgtaggcgccggcaagtcgtcgggggcgatggatgcggccaacatcctcaaaccggccctcgcgcgcggcgagctgcgcacgatcggcgccacgacgctcgacgagttccagaaatacttcgagcaggacaaggcgctcgaacgccgtttccagaaggtgatggtcgatgaaccgaccaccgacgacgccgtgtcgatcctgcgcgggttgaaggagcgttacgaaaaccaccaccaggtgcgcatcaaggacgaggcgatcgtcgctgccgtcgagttgtcgcaccggtacatcacctcgcgtttcctgcccgacaaggcgatcgacctgatcgacgaggcggcgtcgcggctgcggttggagatgaactccgtacccgaagagatcgacaacctcgaccgccgtatccgacaactggagatcgaacgtgaagcgatccgccgcgaaaacgacgaggaacgcgtcgcagcgctgaccaaggagattgaagagctacgttcgcgcgacgccgagaagcgcgccaagtggcagggacagcgcgacttgctgaccaagatccagcgccagaaggacgacatcgaacgctacaaggtcgaagcgcagcaggccgaacgccagggcgactacggccgcgtggcggagttgcgctacggcaagatcgtcgaggcgcagaaacagatcgaggccttgcagaccgagtttcagacggctgccggcaacgacgccctcatcaaagaggaggtcgacgcgcaggacgtggccgaggtcgtatcgcgctggacgggcattcccgtgacgcggatgctcgcctcggagcgcgagaagctgctccacatggaggaggagctgcacaagcgcgtggtggggcaggagcaggccatcgccgcgatctcggacgccgtgcgccgttcgcgcgccgggctgaacgacccgcgcaagccgatcggatcgttcatcttcctcggtacgacgggcgtgggcaagaccgagctggcgaaggcgctcgccgagttcctcttcaacgacgactcgatgctgacgcgcatcgacatgagcgaatatcaggagcgccacagcgtgtcgcggctcgtgggggcgcctccgggatacgtcgggtacgacgaaggcggccaactcaccgaagccgtacggcgcaagccctactcggtggtgctgctcgacgagatcgagaaggcgcaccccgatgtcttcaacatcctgttgcaggtgctcgacgacggtcgcctgaccgacaacaaggggcggacggtggatttccgcaacacgatcatcatcatgacctcgaacatgggttcgcagctcattcaggagaatttcgccgccgccttcaacggcgagaagttgcccgacgatacggtcgagcggacacgcctggcggtcatcgacctgttgaagcagcaactcaagcccgagtttctgaaccgcatcgacgagatcgtgatgttcgaaccgctcacgcgcaaggatatcgagaagatcgtcgacatccagttgggtatcgtgcggcgcatgttggccgagaacggtctggaactgaactatacgccggcggcgcgggcgtggatcgccgaagcgggttacgatccgatgtacggcgcacgacccgtcaagcggacgatccagcgcgaagtcgtcaacgacctttcgaagcggattctggcgggcgaggtcgaccgctcgcgcccgatctcgatcgacgtcgaagggggcaggctcctcttccgcaactaa

SEQ ID NO: 1179 - DNA, 2247 bp, Alistipes obesi
atgaaaaggtttttactacccattctgacgggcgtcgccgcagtggccgcccacgcgcaggagagcgattcggtacgcatgtaccgcctccaacagatcgaagtcaccgccacgcgcgccacgccccgcacgccggtggcctacaccgatctttcgcacgacgcgatcgcccgcaacagctacggcacggatattccgaccgtgctggcgctcaccccctcgatgatcgccaccaacgaaacgggtatcggcatcggcggcacgtcgatccgcctgcgcggcacggacgccacgcgcctcaacgtcacgatcaacggcgtggcgatgaacaatcccgactcgcactcgatgtactggtacgacacgcccgacctgatctcggccgtaggaacgatgcaggtgcagcgcggcgcaggcctctcgaccaacggcacgggcgctttcggcggcgcggtcaacatgaccaccggagcgctctcgaccgaattttcgggcgaagcctcgctcagctacggatcgtacaacaccaacaagcaggccgtcggcatctcgtcggggctgctgggcggccactgggccgtcgacgcacggctgacgcacatcggctcggacggttacatcgaccgcggcgccaccgacctgaaatcctatctgttccagggcggctactacaacggacggacgatggtcaaactcctctcgttcggcggcaaggccaaaacctacctcacctacaacggcgtcacgatggaggacatggagcgctacggccgccgctaccacgacagcggccagtaccagacctcggccggcccgcacgtactggccgacggatcgcacgtcggctattacgacgaccagacggacaactatctgcaaatcaacaaccagctcatcctgaaccaccgtttcaacgaccgttgggcgctcaacgctacggccttctacacctacggctacggctactacaagcagtacaaggacgacgcggaactggcggaatacgtcaatctcgacaccgaaatccaggaggccgacctgatccgcgagaagatcatgcgcaaccacctgggcgggctcaacgcctcggcctcctacacctcgcgtgcgctcgacctcaacttcggcggttcgtggagctactacacctgcccgcactggggcgagctggactgggtggacggcatggatgccggggcgatcggcggccgctggtacgacaacgacgtcgacaagcaggacgccaacctcttcgcacgcgccaactggcaggcggcgcacgggctgcggctcttcgccgacatccagtaccgttacgtccgttacgaagcgtggggaaccaacgacaactacatcggtcaggaggggatgccgatgcagcctatcgacgtggataagacctaccacttcttcaacccgcgcgccggcgtgagctaccgtctcggcgagcgcaacagcttcttcttctcgttcgccgtggcacagaaggagccgacccgcggcgatttcaccgaccgctacatgttcacggccgactacacctacccctcgtcggagaagctctacgactgggagttgggatacacctacaccgctccccggctttcgctgggcgtgaacctctactacatgaaatacaaggaccagctcgtgccgatgggccggatcaacgacggctacgatgcgctcaacgacaacgtcgacgacagctaccgccgcggcgtcgaactgtcggcgtcgtggaaggtcaccggatggttcaccgcatcggccaacgccaccttctcgcagaaccgcatcgagaactacaccgaactgcgcaccgtctacgacaacgacgaggactggaacgtcatcagcgacgggccggtagcgctgggcaccacgaaactcgcctactcgcccgaaacgatcgccaacctcattctcgacttccactacggcggattcgaagcggctttccacacgcagtacgtcggcgagcagtacttcgcgaacaacgagaacgacgcgctgtcgctcgacgcctactgcgtgacgaacctcaacctgtcgtactctttccgcacgcgaaacgcccggcgcatccgactgggcttgcaggtcaacaaccttttcaacgccgaatacgagaacaacggctacggatacagcacctggttccgcgattcgccctcgcagcatacggccctctacttcccgcaggcgccgctcaacgtgctggccaacgtgaccgtaaagttctga

SEQ ID NO: 1180 - DNA, 2280 bp, Alistipes obesi
atgcacagattccgcctcatcctactgcctctatgcctctttgcgacggcaacggcaatcggtcagaccgtcaccggccgcatcgtcgacgagcggcagcaacccgtcgcaggggtcgcggtcgtcatgcagacgcccgactcggtctatgtcgacgccgtggcgagcgacctcgaagggcggttcgccatcgcatccggcgtccgtccctaccgactgctgttccagcatctcagctacgacccgctgacggtggagcgttcgggcgacgacgccggcaccgttacgctgaccgaagcgacgaacctcgtggacgaagtggtcgtccggggcgaacgcccgctggtgaaagtcgagcaggggcgcctgagctacgacctccaagtcgccgcacagggcaaaatcgccgccaacgcctacgaagccctcaccaaactgcccggcgtgagcgaacgcgacggggcgctcacgctcgccggcgccgccagtgtgacggtcattctcaacggaaaaccctcgacgatgacggccgaacagctcgccgcactgctcaaatcgaccccggtcgagcaggtggagaaggtcgaggtgctctacgccgcaccgccgcagtaccacattcgcggcgcggcgatcaacgtcgtgcttcgccgccgtttcggccgctcgttctccggccaggtcaacggcacctacgagggcggctactaccactcgtggggaacgggagcgagcgccgtctattcgacgccgacactctcggtcgacgcgctctaccgcgtcggcgaagcccgttcgatgcgcaaactgccgctgacctcgcagcacacggtcggcagcgacacgttcgacatccggcaggagcagcgccttgccgacgacaacttcacgcacaacctccgcacggggctttcgtggaaaacctccgaaaaaagccatatcgacctggcctacaccgcatcgttcaccccgtcgggcaaaggcgacatctcggccacgggcaactacgtcgcaagcgactcgcatatccgcgacgacgcggcgatgcacaacctcgcgctctccgcctccacgggtttcggaatgcagatcggggccgactacacgcattacaacaccaccagccggcaggagatgtcgctcctgccggccgacggcgcaccttcgtcgttccgcaccgacgccggacagtgcatcaaccgcctctcgctctcgctcgaccagagccacgacctcggccggcagtggacactcgactacggcgcccgcttcgtctatgtccgcgacaacgactaccagtattatacgtcggaagaggcgatgagcgaccgcgacaccgacctgcggctcgacgaatacacctacgacctttatgcgggtacgagccggaacttcgcatcgggcgtctcgttctcggcctcgctcacaggcgaatactatcgccgcaacggctacgaccgctgggcgttcttcccgcaggcctcgctgagctggatagcgtcggccgaccatatcctgcaagcggagttctcctcggacaaaagctatccttcgttctgggacatgtcgggcgccgtcacctacctcgacggctatgccgaggttcacggtacgcccggcctgcgcccctcgtccaattacggtctcacgctgacctacgtcctcaaacagaaatacattttccagctcttcggcaaccatcgcgtcgacgccttcacccagtctgcctatctctctcccgaccgtccggcgcttatctaccagacgttgaactgggactatatgtcctccttcggggcgctggccgtcgtgccgctgcgtatcggcgaacggttcacgtcgcgcatcacgctttccggattcgattacctgctgcgcaaccgcgatttctacggcatggactacaaacgttcgaaatgggtgggatacgccgctctggacaatacgctgcgcctctcgcgcaaacccgatctggcgttcgagttcggagggtactatcagtccgaagcgatccagtgcacctacgacatcggcgcttcgtggcgcctcgacgcaggggtgaagtggacgttcgccgccggcaaggccgagctgagcgtcaagggcaacgacctgttcgacagcatgacgcccgtctcggaggtcgatttcggcgaacagcgtctgcgcatgggcaacgacttccacacgcgcaacgtgacggtcaacttcgtctaccgcttcggcggctacaaggacagggagcgcaagaaggtcgacacctcgcgattcgggcactga

SEQ ID NO: 1181 - DNA, 1662 bp, Alistipes obesi
atgaaacctgtccgaaaatcattggtgggcctgtcgctgctggcccctgccgctgtcttggcgaaagacgacaaacccaacatcgtcttttttctcgtggacgatatgggctgggtggacagctcggtcgcttacggcgaggaggtctatccgaacaatctgcggttccatacgcccaatatggatcggctggctcgcgagggcgttatcctgaccagcgcctatgcctgtccggtctcgacgccgacgcgcaccagcctgctcacgggcatgaacgccgcccatacgggcatcaccaactggacgtcgacgatgcgcgacacgcccagcgacgctacgggcggcgccgtagcgatggagacgggacagatcgaggagaatacgggggacagactgatccgtccggaatggaacatcaacggcatgagtcccgctccgggcgtggcgcatacgcagtacgccacaccgctgccgcagctgctcaaggatgcgggctatttcaccattcacgtgggcaaggcgcactgggcgtcggccggtacgccgggagccagtccctacaacatgggcttcgtcgtcaacgtttcgggcaacgtggccggaatgccgcgcagttaccagagcgaggagaattacggcaatacgcccgaaaagtggaatatgctggccgtgcagaacatgaccgagtattacggtacgggcgtgcacctgaccgaagcgctcacgcgcgaggcgctcaaaacgctcgaatatcccatccggcacggcgagcccttcttcctctatatggcgcactacgccacccatacgccgatccagcccgacaaacgcttcatacagaagtatctcgatgcgggcatggacaaggggcaggcgcgttatgcctcgatggtcgaaggtgtggacaagagcctcggcgacctgctcgactatctgaaagagatgggggtcgagaagaatacggtcgtcgtcttcatgacggacaacggcggcaacagcgaaaacaagcagaagggcggcgtgctgcacacgcagaacaaaccgctgcgcgaaggcaaggggtcgtgctacgagggaggcgtccgcgtgccgctcatgttccgctggccgggccgcgtcgcaccgaacacgcgcgtgaatacgcccgtgatcgtcgaagacctcttcccgacgctcctcgaagtggccggcgtgcgcaatccgcgcgtcgtgcaggcggtggacggcgagagtctggtgaaactggtcacgaagggttccgagatcgcggcgaaggctgcggcccggggcgagatcgcatcgcaggcggaggccaaccggctggtgatccccgccgaggtgtcgggcctcgatcccgaacgggttctggtgctgcactatccccacaagtggaagccctacgatctggcggacatcgactacctgagcgccgtgcgcaagggggactggaaactcgtctaccggatgcagaccggcgaactggaactttacgacctgtcgaccgatctgggcgagcagcgcaacctcgctgccgaacatcccgaaaaggtgaaggagctggctgccgagctcggcagcaggctgcgcggctggaaggcgccgatgcccacggtgcgccgcacgggcaagcccgtcgcaatgcccgatgaattgacgaattag

SEQ ID NO: 1182 - DNA, 2436 bp, Alistipes obesi
atgaaaaaacgaacgcttctcctgctgctgtctctcctgcctctgagcatgaccgcacagcagaaattcctgctgcgcggccaagtcgtcgacgcagcgaacgactcccccgtgagcttcgccacgacggccctgctgcgcgattcgacggccgtcgccgccgtcgccgccgatgcgcaggggcggttcgaactctcggcggaggccgcgggcgattaccgcctgcaaatcaccatggtgggctacaatcccgaaacgcagcccgtcacgctccgcactgccgcgaccgatgccggtacgatccgcttgcggcagggcgtggacatcgaccaggtgacggtcaccatccagaaaccgctcgtcacggccgacgccgagaaaacgacctactcggtcgaagacgatccgcaggccgcatcgtcgacactcgaagagatcctgcgcaaagtgccgcagctgaccatcgacgccgagggcaacgtgaagctcaacggacagagcgatttcaaggtgctggtcaacggacggtcgtcggcgatgttcaagaatttcaaggacgtgatccgcagtatgcccgcctcgcagatcaagaagatcgaagtcatcaccgaaccctcgatgaaatacgacgccgaaggcgcgggcggcatcatcaacatcatcaccgcccgcaaggagttcgacggctacaacggcagcctcaactacaacacgggactcgacacccgccagcaatacggcggagcctcgctctccgtccagaagggcaagttcgccgcttcggtccaggcgttcttctttcagatgaaccgcaggaaccgcccctacacatcggaaagccggcgcgagaatttcgcctccgaacagcagcgctaccacacctccgaatcgaccggctacggcaagggccacaacgaatacgtcacgctgaacctgagctaccaacccgatacgctcaacctcgtcaccctcgaaggatcgctttggacaggcgcatggaagaacagctccgacaccaggatccgcatgtccgacgccgccgaaacgccgaccgtcgcctacgacacgcacgactacgacaactacccctacacgggatttcaggtcggcgccaactacgagcggcgtttccgcaagcccgaacatacgctcactgtttcggacatggtcgagatcgaccccgacaagagttacaatctcgtcacctacgacggcgtgctgaactacccctcctcgcaactctacaagcgccatacgagccggagcttcacgaacaccttccagctcgactactacaacccgctcgcggaacaccactacgtcgaagccggcagcaaatatatctaccggatcaacaaaggctaccagaacgagatcccgtggatcgatcccgtcgggttcgatccgacgaacatgaccaagtacgacgacctgcggcagcggcagcagatcttctcgctctatttcggctacgggttgaaattctcaaaggtatcggcgcgtgccggcgtgcgcatggagcgcacgtggaaccatgccgacgccgacaacagccgggagggaatctacgattacggcaaccgcctgctgaacttcatcccctacctcagcttcacctacaaaccgcgcgacgggcacaacctctcgctctcgtataccgaacggctgcgccgtccctcgatctcgatgctgtcgacctacctcgacgacagcgacccttacaatacctcgcagggcaaccccgatctggaagcatcgacgacacatacgctgtcgctcaaatacaactatttctcccccaaatggagcggcaccttcaccctgtcgggccacctgtcgaacgacggcatttcgaactggacgagcgtcgacgaccagggcgtctcgcacacgacgtacagcaacaacgtgcgcgagcgcacggccagcgtacggctttcggtcaactactccccctcggagaagttctccttcgcgctgaacgggcggggcggttacagccactaccggctgccccaagaggagatctccaccgaggagttcaccttcgaccagaacctcaacatgaacatcgcgctctggaaagcggccaccgtttcgctgggcgaaggatacaacagcggcagcgcgaacctgggccgcaagtcgggcgactacttctactcctatgccaccctttcgcagaagttcttcgacaagaagttgcagatttcggtcagctgctacaaccccttcaccaaataccagacgtacagctccacggcgcaaacccctacctatcgctcgcagagccgcagccgcaaccattcgcgccagttctcgatcggcgcctactggcgcttcggaaagcagaacgtccaggtcaggaagacccgcaagtcgatctccaacgacgacatgatggacggcggcaacaagcagggcggcaaacagtag

SEQ ID NO: 1183 - DNA, 3708 bp, Alistipes obesi
atgaagaactaccgtattttcgtcgagaaacgccccggatttcgggtcgaggccgagagcctgcaacacgatttgaacgagaacctcggattgcacctctcgcagttgcgtctgctgaacgtctacgacctgttcggcttcacgcccgaactgctcgaagcgagccgttacagggtgttcggcgaggtgcagaccgacgaggtgaccgacgcctgcgacctcgaagggaggaaattcctggcggtggagtatctgccgggacagttcgatctgcgcgctgcgtcggccgtcgactgcgtgcggctgatcgatcccgaagccgaggtgcgcatccgctcgtcgcggctgctgttgctggacgcagcgacgaccgacgaggagctggcgcgcgtgcgcaaatactacatcaacgccgtcgagtcgcgcgagaaggatctctcggtgttgagcgacatggagcaggccgaggtgaagcccgtggaggtgctcgcgggactgcgcgagctgaccgacggcgaactggctccctattgcgcgaagatggggctggcgatgaacgccgacgacctgcgcgaggtggtgaactatttccgggccgaggggcgcgatccctacgagacggagctgcggattctggatacctattggagcgaccattgccgccatacgacctttacgacggtgctgacctcgattcgggtcgacgagtcgttcatgcgagccgagttggaggagtcgttggagctgtatcataagatccgccgcgaactgggccgcgacgaaaaacccctctgcctgatggatctggccacgatcggcgcccgttacctgcgcaaaatcggcaagctggacgatctggaagtgagcgaggagaacaacgcctgctcgatcttcgtcgacgtcgacgtggacgggcagcccgaaaagtggctgttgcagttcaagaacgagacgcacaaccaccccaccgagatcgaacccttcggcggcgcttcgacctgtctgggcggtgcgatccgcgacccgctgtcggggcgcagctacgtctaccaggccatgcgtgtgacgggtgcgggcgatatctatcagcctgtcggcgagacgctcgccggcaaactgccccagcgggtcatcagccgcaaggctgcggccggttattcgagctacggcaaccagatcggtctggccacgacccacgtgcgcgaaatctatcatcccgactacgtggccaagcgtttggaggtgggtgccgtggtgggagccgtgaaggccgaaaacgtgcggcgcgaaacgcctgccgcgggcgacgtggtgttgctgctgggcggccgcacggggcgcgacggcatcggcggtgcgacgggttcgtcgaaggaacacaataccaagtcgctggaaacttgttcgtcggaggtgcagaagggcaacgctccggaagagcgcaaactggaacggctgttccgccggccggaggtgacgcgccttatcaagaagtcgaacgacttcggcgccggcggcgtgtcggtggccatcggcgagctgaccgacggtctggacatctatctggaccgcgtgccgaccaagtacgacggcctgaatgcgacggagctggcgatcagcgagtcgcaggagcgcatggccgtggtggtcgaacgggccgacatggaacggttcatggattattgccgtgaagagaatatcgaggtgacgcacgtggccgacgttacggatacgcgccggatgcgcatgtacaaccgcgaccggctcgtggtcgacctctcgcgcgagttcatcgactcggcgggtgcggcccactatgccgaggccgagatcggcgccgtcgaggcgtgcgaccccttcgtgcgcaagccgcagggtgcgacgctcgccgagcgcatggaggccgacctggcggacgacaacgtggtgtcgcagaagggtctcgtcgagatgttcgactcgacgatcggcgcttcgaccgtgctgctgcccttcggcggccgcacgcagggctccgagacgcaggtctcggtgcagaaactccccgtcgagggatacaccgagacggcgagcatcatggcctacggctacaaccccttccttacgtcgtggagcccctatcacggggcggcctacgccgtcgtcgaggcctgcgccaaggtagtggccgccggtgcggagttcggggggatgcgtttttcctatcaggaatatttcgaacggatgcacaccgcccgttcgtggggcaaaccgctggcggcgctgctgggtgcgctgcggatgcaggtcgagctggggctgccgtcgatcggcggcaaggactcgatgagcggcaccttccagcagatcaacgtgccgcccatgctcatggccttcggcattacgaccgtcgacgcgcggcgcgtgatctcgaccgatctgaaagaggcggggcatacgctctacctgctcaaacatacgccgaaggcgaaccgtatgcccgataccgcggcgcttcgaaccttgtggaactatgcttccgagcggatcgccgcaggtcggatcgtggcgggctatgccgtcgggttcggcggtgtggccgaggcgctggcgaagatggctttcggcaacggaatcggcgcggaggtcgagttgccggaggaggcgctgttcgcctacgactacggttcgatcgtggtggagagcaccgtcgaactcgatgcgcccttcgccgtgcggctgggccggacgacggccgacgaagcgttgaccgtcaacggcgagcggatgccgctcgacacgctgcgccgcgccaacagcgagcgcttcgcccgaatctatcccgaccgcggcgcgaaccgcggaacggtcatggagagcacacccgcacctcgcacgttcgtctacgggggcgaggcggtggagcaccccgtggcctacctgcctgtcttcccgggcacgaactgcgactacgacacggcgcgcgccttccgccgcgccggcgccgaggtcgagacgacggtcttctgcaacctttcggccgaggcgatcttccgctcgatccgcgagatgaaggagcatatccgccggtgccacatcttcgtgctcagcggcggattctcgtcgggcgacgaacccgacggaagcggcaagttcatcgccaacgtactcaacaacaaggatatcgcggaggagatccatgcgctgctcgaccgcggcggcctgatcctgggcatctgcaacgggttccaggcgctcgtcaagtcgggactgctgccctacgggcggctgggttgcgtgacgaaggattcgcccacgctcttccgcaacgacatcaaccgccacgtttcgcagatcgtcaccacgcgcgtggcttcgacggcttcgccgtggctcagttcgttctcggtgggcgatctgcacagcatcgccgtcagtcacggcgagggcaagttcgtggtcggcgagcagctggcgcgccggttgttcgagcgcgggcaggtagctttccagtacgccggccccgacggtcatgcgacggccgaagcgccctgcaaccccaacggttcgttctacgccatcgagggcatcgtctccgaggacgggcgtattctgggcaagatgggccatacggagcgctacggagagaacctcttcaagaatatctgcggggagaaacggcagccgatcttcgagaatgccgtcgcctatttccgcaaacggaactaa

SEQ ID NO: 1184 - DNA, 3228 bp, Alistipes obesi
atggtcgaaggcaccgttgtcggtcgtgaaggcagtcaggccgccgtgccgttggtcggcgtggcggtggtggtgaaggggtcgctccgaaaccatgccgtcaccgatttgcagggacgttactcgatccgcgtcccctcttcgaccgacacgttgcagtttacctatctgggttataaaccgttggagcgggtggtcggttcgcgcacccgcctcgatgtggagatgctctccgaatcgcagcaggtcgacgccgtggtggtgacggcgctcggactgacgcgcaaggaaaaaagtctgggctacgccgtttcgacggtcggctccgaagacctcaacaacaccgtcacgaacaactggctcaacgggatggccgggaaggtggcgggtctgaatttcgacacttcgtcggccggtcccggcggatcgattcgcgtgacgctgcgcggcgaggggtcgttggcttatgacaagaacgaagcgctgttcgttgtcgacggcgtgccgatcaacagcggcatgacctccaataccgagaacggctcctacggcagcaccgtcagtacgatcgattacggcaacggcgcttcggatctcaatcccgacgatatcgagtcggtatcggtcttgaagggccccgcagccacggcgctctacgggtcgcgcgcagccaacggtgcgatcatcatcaccaccaagtcgggactcaaatccggagggttgcgcgtgacattcaattcgaatgtcacgctcgaacaggccggtttctggcccgattttcaggaggagtacggatcgggcgtctatgagtcggcgcagatcgacggcgtgaccacgccgcccgaatactcctactggaacgtggcggccgacaagagcgacacggggcagaagatcacccgctatcacgcccgttcgtctttcggcgagcgctacgatccctcgaagatgcgctacatctactcgtcccgcaactgggataccgacgagtatacgcgcaaaccgtgggtggcgcaggattggtacaaaggattcttccgtacgggcgtcacctattccaattcgatctccatcgagggcggcaacggcaagggcaattcggcccgcgtgtcgttcaaggacatgcgcaacgactggatcgtccccaatacgggttacgagagccagaatctcagcttctccttctcgacccgcatttccaaggccgttaccgtgagcggtaaggccaactactatcgcaagaacagcgacaatcttccttcggccggttacagcacggcttcgccgctctatgcgctgatctggaatccttcgtcggtgagcgtcgacgatatgtacgccgagtggagcgaagggcgtatcgcggccatgaatgccgcaggaacgaccggatcgggcaatctgatcaaccccagcagcgacaatccctatttcatggtttacgagcagctcaacacgcaggatcgcgaccgcgtgtacggcaacgtctcggtgaacgtcaatatctggcgcgaaaagctgacgctcatgctgcgcggcggcatggatctcaacaacgattttcgcacgcagcgcaaaccgcagtattcgatcgggcacaccaaggggtggtaccgcgagcagacggtgcgcaatttcgagatgaacacggatttcatgttcaactacaaggactcgttcggcgatttccatctttcggcggcgttgggcggcaaccggatgtatcagaaattccagaatgtgacgcagacggccgagaatcttcaagaacccgacgtctttctgctggtcaatgtcgacggacggttgctgtcgtccaacacgcggcgtgaaaagggggtgaacagcctctacggttatgtgaacctcagttggcgcgacatgctgtttctggatctgacggcacgcaacgactggtcgagtacgctggcgccgggcaacaactcctatttctatccttcggtgggagtcagcttcctgctggacgaggcgctcggttttcgggaacgcgcaccgtggatcgacatgctgaaactgcgcggatcgtgggccaatgtgggcaacgataccgacccctatcagctgacggccatttacagcaacagcgatttccagggaggctatcgtctttcgagcgcgatccagaactacaacatcaaacccgagaacatcgagagctgggagaccggcatcgaagcccgtctcttcggcggacgcatcggactcgacgtggcgtattacgattcgacgacgaccgaccagatcatcaccgttcccgccgactgggccacgggtgcggcatcgaaactcatcaatgcgggcgaggtcaacaaccgcggtgtggaggtggcgctcgatctgcgtcccgtcgagacgaagaactggcgctgggacatcggtctcaactggtcgaagaactggaacgagctggtggcgttggcgccgggcgtggagatgtggcagctcaattcgaagctgacggtcggctcgacggtcttcacctacgcctatccgggcggtgtgctgggacgcctttacggaatcggctacgagacggcgcccgagggaagtttctacgtcgacgaggccgggaagttcgtggattgctccggagccaggatcatcgatgccgaaacgggaaatcccgtgctgacggagacgctcaaagatctgggcagcatctatcccaactacaaggcgggtctgaacacgcggctcagttacaagggactgtcgctggcgatgactttcacggcgcaacagggcggacgggcctattcggtgacgagcgccgtgctctcgacgctgggcaaactcgaaaattccctgccgggtcgttacgacggtctgatcgccgacggggtcaatctccatgccgacggaacctattcgaagaaccgtacggtgacccagaatgtcgtcgaatattacaacctctatgcgcagtaccgcaacaacatcgagcagcacgtctactcgacttcgttcctgaaactcaaagaactgcggctggattacagttttcccgaacagatctgccgccggctgcgtgtggtgcggtccattcagctgggcttcttcgccacgaacctcttctgttggacgaagtggccgcagtacgatccggaagtggcgtcgtgggccggcgggtcgctctcgaagggtgtcgagaccggcggttacccgatgacgcggacttacggattcaatcttaaactaaccttctga

SEQ ID NO: 1185 - DNA, 2850 bp, Alistipes obesi
atgccgatcaagttcttgtacagcctgttttgtctcctgaccggagtgctttcggcgatgtcgtcgcgtgccgccggtcccggtgtcatcaacctgctgccgtccgattatcgggcggccaacaagaactgggcggtggccgaagacgatgcgggaacgctctatgccggcaacgacaaggggctgctcgaattcgacggcctgcaatggcggttgtacgaactgccccgcgcctcgatcgtgcgttcggtggccccgctgtcgcacgacgtgatcttcacgggcgggttcgaggagttcgggcgctgggatcgcgacgcttcgggtgcgctgcgctatacgtcgctcgttccggctcagcgcaatccccgcttttcggacagcgatttctggaaaatctacatcacgccgcagggggtgttgtttcaatcgttccacggcatctacctttatgattacgagcgcgtccgccgcctgacgggcgagatgaacatgctctttcttctgcgtgcgggcgacgagttctgggtgcaggagatgggcggcccgctctatcggatgcggcaggagtccttcgagcggctgcccgacagcgaacgcttctcgacgacgaccgtgcgggtgctgctgcccgggccgcacgagggcgaatggatcgtggggacgggtaccgacggattgtggcgctacgacggcgaacggttcacgccgtggagtccggcgctgtcggagcggttgcggcgcgacgaactcaactgcggcatccgaacctcgcgcggcacctatctcttcgggacgcttttcggaggattgtacgaggccggtgccgacggacggctgctcgcggttctttcgaccgaaaaccggctgctcaacaacagtgtgatggcgcttgcggaggatgcgcaacaaaatgtctgggcggcgctcgaccggggactttcgttgctgctgttctgcgaaggggtggattaccatacctacaacaagtgggcggccggttcgctctacgacgcctgccgctggcaggggaagttgctgctggctaccaaccagggggtcttcgccgtcgacgagagccgtctggcgacgggcgtcgatccctccgatttccgccccgtggccggcctgagcggtcaggcgtggtcgttcgacctgctcgacgggcggctctacgtgagccacaacacgggcgtcaccgaactccgtcccgatttttcgctggtacgccgttccgacatgggcggttacgggttgcggcgggtgaaactgggcgaaaagagccgcacctactacgcctcctattacaagttgcggctgctcgacgacgacggtacgatgcacgaggtcgacggactggacgaatcggtctaccgcatcgaggcggattatatgcgcaacctctggctcgaacatccgtcgaaaggggtctaccgctgccgcatgagcgacgacggccggcgcatcgaggagcggacgctctacggaggcggtgcgggcgacggactgccctacaaactccatttgctgcgcgtgggcggccgcgtggcgctcatgggcgacgacaggtttttccgttacaacgaatatacggactgcatcgaggcggatacggtgctcgatgcggcgttccgcacggtggaggacatccgccgcgtgattccctatgccgacgaacggttctgggtcattaccggcagcggcgtctggaaattgcgttacgacggccggcgcagtgccgaattgacgccgtgcgccggcattccggtcgacaacatgatctacgggtacgaacaggtggcgcggctcgacgattcgacctgtcttttctgcggggacaacggcttcgaactcgtctcatcgcaggccgtcgaaatccccccccctccgattcctccgctactcgaatcgctgcgtgcgtcggggcgccggggcgatgaggcgtggtacgatctctcggctgcggtcgagattcctcaccagcgcaactcggtgactttccgctacgctccgcgtcggggcgcggttcccggcctgcgtttccgccaccgcctgacgggcatggagagcgcatggtcggagtccgaccggacgggaacggccgattacgcccgtttgccgcaggggcgctacaccttcgaggtcgccgtgggcgacgtgttcggccgctggtcggaacccgcccgtttcccgttcgtcgttctcacgccctggtacgctaccggctgggcctatgcgggctacgtgctgctgctggccttcactttctattgtctgtggctgttggtgatgcgtttctatcgccggcgttacctgcggcgtctgcgcttgcaggagatcgtcgcgttgcggcgcgccaaccgggagctgacccggcagatcgagacgcgcgacgccgagatcgtggcgcagagttcgacgctcatcgggcgcaacgagatcatcctgcgcctgcgcgacatggtcaacgagttccagcagaagcagggcagccgcacgacggcgcccctgtggcagaaagtcaacgcctatgtaagcagcaaactcgatacggagagcgactggacgctgttcctgatcaagttcgagcagaagcactcttcctatttccgcatcatgaaggaacgcttccccgacctgacgaccagcgatctgcgtctgagcgcctgcctgaaaatgaatctttgtaccaaggagatcgcctcgctgatgagtctgtcggtgcgggcggtcgagaacggccgttaccggctgcgaaagaaactcggattgacttcggcccagaatttgaacgaattcctcttgcatatcgattcgcaggagtcggggccggaggatgatgagaagtag

SEQ ID NO: 1186 - DNA, 4239 bp, Alistipes obesi
atgaaacgatttctatatctcttgctcctcacggcgacaaccttcgtctacggatgcagcgactacgacgattcgcaactcagcggacgtctcgacgacatcaaggagcggatcgcaaaacttcaagaccgcatcgcctcgctcaacagtcaactcgccgacctgagcgaactgacatcgggcaacgtcatcacggagatgaccgaagactccgaaggcaattatatcatcacctacaaggacaacaagaacgaggagaagagcatcgtactggccactgtcgaccagatgctcaacgtcccgctgctcggtgtcgaactcgacccgcagaacaatctatattactggaccgtaacggctgacggcaagacttcgccgctgctcgacaaagccggcgaaaaggtgcccgtaagcggatacacgcccgaagtatcggtcgacgccgagggattctggaccgtcaacggcgaacggctgaacgacgccgaaggagatccgatcgaagccaacgacggcgaaagctgcctgttcaaggatattgcccgcgacgccaacggcaacctgtcgctgacgctcggcgacgggaagatcatcacgctccccatccagcaggtactgaatctcacgctctcgacagcaatcaacaccaccgtcgtcgacccgacggttcccgcaaccatcgaatatgaactccacggcgaacatgccgcggaagcactggtcggcatcgccgaggccgaaggggtcgaaatcgtcctggacaggaaacagcagcggatcaccgtcaccttcccgaccggattcgacgatggatacatgatcgcaatggcctacgacatgcaggagcatacggtactgcgaccggtattcttcaccaaggcgacgagcgatcggatcgagatccgaacggccgaagaactcgtgcaattcgccgaaaacgtcaatgccggaacgggcgcacagcgaatgaccgccgtattgatgaacgacatcgatatgacgaagatcgcgtcgtggattcccatcggcaacggttcgttcgtcgccacggcttcggaatcgaaagtcgagggtgcggctttcgaagggacgttcgacggtcagggccacgcgctgctgaactgcaagatgaccggagcactcacctcggacaatcaagtctacggactgttcggcatcctcaaaggcgccacggtacggaacctcgtattgggtgccgaaagcggcgacacggggtcgttcaccgtttcgggcaacggaacgacctcgaccggcgtcatcgccggcgcctgcgtcgactcgaagatcgagaaatgcaccagctatctaccgatggtttgcgaaggcaacaactcggcaaacaagctgatgaccatggggctcgtcggcttcgtctacggcgccggcacgagcgaggataccgtttcgcaactgaccgatttgacaaactacggtgcactgaaagcggatccgggtgccgccaacgccaacggattcacctcgactcaggtcggaggcatcgccggattctcgaacacttcccgcacatcgaccttcgccaatcggttcctgcgctgcataaatcacggagacatgaccgtttcgacaggacgcgcttcgggcatcgtcgccgcagccaacaccttcacgcacatcgtcgaatgcgagaactacggcgacatgatgaatacctatgcgggctccaagggcggacgtctgggcaacatcacctgcatcctcggcacccagtcgatcataaacggctgcaccaaccacggcgacgtcgtgacgaccaactcccaatcccacgccggaggactgctctgtctgtccaatgccacagactgcgaaatcatcaattcggccaactacggcaacgtaatctccgaccttacgacctaccgcggcacgctcgtagccaatatcaacagcctcggaaagatggacaacaacatcgcaggcggcggaataggatcctacaacggcggcgactacgaaatggtcgccatcaacgaaatgaacttcatggattatatcggaaagatcaaggccggcaacgaagagcgcgtgaccaataccaagtacggaggcgaggtctcgacggccaaaggcattcgcacggccgacgatctcgtggctctcgcggctgcggtcaactccggcaagccgctcggcgaatggcaaaacgaaaacggagagatctgcctgctgaccgacatcgacatgtccgaggtcgccgaatggacacccatcggcaaggcgaccttcgtcatcgcaaacaacaaactcacggtctccggaacccccttcgcaggacatttcaacggccagggttaccggatccgcaatctgaaaatggtcgctgcgaacagcgaggagggggctacatacggattgttcggaactttggcacccggcgccgtgatcgagaatttctcgttcgacacaggctgttcgttcaccgtcgcgtccacagccggttcatcgaacggcgtagtggccggactggtttacgacgctacggtgcgtgacatcacgagcagcgctccgatgcttttccagggtgcggcgggcaatgtccgcatcacgatggccctgataggaacggcctttgccgaaacagccaacgtcacgatcgacaacgtgaacaacaacggcacgatcacggccgaaaaccgagacaacaatacgaacggaggcgccacgggctaccacatcgccggcattgcgggattcaccaccaacgacggggcttcgcagcagaaagtcatcatctccgactgcatcaactacggcgacatcacctccgcgacaggacgcaccgcgggcatcgtcgcagcggccaaccgctatacccaactggccaactgcgtaaatcacggcaagcagctgaacacttgtccgaaaaacgatgcgggacgtttgggtaacatcgcctgcaacatgggcgcagggtcgtcgatgatcggatgttcgaactacggcgatctcacctcgacgaccggttcccgctgcggcggcatcacgtcggcggcaggcgacgcgaccttcgagaactgcgccaactacggtacgatcctgaccgacagcccctatcgaggtgtattctgggggtataacaacgccgtggcacaatggaccgactgtacggccggcggcaaggtcggaacctacaacgccaatgctcccgttttcgactcctatgccgatgccgagcaagccaactacctggggaaacaaggggcgaaccaatcgacccttacgaatatcgcctaccaaatcggaaactcgggcggaggaagcgcgggcggcaacgcggaactgcgcattctcttcatcgggaacagttttacgaaagatgccgtggagcatctgcccggcattctgaaagccatgggcatcgacaaggtgaagatgacacacatgtattacggagggcgtacggttcccgaatacaacaacggcttcgccaccgtgaacgactaccgttgctacgaatgcaatccgggagcggccggctggaccgaatcgatgaacaagacgatcaaagaggtagccgcttcggagcagtgggacgtcgtgaccatccaggaacacacgggcaaggtcaacgcatggaagtggacctcggccgagaaagaggctttgcagggactcatcgacaacgtcaagtcaacgcaaaccggcgccatgcccaagttttactatattctgtcgcaggcctatgccgatcccgcactcgtcagctattcgcaacagacggtgatcgtcaacaacttcgcctcgtcgcagacggacatgtacgccgccatcgtcgcacaaggccaaaaagtaatgagcgaagtcgcattcgacgatgtgatcgccacgggcaccgtcctgcaaaatctccgcacgtcgaaactccaaaacgcgatggacatgacccgcgacgggtaccacatggactacggcatttcgcgttatgccgcatcgtgcgccgtattcgaaaaactgatctcgcctgccttcggaggtgtgacgctcgacggaaatccgttccgctatacgacatcgaacaccacccacggcagctattcgacccctgttaccgaggcgaatgccccgatcgccctgcaagcagcgcgctatgccctgactacgccctacgccgtcaccgacatgtcccacatcgggcaggaaagccccgataacggcatcgaggacacggaattcgaggaggaccagaacaaagaataa

SEQ ID NO: 1187 - DNA, 2376 bp, Alistipes obesi
atgttttatgtctcacaacaggaatcacagatgaaaaaatcactcttatttctccccctgctgggcctcgcgtcgaacgtcgcggcccaggaattgcacggcgtcgtcaccgacgccgacaacaacccgctcgtcggcgcctcggtctactgggccgagaccacgatcggcgccagcacctcggctacgggcgcctacaccgttcaccgcgtcaagaactacgaccggctcgtggcctcctatctgggctacgtcaacgacacgatccgcatcgccgacggagtggccgaacagaacttccggctccgctccgaaggcgtcgacatcgagggcgtcgtggtcgagagcacgctgggcggcaactacgtcaagcgcgacggcattctcaaaggcgaaaccatttcgttcgcgggcctctgcaaaatggcctgctgcaatctggccgagtcgttcgaaaactcggcctcggtaacggtcggttacagcgacgccatctcgggcgcacggcagatcaagatgctcggactggccggcacctatacgcagattctcgacgagaaccgccccatcatgcgcgggctgtcggccccctacggactgagctacacgccgggcatgtggctcaattcgattcaggtgtccaaaggcgtctcgtcggtcacggcgggccacgaagcgatcaccggccagatcaatctcgaacaccgcaagcccaccgacgacgaacggctcttcgtgaacctctatttcgacgacgagctcaaacccgagctgaacctctcgacagcactgcccgtgacgcgcgacaagaagctcacgacgatcgtgctggcacacggttcgatggacaccaaatcctacgaccacaaccacgacggcttccgcgacctgcccgaggcgcgtgcgatgcacgtggccaaccgctggctctacgccgccgacaacggactgcaactgcgctggggcttcaaggtcacggccgagaaccgtctcggcggccgcatgggctacgaaaattcgatgcgcgaccagatgcgccagagcgcgctggacggcggctcgctctacggttcgcagatccgcaaccgaggcttcaacggctacatcaaactgggcatgcccgtcggtgcctccgtctacgacaaggacgagcaggacgagatgcgttccaacatcgccttcgtggccgatttcgaccacttcaacgagagctcctacttcggattgaacgactacgccggcaacgaaaactcggtgtcgctcaatgcgatgtacagccattacttcacctaccgctcgtcgctcatcatgggcgtctcggcccacctgcaatcgttcaacgaacggctcgtcaacgatttcgtcgacaacggccggatcgaagggcgcagctacgatatggaccacagcgagaacgaagcgggcctctacgccgaatacacctactcgatccgcgacaagttctcgctcgtagcaggcgcacgcggcgactacaactcgttctacgacaaatactacttcacgccgcgcggccacatcaaatggaacatcacgcgtctgttgacgttgcgcgcctcggcgggtctgggctaccgctcgaccaatctggtgacggacaacatcggcgtcctggccaccggccgccgtttcgccttcgacggctacgcatggaacggcgattacgatttccacacgctctaccgcgatttcaaccgcatggagaaggcgctgaccgtgggcggaagcctcacgcagacgttcggactggtcaagcccgaggacgccacgctgagtttcgactacttccgcacgcagttctacaaccaggtcgtggccgatcaggagtacagcgccaccgaggtgatgttctacaacaccgacggccgctcctacaccgatacctatcaggtcgacttcaactggacgcccgtcgagcggctcgacatcttcgcgacctaccgctacaccgactcgtcgatgacgctcgaccgtcccgacggcgggcgcgtgcaggtcgaacggccgctggtgagccgttacaaggcgctgctgaatatccagtacgccacgcggttccgccgctggacgttcgacgccacggctcagctcaacggccccatgcgcctgccttcgcagacgggcgacccgaccgtgacggagctctcgcccaagtacccggtcttcttcgcgcaggtgagccgcaagatcaagaaactcgacctctacctcggctgcgagaacatcggcaactacaagcaggagcacccgatcctcgctgccgaccaacccttctccaccgccttcaactcgtcggtggtgtggggcccgctgatgggacgcaagttctatatcggcctgcgatggaacttgtattga

SEQ ID NO: 1188 - DNA, 1854 bp, Alistipes obesi
atgaatccgacaccataccgacatgcggcagaccggatcgtctcccgaatcgccgttcccgtcctgcgggaaccggtcttctattgcttcatgctgctgaccttcgtatggccccagctgacgagcgacctgttccgcatcgaagcgacgcattgggagatactcggactctacatcgcctatgcctatgcggcgacgctgccgctcggcatactcggcggcaaagcccgccgctggtacaaagcggcagcctacacgctcgcctatgccgtttcgatggccgaatgctttctgctcgtcttcttccgtaccttcatcacgccgtcgctcatgagcatcgccacggataccgatccggccgaaagcgccgaattcatcgggtgctacctcttcaccggacgcttcgcactcttcctcgcggcttggagcctcgtcgcaggcatcaacctcttgctggaaaaggtttcgcaggcccggcgcaccgcaccgatgccccatgccggcctgcgcacctgcctgctgacgaccgtactggcgggggggggaattttcggactgacatccaacgcctccgccttcgaatcggcctggcggctctcccgcatacacgaccggcatgagctgcacgaattgttacgcgaagaaccggagctctgtctcgaacgccgttcggcacccgaacgcctgtttttcagtctgcggatgcaggccttcgaccgcaacgcgatcgggagcctgcacgaagcgatggagtcgattgcgatcgactcctgcacgttccgctctccggaaatcgtcctcatcctcggcgaatcctacaacaaacaccatgcagcattgtacgggtacccgctgccgacgacgccccgactgtcgcaggaagaggcggcgggccgtctctatcccttcaccgacgtggtatcgccggccaatttcacggtgaaagccatgcatctgctcttctccttcgccagccaggaccggcaaacggcgtggtgcgacacaccgctattccccgctctcttccggcgtgcgggttacgatacgctgatgttcgacaaccagacgaccttcacgctcgaaaacgacgacgtgtgggatcaggagatccgccatttcctctaccatccccgactctccccgcagctcttcacgcattgcaacgccgacaaatacccgttcgacgaaggactgcttgccgatttcgaccgacaagaccttcgcttccgcaatccgcaccggctcacgatcttccacctgatgggccaacacgtggcctaccgcaaccgcttccccgccgaagcgggttacttcacggccgacagcatccccgaatattcgacctcggggctgcggcgaagccgcgacgaacgccgcatcgtcgccgactacgacaacgccgtccgctacaacgaccgtgtcgtgggagagatccgcgaccgctgccgcacacgcgacgccgtggtcgtctacctctccgaccacggcgaggaggtgttcgattacgcccaccgcaacggacgcatccacgatgcgacgctctcgcccgactgctgccgtcaccaatacgagattcccttcatgatctggatgtcggaccgctatcgggccgcacgtcccgaactcgcggcggcgatcgcccgtgcggtcgaccggccctacatgaccgacgacctgccgcacctgctgctcgatctggccggcctctcctgccgttggttcgacccgacgcgcagcgtcatcaacgaccgtttcgatgcctcgcgcccccgattgctgcgcgacgacaaggtggactacgacctcatcatgcggcaggcgaagggcaatgcggaaacgaacaagggtgcctga

SEQ ID NO: 1189 - DNA, 1470 bp, Alistipes obesi
atgttgttaaccactgagaatatcattctgatcggggcgttgctgctgctggtttccgtctttgccggaaaagtggcctaccgtttcggcgctccggccctgttgctgtttctcggcgtcggcatgttgttcgggttgaggctcatctccttcaattcggctcccgtggctcagttcgtgggcatggtggcgttgtgcatcattcttttttcgggcggtatggacacccgttaccgcgccattcgccccgtgatcgggcccggcgtggtgctggccaccgtcggtgtggcgctgacggcgctgatcgtggcggggttcgtctacgtggtggcgccgtggtgcaatgccgagatgtcgttcctgctggcgctgctctttgccgccaccatgtcgtcgaccgactcggcgtcggtcttctcgatcctgcgcagccgcaggcaggggttgagcgagaatctgaaaccgttgctggagctcgaaagcggcagtaacgacccgatggcctatattctgaccattttgctggtcgggctgctgacgccgggcgaaagcatgggcttcggtacgagcctgctgctcttcgtggtggggatgacgctcggcgtcgtggcagggtatgcgttcggccgtctggccgtctggacgatcaaccggatcaatatcgaaaaccagtcgctctacgccgtactgctgctggcgttcgtcttcctgaccttctcggtgaccgacctgatccgcggcaacggctatctggccgtctatgtcgcgggactggttgtggggaactatccgatcgttcacaagaagacgctcggaacgtttttcgacggcttcacgtggctgtttcaggtgatccttttcgtcacgctgggactgctggtcaatatcgacgaactgttgcagcccgaggtgctgctgctgggcggcctgacgggtctgttcatgatcctcgtcgcacgtcccgccgcggtcttcctctcgctgctgccgttccgcaagttcaccacccgcgcccgcctctacgtttcgtgggtggggctgcgcggcgccgtgccgatcatcttcgccacctatcccgtcgtggccggcgtggaggattcgagcctgctgttcaacatcgtctttttcgtgacgctgttgtcgctggtcgtgcagggtacgacggtcagtctgatggccgaatggctggggttggcctatcccgaacgggaacgcatcttcaacgacgaagtgatgaaccgcatgctcgacgatgcgacgaccgaactgaccgtcaccgaagcgatgttggagtcgggacaccacttgcgcgacatcgtgctgcctgcggcgacgctggtggtgatggtggcgcgcgacgggacgtttttcgtccccaagggcaattcggtgctccgcgtgggcgacaaactgctggtggtgaccgagaacaagtcggaggtgaagtcggtcgtccagccgcaggagtga

SEQ ID NO: 1190 - DNA, 3816 bp, Alistipes obesi
atgacaacccctcccgatttcgtgcatctgcacgtccattcacagtattcgattctcgacggccaggccagcattcagaagctggtagacaaggccatgcgggacggacagccgggcatcgcgttgaccgatcacggcaacatgttcggtatcaaggaattttataactacgtcaagaaagtcaagggaaaatacaaagcgcaggccgccgaagccgaggcgcgtctggcggcgctcgtcgacggctcgcaggcgccggccgatccggcggagatcgcccgctgccgggccgaactggccgacctgaaacgcaaggcagcgttcaagccgatcatcggcagcgaggtttacgtggcgcggcggcggatgcaggacaaggagggaaaacccgatcagagcggttaccacctgatcctgctggccaagaatctcaaagggtatcacaatctcatcaagatcgtgtcgaaagcgtggaccgaaggattctacatgcgtccgcgtaccgaccgcgtcgagttggagaaataccacgaggggctgatctgctgttcggcctgcctggcgggcgaggtgccccgcgcgattacggccgacgacatgcagaaggccgaggaggcgatcctgtggcacaaaaaactcttcggcgacgactattacctcgaattgcagctgcacaaggccaccgtcgagcgggccaaccacgaagcctatccgatgcagctcaaagtgaacgagcatctgcgccgactggccgcgaaacacggcgtccgtctggtctgtaccaacgacgtgcacttcgtggacgaagacaacgccgaggcgcacgaccggctgatctgcctctcgaccggcaaggacctcgacgatcccaagcgaatgctctactccaagcaggagtggctcaaaacccgcgaggagatggcggcgatcttcggcgacgtacccgaagcgatggctacgacggtcgaaatctgcgaacaggtcgagacctattccatcgaccactcccccatcatgcctaccttcgaaattccggccgagttcggaaccgaggagggctaccggcagcgtttttcggagaaagaccttttcgacgagttcacgcaggacgagaacggcaacgtcgtgctcagcgaggaggaggcccgcaagaagatcgaaaaactgggcggatacgacaagctctaccgcatcaagttggaggccgattacctgcgcaagctgacgatggacggtgcgcgcaagcgttacggcgagcagcttaccgacgaacaacaggagcggctcaatttcgagctgcacatcatgaagacgatgggttttccgggttacttcctcatcgtgcaggacttcatccgcgccgcacgcgaggagctggacgtgtcggtcggccctggccgcggttcggcggccggttcggccgtggcctactgcctggggatcacgcagatcgacccgatcgcctacgatctgctgttcgagcgtttcctgaatcccgaccgtatctcgctgcccgatatcgacgtcgatttcgacgacgacggccgcggtcgcgtgctcaactgggtgacgcagaagtacggcaaggagaaggtcgcccacatcatcacctacggtacgatggccaccaagatggcgatcaaggacgtggcgcgcgtgcagaagttgttgctcgcggagtccgatcgcctctgcaaactggtgcccgacaagattcccgacaagaagctcaacctgccgaatgcaatcgagtatgtccccgaattgaaggctgcggcggagtcggacaaccccgttctgcgcgacacgatgcgctatgcccagatgctcgaaggcaacgtgcgcggtacgggtgttcacgcctgcggtacgatcatctgccgcgacgacatcaccgactgggtacccgtttcgacggccgacgacaaggagacggggcaaaagatgctcgtcacgcagtacgaaggttcggtgatcgaggatacgggacttatcaagatggacttcctggggttgaagactctgtcgatcatcaaggatgccgtggagaacatccgcctcacgacgggcaggaagatcgatatcgacgacttctcgatcatcgacgatccggctacctacaagctcttctgcgagggccgtaccgtcgggacgttccagttcgagtcccccggaatgcagaaatacctgcgcgagttgcagccgtcgaccttcgaggatctgatcgccatgaacgcgctctatcggcccggcccgatggattatatcccggatttcatcgcccgcaagcacggccgcagtccgatcgtctacgatattcccgtcatggagaagtatctgaaagacacctacggcgtgacggtctaccaggagcaggtcatgttgttgtcgcgtctgctggccaacttcacgcgcggcgagtccgacacgttgcgcaaggcgatgggcaagaagctcaaagacaagctggacgccttgaagcccaagttcatcaagggaggacaggccaacggccacgacccgaaagtgctcgaaaagatctggggcgactgggagaagttcgcctcttatgccttcaacaaatcgcatgctacctgctattcgtgggtggcttttcagacggcctacctcaaagccaactacccctcggagtacatggcggcggtgctgagtcgaaacctggcgaacgtcgagcagctgacgatctacatgaacgagtgcaagcgtatgggcatcaatgtgctcggccccgacatcaacgagtcgatgctgcaattctcggccaacaggcagggcgacgtgcgcttcgggctggcggcgatcaagggtgtcggcgaagcggccgtggagagcatcatcgccgaacggacgaagaacgggcgcttcaaggacatttacgacttcatcgaacgggtcgactattcgctcgtgaaccgcaagtgcctggaaaatatcgcctatgccggaggattcgattcgatttcggagttcagccgctgcaagtttttcgccgtcgatcagcgcgacaacaacggcgtgacctacatcgagcagctgatgcgttacggacagcgttatcagagcgagaagaacaacgcccagcagagtctcttcggcggcgataccggaacgaccgacatcacgccgccggtgattcccgcctgcgccgagtggtcgcagctcgaaaagctcaacaaggaacgcgaggtgatcggactctatctctcggcccatccgctcgacgactacaaggtgatcatccgcaacatgtgcaagacgcaggtgggcgatctggatcacctcgacgagttgaagggcaaggagatcgccgtggcgggcatggtcgtcgcggtgcagaacctgacgaccaagaccggaaagccgtggggaaagttcaagctggaggattacaacggcacgcacgagttcgcgcttttcggcaaggattacgagaatttccgcaaataccttttcagcgactatttcctctttatccggggacgggtacagccgcgcccctacaacgaccaggagctggaattccgcatcacgtcgatgatgcagctgtcggagttgcaggaggccgtcaaggaggtgcacgtgcagctggccgtcgaggagatcacgcgcgacctgatcgcacggatgggccgttcggtcaaggaggcgaagggcaataccctgctgcggctgaacgtctacgaccggcaggcacaggtgtcgctcaatctcttttcgaagagttacaaggtgagccttacgcaggaattggtgtcgttcttcgaagacaatgacataaagtatactgttatataa

SEQ ID NO: 1191 - DNA, 2550 bp, Alistipes obesi
atgctgactgaagaagaaaagaatgccggtttggaggggcgtatcatccccgtcaacatcgagcagcagatgaaatcggcctacatcgactactcgatgtcggtcatcgtttcgcgcgccctgcctgacgcgcgcgacggtctgaagcccgtgcaccgccgtattttgtacgacatgagcgccgaactggggctctattccgataaaccgacgcgtaagtcggcccgtatcgtgggcgacgtgctcggtaagttccacccccacggcgacttgtcggtctacgatgccatggtgcgcatggcgcaggagtggtcgctgcggtatccgctgattttcggtcagggcaacttcggttcgatggacggcgactcgcctgcggcgatgcgttacaccgaggcgcgtatgcgcaagatcaccgacgaggtgatggccgacatcgacaaggagacgatcgactggacgaacaacttcgacgatacgatgaaggagccgacggtgctccccaccaagattccgctgctgctcgtcaacggcgcgagcggcatcgccgtgggcatggccaccaacatggcgccccataatctgggcgaggtgatcgacgcctgctgcgcctatgtcgacaaccacgacatcgagtgcgaggagctgctccagtacgtcaagggccccgatttcccgacgggaggcatcatctacggctacgagggcgtccgcgaggcgctcatgacgggccgcggacgcgtcgtgatgcgcgcccggaccgagatcgaacacacggcgtcgggccgcgagtgcatcgtggtgacggagattccctacatggtcaacaaggccgagatgatcaagaagatcgccgacatgatcaacgacaagaagatcgagggcatctcctacatcaacgacgagtcggaccgtcagggactccgcatcgtcatcatcctcaaacaggatgccgtggcgagcgtggtgctcaatacgctttacaagaatacgccgttgcagacgtcgttccccgtgaacaacatcgcgctggtgcacggccgtccctacctgctcaacctgcgcgacatgatccgccacttcatcgagcaccggcacgacgtggtggtgcgccgcacgcgcttcgatttgcaaaaggccgaggagcggctgcacatcgtgctgggtctgttgatcgctcaggacaatatcgacgaggtgatccacaccattcgcgccgcccgcacgcccgacgaggccaagacggcgcttatggagaagttcggcctgagcgagttgcaggcttcggcgatcatcgagatgcgcctgcgcgcgctgacggggctggaacacggcaagctgacggccgagcgcgacgagttgcagaagcagatcgcctacttcaacgaggtgctccggagcgaaccgttgcagatgaagatcatcaaggacgaactgctcgaaatgaaggagaaatacagcgacgaacgccgcacggagatcgtctacgcctcggaggagttcaatcccgaagatttctacgccgacgacgaaatggtcatcaccatttcgcacatgggctatatcaaacgcacgccgctggccgaataccgcacgcagaaccgcggcggcgtgggggccaagggcagcgcgacgcgcgacgaggacttcatcgagcacatctacgtggccacgatgcacaacacgatgctcttcttcaccgagaaggggcgctgcttctggttgaaggtctaccagattcccgaaggaacgcgctcgtcgaagggacgcgccatccagaacgtcatccagatcgaaccggacgacaaggtgcgcgcctacatcaacgtcaagcgcctcgacgacgaggagtacgtcaacaacaactatatcgtgatgtgtaccaaggacggtacgatcaagaagacccgtttggaggcctattcgcggccgcgcagcaacggcgtcaatgccatcgtcatccgcgagggcgaccagctcatcgaggcgaagctcaccagcggcgaggccgaggtgatgatcgcggcgcgcgagggcaaggcgatccgcttcaacgagcggacggtgcgtcctatcggccgtgtgggcgccggcgtgcgcggcatctcgctcgaagagggcgacgaagcggtcggcatgatttgtgtcgaacccgacagcgggcaggacgtgttggtgctcagcgaaaacggatacggcaaacggaccgatctggacgagtaccgcatcacgaaccgcggcggcaagggcgtcaagacgatcaatattaccgagaagaccggaaaactgatctcgatccaggccgtgaccgacgacaacgatctgatgattatcaaccggtcgggtctcacgatccgcacggcggtgtcgcagatccgcgtggcgggccgcgctacgcagggcgtgcggatcatcaacctgcgcgagggcgacgccatcgcctcggtaatggccgttccgggcagcgaggaggaggagctggcggcggtcgaaggcggggagaatcccgctcccgcagcgacggacgaaacgcctgccgccgagcaataa

SEQ ID NO: 1192 - DNA, 3690 bp, Alistipes obesi
atgtcgttgcccattttccgactcggaattttgagacctaaattaaatctgcaaaacctgaacaaacctatgaattatctctacacgaaccgaagaagcgtgggaatattcggaggcctgctgttgctgatcctcttctcatgctgcggaatcgggagagcggcggcccaacagcagggcgccgaacagcgcatcacgctgtcgatgcgcgacaccgcgatttcggacatcctcgaaaacatcaccaaacgttaccagtacgccttcatcacccgcacggccaacgtcgataccaacgcccgcgtttcgatcgacgtggtcgacgaaccgctccgtgcggtgctcgaccggattttcgcagggcagaaggtcgccttcgagttcgacgggcggctggtgcgtatctccaaggcggccgtcccccccccctcctccgcgtcgacgatcgcggtttcgggcgtcgtgcgcgacgggtcgggcaatccgctggcgggcgtcacggtcatggtggccggaacctacaagggcgttaccaccgacaacgacgggcgctatgcgctgcgtgtcgacggcgaggcgtcggtgctgcaattcctctatctgggctataagaacgtcgaggagaccgtcggcaaacgcacgacgatcgacgtggcgatggaggaggatctcaaaatggtggacgaggtggtcgtcatcggttacggtacccagtcgcgcaagacgctgaccacctcgatttccaaaatcgacggcgacaagctctacggcgctcccgtctcgaccgtgggcgacgccctcaaaggcaaggtcgcgggtctgcgggtggccaccaacagctcgctttcgggcgaggcgccccgtttcctgatccgcggcggatcgtcgatcaacatgggcaacgacccgatctacatcgtcgacggggcgctgcgcgacgacctgagcggcgtcaaccccaacgacatcgagtcgatggaggtgttgaaggacgccgcttcggccgcgatctacggcgcacgcgcatcgaacggcgtcatcatcgtcacgacgaagaagggcagcccctcgcagggaccccaggtcgtcttcgacgtacaggtgggtttctcggcgccgaccaagaagtgggacctgctcagttcgcgcgagcagatcgcgctggtgcgtccggccatcgccaacatctacgccaagtcgaccggcacgctggccgccagttcgtggctggacggcgccaatgtcgccgtgggaacagggaacacgtcgaacaggaaccagttcaccacgcgctatctggaatacggcggtacggtgcccgacggctacgagtggatgttcgatccgctcgacaacagcaaggtcatcatcttcacggataccgatttccaggatcaatggatgagcgaagccttctggcagaaggagtacatcggcgtcaacggcggcagcgacaggatgagctacgccgcgtcgatcagctacctcgacgacggcggcgtcttcgccatgagcgactacgacgtcttcaccacgcacggcaacgccagcttcaagatcaccaagagcctcgaagcctccacgacgttcgacatttcgcgccagcggagcagcaagttcgtggacaactacttcaacgccttcggccggggaatcatgttcgccccgacggcgcgcggcttcgacgaggaggtcggctggatgtccagcggcggcaacgccaacgcccagctggcctcgttctacgaagcattctacgaccgcgaggccgccacggatcgcatttcaagcaccttcaatctcaaatggcggatcatcgacgggcttacggcgacggcccagtacaactattacggcaacaactaccgcggcagctactacgcccgcggcgaggtcgacggctacccgaacctcatcagccagacgcgttcgactaccgagacgcgcacgcagaccgtccgcgacaccttcacggcgcacctggccttcaaccgtaccttcgccgacaaacatacggtaggggcgacgctcggttacgagctgatgagccagcgttactggtacctcacctccaactcgacgggttcggcttcggacgacgtgcccattctcgattcgggcatcaacttcaaggcgtcgaacaaggacgaaaagcaggcgctcatgtcgttgttcggccgcgtgtcgtacgacttcgcacagaaatacatcgtttcggccacgttccgctacgacggctcctcgaaattcgccaagggcaaccagtggggattcttcccggcggcttcggcggcgtgggtcatcagcgaagagcccttcttcgagggggtcagacgcacgatgaacaacctcaaactccgcgtgtcgtacggtcagacgggtaacaacggcatcggactctacgacacctacggcgccttcgccacggggcagtacaacggccatacgaccttcctgccgtcggccatgcagaacgccgacatgcagtgggagtcgaccacgcagctcgacgtggggctggacgtcgggttcctcaacgaccgcgtgcgcttcatcttcgactactataacaagaagaccgacaacatgctcttctcgatcaccatgcccgacacgggcccctattcgagcgtgaaggccaacgtgggcagcgcccgtttctacggtttcgaggccgaactgaacgcggaggtgatccgtaccaagaacttctcgtggaacctcgggttgacctactcctacaaccgcaacaaggtgctgtcgctgcccgaggagtacgcctacgacgaggtggacatgtacggcaaccctaccggccggaaggcctaccgcataggcggctacaagatgtcggagacgggataccgattcggcggcacggccgtcggcgagtcgctggggcgtatctacggctacaagatcgaccacatcatccagaccgaggccgaggccgacgcagcctattacgacgccctgtcgaaaggccaccgcgtgagcgacggacagcagattccgggccgcaaggacgccggtgactacgagtggtgcaaccgctacggttcggcgcgcgatgccgacggcaatgaaatcatcaatgccgaggacatgttctacctgggcaacgtcgtgccgcactcgacgggcggtatcagcaacacgttccgttacaagcggctgacgctgtcgatctacctggattatgcgctcggacattcgatctacaactacatgaagacccgcatgatccagaacacgatcgggcaaagcaactcggccatcgcctcctacgtctacgactgttggaagtacccgggcgacacgaatgcgaaatacgcccgctatttccccaacgacggcgattacggcaatgccaactggggccgcgcctccgacttcaacgtcgagaaggccgattacctctgtctgcgcgacgtgtcgctctactacgacctgccggaacggtgggtgcgcaagctgcacatgaagaagctgacggtgggcattacctgcaatacgatcgcctactggacgggcgtcacgggtgcgatcaaccccgaaacgggtatgggagccacgtcgagttcgggccactacacctcggtgtcgacggccaattcgagctccgattcgcggccgaacatcttcccgcctacgagcaagttcctcttcaacctgaaagtcaccttctaa

SEQ ID NO: 1193 - DNA, 1845 bp, Alistipes obesi
atgtgcggtatcgtcggatatatcgggagcaaggaggcttatcccgtactgatcaaaggacttcacaggctggaatatcggggttacgactcttcgggcgtagccatgatttcggacgaaggaaaactcaacatctataaggccaaaggaaaggtcgcggcgctggaacatttcgccgagtcgaaagaccgcagcggcacggtcggcattgctcacacgcgctgggcgacgcacggagaacccaacgacacgaacgcccatccccacgcttcgcagtcgggcgatctggccatcgtacacaacgggacgatcgagaactatacggtggtcaagaaggcgctcgaacagcacggctacgcgttccgcagcgagaccgatacggaggtggtcgtccagctgatcgactacatccgtaccgacacgggctgcacgctcttcgaagcggtgcgcgaggcgtgccaccagatcgtcggcgcttatgccatcgcggtgatcgaccgccgcaatcccaaccagatcgtcgtggcgcgcaagagcagcccgctggtgatcggcgtaggcgacggcgagtatttcatcgcgtcggacgcaacgccgatcgtcgaatacacgaaccgcgtggtctatctcaacgacgacgagatcgccgtcatcaaccggggcgagtcgctccacgtcttcgacatggacaacaaggagtcgaaggtcaacatccagaaactccggatgagcatctcggagctggaaaaggggggctatccccacttcatgctcaaagagatcttcgagcagccccgcacgctgcgcgactgcatccgcggccgcgtgagcgctgacggcaagcacgtcgtgctgtcgggcgtactcgacaacaaggagcgcttcctcgacgcccaccgcatcctcatcgtggcgtgcggcacgtcgtggcacgccgcgctgatcggcaagcatctcttcgaggacatgtgccgcataccggtcgaggtggagtacgccagcgaattccgctaccgcaatccggtcgtgagcgacaaggacgtgctgatcgccatgtcgcagtcgggcgagacggccgacacgctcgccgcactggaactggccaaggagcagggcgccttcgtcttcggtatctgcaatgttatcggttcgtcgattccgcgcgccaccgattcggggtgttacatccacgtcggacccgaaatcggcgtcgcctcgaccaaggccttcaccggacaggtgaccgtgctggcgatgatggcgctgatgctcggccgcatgaagggcacgatcgccgatgaggcgttcgaacgggtcacgcgcgacctgcaccggttgccggagttgttgcaggaggtgctcgaactcgacacgcgggtgaaagacctctccaaaatattcacctacgccaagaatttcctctatctggggcgcggctacaattacccggccgcactcgaaggggcgctcaaactcaaagagatttcgtatatccatgccgaggggtgtcccgccgccgagatgaagcacggtacgatcgccctgatcgacgacgacatgcccacggtggtgatcgctccgcgcgacaagatctacgacaagacggtgagcaacatccagcagatcaaggcacgcaacggccgcatcatcgccctcgtcacgcgcggcgacgaggtggcggcgaagatcgccgactacgtgatcgagattccggaggtatgcgaatgcctctcgccgatccttacgtcggtgccgttgcagctgctggcctactacgtggccgtcaacaagggccgcaacgtcgaccagccgcgcaatctggccaagtcggtgactgtggagtga

SEQ ID NO: 1194 - DNA, 2679 bp, Alistipes obesi
atgaaaagatttcttctgctgtttcttgcgacggtcgtcacggcgtggagcgcttcggcgcaactctccgtgtcgcagcttcgcaccgagcatctgaccgaccccgtggggatcggggagcgccgtccgctgttgagctgggaggtgagcgatgcgtcgcgccgcggcgtgacgcagagcgcctacgagatccgcgtcaagtccggcgggcgtaccgtctggcggacgggcaaagtggcttcggcggagtcggccggcgtcttttacgacggcacgccgctgacgtcggatacccgttacacgtggcaggtgcgcgtgtgggacgaccgcggcaaggcttcggcatggagccgtccggccttctggcgtacggggctgttcgacgtcggggagtggcaggcacgctggatcgagccggccgtgagcgacgacctcgctgcgatgttccgccgcacgttccgtgtgacgaaacccgtggccgaggcgaccgtctatgtgaccgcccacggcatttacgaggcgagcgtcaacgggcaccgtgtgagcgacgaccttctgacaccgggctggacggcttacaagaagcggctgcaatatcaggcttacgacatcacgccgctggtggtcaggggcgacaatgccatcggcgttaccgtggccaaggggtggtggttgtcgaaactgccgtggagccgcgagttcaactacggcgacaagtacggcctgctggcgcagatcgttctccgctacaaggacggtacgaaggaggtgatcgctaccgacgacacgtggcgcgcctcgacgggcgaagtgagctacggcaacctctacgacggcgagacgatcgacttgaaccggcgtcagaaggggtgggacaccccgtcgttcgacgatgcgtcgtgggcgtcggtgcaggtggccgacacctcgctcgacaacctgacggccagcgtcagcccggccgtgcgggtaattgaaaccttcaaacccgtcaagatcttcacgaccccgtcgggagcccgcgtgatcgacttcggccagaacatatcggggcgcgagcgcgtgcgtctgcgcggccagcgcggcgacacggtgcgcatctaccactccgagattcttgaaaaggacgaattcttcacccgcaacctgcgtaaggccaaagcgttgagtacctatatcctttcgggggagggcgaggagtggctcgcgccccggttcgccttctacggcttccgctacatcaaggtggagggaatcgacggcgagctgaaccccgaggatttcgtcgccgaggcgatcagctcggcgacgcccgagaacggtacgttcgtttcgtccgactcgctcatcaaccggttgcagtcgaatatcaagtgggggatgctcgacaacttcgtcgatattccgaccgactgcccgcagcgcgacgagcgtctgggctggacgggcgacgcgcaggtcttcttccgcacggcgacgttcaaccgcgacgtgcagaccttcttcaacaagtggatggccgacgtggccgccgagcagtatgccgacggcgcggtcaacggcgtctaccccgtgacgcaccgcagccgtatttcggccggttggggcgacgtggccacgatcattccgtggcagcactacatggcctacggcgacctgcggatgctcgaacgccagtaccccagcatgaagaaatgggtggactacatcacctcgcagaccgagaacgacttgtggagcaaggggaacagctacggcgactgggtatttttcagttatgccgatgacaaggacggccggtcggcggtgacgatccgacccttcatccagcagtgcttctacgcccattcgctcgatctggtggtgcgcacggcacgcctgctgggccgaacggaggatgcggcgaaatacgaagcgctgcacaagcgtgcggtcgatgccttccgcaacgaatacgtgacgcccaacggaatgctcgtgtcggatacgcagacggcctacacgctggcgctgatgttcgacctgctgcccgaggcgcagcgcgccggtgcggccaaacgtctggtcgataacgtgaatcgttacgggcatatcactaccggcttcctcggtacgccctatatctgcgaagtgttgacccgcttcggttacgaggacgtcgcctacgagctgctgctcaacaagaagatcccttcgtggctctatcccatttcgatgggtgcgaccaccatctgggagcgttggaacagtatgcttcccaatggtatggtcaactcgaacagcatggtgtcgttcaaccactatgcctacggtgcgatcggcgactggctctatcgttgggccgccggtttgcaggaggctgctccgggcttccgtgaaatccggatcaaaccctacctgaacgatcacttcacttcgatgaaggccgagcagcggacgccctacggcctggcgtcgagcggttggacgaaggagggcgacgcgctgacgctgacggtcgagattccggccaacaccactgccgaggtctatgtcccgtcggctgctgccgacaaggtgaccgagtcgggccgcgcactcgacggccgcagcgatctgaaagttgcgggctgggacgacggctatacgctcgggcgcctcggttcgggccgttacgagttccggtcgacgctgaaataa

SEQ ID NO: 1195 - DNA, 2553 bp, Alistipes obesi
atgtcagcaaaaaccaccccgaaagggctcaaagaggtaacctataacgatgccgtggcacgatcgaaggagtacttcggcggcgacgaactggcggcgacggtatgggtttcgaaatacgccctcaaagattcgttcggccatatttacgaaagctcgcccgaagatatgcaccaccgtatcgccgccgagatcgaacgcatcgagaagaactatcccaaccctctgtcgcgcgacgagatcttcgcgctgctcgaccacttccgctacgtcatcccgcagggcggcccgatgaccggtatcggcaacaatctgcaaatcgcttcgctgtcgaactgcttcgtcatcggccacaagaagcccgccgactcctacggcggcatcatccgcatggacgaggagcaggtgcagatcatgaaacggcgcggcggcgtgggacacgatctctcgcacctgcgccccacgggcagtcccgtgctcaactcggcgctcacgtcgacgggtatcgtccccttcatggagcgttactccaactcgacgcgcgaggtggcgcaggacggccgccgcggtgcgctgatgctgaccatctcgatcaagcaccccgacgccgagcgcttcatcgacgccaaggtggacacgtcgaaggtgacgggcgccaacgtctcggtcaagatcgacgacgagttcatgcgcgcggccatcgccggcaaaccctaccaccagcagttccccatcgacgccgagaaaccgatgtacgagcaggatatagacgcccgagcgctgtggaagaagatcatccacaacgcatggaagtcagccgagccgggcgtgctgttctgggatacgatcctgcgcgaaagcgtccccgactgctatgccgacgaagggttcaacaccgtctcgaccaatccgtgcggcgaaattccgctctgcccctacgactcgtgccgtctgctggcgctgaatctttacagctacgtcgacaaacccttcaccgcggaggcgtcgttcgatttcgcaaaattccgcgaccacgtgggcaaggccatgcgcatgatggacgacatcatcgacctggaactggaaaaggtcgagcagatcatcgccaagatcgacgccgatcccgaagaggccgatatccgctacgtggagagcaacctctggaaaaaagtgcgcgaaatggcgctcaaaggccgccgcaccggcctgggcatcaccgccgaaggcgacatgatcgccgcgctggggatgcgctacggttcggacgaagcggtcgcattcgccgtcgaggtgcacaaaaccctggccctggctgcctacggcgcatcggtcgagatggccgaagaacgcggggccttcccgctctacgacgccgcgcgcgagctcgacaacccgatgatcgcccgcatccgcgaggccgatccggcgctctacgagcggatggtcaagtcgggacgccgcaacatcgccatgctgacgatcgcccccacgggtaccacgtcgctcatgagccagacgacgtcgggcatcgaaccggtcttccgtcccgtctacaaacgccgccgcaagatcaacccgtcggatcacaacgtcaaggtcgccttcgtggacgacacgggcgagcggttcgaagagttctacgtcttccaccacaacttcgtggaatgggcgcgcgtgaacgggcacgatacctcgacgctcgccacgatctccgacgccgaactggagaaactcgtcgccgcgtcgccctaccacaaggcgacggccaacgacatcgactgggtggccaaggtcaagatgcagggcgcaatccagaagtgggtcgaccactcgatctcggtgacggtcaaccttcccaacgaggtgagcgaggagttggtggccgacgtctaccgcacggcctgggaatgcggctgcaagggcgtcacggtctaccgcgacggctgccgcgaaggcgtgctgctggacaagaaacagaagaagaaagggggcgacaaaggcgctgccgacggatcgctcaaacgcccgaagtcgctgcctgcggacatcgtgcggttcaagaacggacaggaggagtggatcgccttcgtgggcctgatggacggccgcccctacgaaatcttcaccggtaaactcgaagaggacgccctctacatcccgcgcaagatcaccaaaggcaacatcatcaaggtgcgcgaggccgacggcaagaagcgctacgatttccaatacaccgaccgctacggctacacgaataccgtgggaggcatttcgcgtctgttcgacgaggagttctggaactacgccaagctcatctccggcgtgctgcggcacggcatgcccatcgacaacgtggtatcgctcatcgagtcgctgcatcttaacagcgagacgatcaacacgtggaagaacggcgtggagcgagcgctgaaacagtatatcgtcgacggcaccaaatccaaggagaagtgcccgagctgcggacaggagacgctcgtctaccagaacggctgtctcacgtgcgtctcgtgcggctattcgaagtgcggttga

SEQ ID NO: 1196 - DNA, 2790 bp, Alistipes obesi
atgaaaaaatggacaatccttctgcttgcgctgctctgctcgacggcgggcgcggccgcgcaggatttttcggtggtgaatccccgttgcgaataccgcgatgaaccgctgggtatcaatacgctgacgccccgtttctcgtggcagatcagcgcccgcgaccgcgggttcctgcaatcggcctacgaactgatcgtgggcgacgaccgtgcggccgtcgctgccggccgcggcaatctgtggcgggtaaaggccaagggcgcggagtcgctccacatcccttacgcgggcaaggcgctcgaatcgggcaaggagtattattggagcgtgcgcgtctggaacgctgcgggcgaagtctcgccctggatgccggtcaaccgcttctcgacggggctgatgtcgcccgacgcatggtcgggagcccgctggatcgccatggaggtgcagcccgacagcctgcgtctggtgccgggcgaggagtataacaaactcacgatcggcgaccgcatcacggcacccaaccgtctgccgcagttccgccgcgagatcgacgtccggaaacctgtgaaacgggccatggcctacgtctcgggtctggggcagttcgagttcttcatcaacggcgacaaggtaggcgacaacttcctcgatccggcgtggagcgactacgacaagatcgtctgctacgtccccttcgacgtgaccgaccgtttgcagcagggcgccaacgtgctgggcgtgatgctcggcaacggcatgtacaacgtgccgcgcgaacgctactacaaactgctgatgacctacggctacccgatgatgatctgcaaggtggacgtcgaatatgccgacggcacgcacgacgtgatcgtcagcgacggcagctggcgcacgacgaccagtccggtgacgtacagcagcatcttcggcggcgaggattacgacgcgacgctcgaacgcacgggctggatgaagcccgggtacgacgattcgtcgtggcaggaggtgctcttcacctcgcagcgcggcgagctgatcgccccgaaggcgctgccggtgaaggtcatggaggagttccccgtcttcaagatccgcaagaccaaatacggcaagtggctctacgacatggggcagaacttctcgggcgtggcgcgtctgacggtcaagggcaagcgcggacaggcggtgcggatgaacacctgcgaactgttcgatcccgccgtcgactcgatccagatccacggcggctaccgcggcgagacgcgctacacctatacgcttcgcggcgacgcggagcccgagagctgggcgccgcagttcacttaccacggcttccgctacgtgcttatcgacggcgccgtgccggcgggcgaacccaaccccgaggggctgcccgaaatcgtggacgtgcgcggtctgcatatccgcaattcgacgcccgaatcgggaacgttcgtctcgtcgaacgacctgctcaacaagacgcagcggctcatcggctggggtatcaagagcaacatggtgagctacttgaccgactgcccgcaccgcgagaagttgccgtggttggagcagctgcacctgatgttcggttcgctgcaatatacgttcgacatgttcagcctctacgagaagatgctcgacgacatggccatggcgcagctgcccaatggactggtgcccgacatcgcacccgaatacgcgctcttccgcgaggcgttccgcgactcgcccgagtggggcagcgccttcgtgctggtgccgctctacctctatgaatactacggcgacggtacgatgttgcgcaagcactacgaggcgatgggccgctacgtggactacctgacctcgaaggccgacgaccacatcctcaaacacggtctgggcgactggttcgacatcggtcccaagatgccgggccgcgcgcagctctcgtcgctcgcggcgacggccacgccgatctactacatggatgcgctggcgatggtcaagggcgccgagctgctcggcaagaagaaggatgcggagcgctggcagaagctcgccgatgcgatccgcacctcctacaacgagaaattcttccataaggaaggttgctattacgaccgcaacagccagactgccaactcgatcgcactctgcgcgggtctggtcgatccggagtaccgccagggcgtgctcgacaacgtggtgagggacatccgcagccgcaacaacggcctgacgggcggcgacgtgggttatacctatatcctgcgtgcgctcgaagcgggcggccggtcggacgtgatcttcgacatgaattcgcgttacgacgtctacggttacggctacatgctggcacagggcgctacggcgctgcccgaatcgtggcaggtggtgccgatcaagtcgcacaatcacttcatgctgggacatctcatgcagtggctctacacccatgtcggcggtatccgccgcgacacgggggcgctggcctacaaacggtcggtcatccgacccgaggcggtgggcgacctgacgatggcgcgcgtgagcttcgagtcgccctacgggcagatccgcagcgagtggtcgaagggcgccgacggaagcttcgagctgctggccgaagttcccgccaatacgacgtcgaccgtgtggctgcctacggccgaggatgccgccgtcttcgagagcaacctgcccgtggagaaggtcgccggaatcgagtacctcggctataaggagggctgcaaggtctacgcagtcggatcgggaacctatcggttcgacgtgcgtccgcagagataa

SEQ ID NO: 1197 - DNA, 2754 bp, Alistipes obesi
atggaatacaatttcaaggaactggaacccaaatggcagcagcgctggcgggagcgcggaacctaccacgtcgaagtcgaccccgcacgtccgaaatactacgttctcgacatgttcccctacccgtcgggcgccggcctgcacgtcgggcatccgctggggtacatcgcttcggacattttctcacgctacaagcgccagtgcggtttcaacgtgctgcatccgatgggctacgacgccttcggtctgccggccgaacaatacgccatccagacgggacagcatccggccgtcaccaccgaacacaacatcgcccgttaccgcgaacagctcgacaagatcggcttctcgttcgactgggaccgcgaagtgcgcacctgcgacccgggctactacaagtggacgcagtgggccttcctgaaaatgttcggcagctactattgccgcgacaggcagcaggcgcgcccgatcggggagctggaagaggcgttcgcccgcagcggcaccgaaggggtgaatgcggcctgcaccgccgaactgcatttcacggccgccgactgggcgggcatggacgagcaccggcgcgaacaggtgttgcagaactaccgcctggcctaccgcgccgacacgatggtcaactggtgcccgcagttgggtacggtgctggccaacgacgaggtgaaggacgggctgtcggtgcgcggcggctatcccgtcgtacagaaacgcatgaagcagtggctgctgcgcgtgacggcctatgcgcagcgaatgctcgacggattggaaacgctccaatggagcgaatcgctcaaagagatccagcgtaactggatcggccgctcggagggtgcacaggtcttcttcgacgtgcgcggtttcgaccgcaaactcgaaatcttcaccacgcgccccgacacgatcttcggcgtcaccttcatggtcatcgctcccgaacacgaatgggtcaacgagctcaccacgcccgaaaacaagacggctgtcgaggattacctcgaacagacccagaaacgctccgagcgcgagcgcatcgccgagacgcggcgcgtgagcggcgtcttcaccggttcgtatgccgtcaaccccttcacgggacgcgagataccgatctacatctcggactacgtgctggcgggatacggcaccggagcgatcatggccgtgccggcgcacgattcgcgcgactatgccttcgcccgtcatttcggactggaaatcacgcccgtcgtcgcaggcggcgacatcagcaaggagtcctacgacgccaaggagggcaaactcatcaactccggttttctggacggcatggaggtcagggaggcgatcggaaagatgttcgacgccatcgagcagcgcggactgggcaaacggctggtcaactaccggctgcgcgacgccatcttctcgcgccagcgttactggggcgaacccttcccaatctactatcgcgacgaaatcgcccgtccgctgccggaatcggcgctgccgctcgaactgccgcccgtcagcgacttcggccccaccgaagagggcgaaccgccgctggcccgcgcagcggggtggacgacggccgacggcgatccgctcgaactgtcgacgatgcccgggttcgcaggttcgtccgcctactacctgcgctacatggacccgcacaacgaccgcgcgctcgtcggccgcgaagcggacgaatactggcggtcggtcgacctctacgtgggcggcatcgaacatgcgacgggccacctgatgtattcgcgcttctggaacatgttcctctacgatctgggctgcgtgtgcgagcccgaacccttccggaagctggtcaaccagggcatgatccagggccgctcgaatttcgtctaccgcgtcgtcggtaccaacaagttcgtctcgttcggcctgaaagagtcctacgagacgcaggagatccacgtcgacgtgaacatcgtccgcaacgaccagctcgatctggacgccttccgcgcatggcggcccgagttcgccgacgccgagttcatcctcgaagacgggaaatacgtctgcggctgggcaatcgagaagatgtcgaaatcgatgttcaacgtcgtcaaccccgactatatcgtcgaccagtacggcgccgacacgttgcgcatgtacgagatgttcctcggcccgctcgaacagtcgaagccgtgggacacgaacggcatcgacggcgtgcacaagtttctgcgccgtttctggcggctcttccacgccggcgacgcactggccgtgacggacgaggcccccactccgaaggagttgaagacgctgcacaagaccataaagaaggtccgcgaggacatcgagaacttctcgttcaacacgtcggtggcagccttcatgatctgcctcaacgaactgggcgaatgccgcaagcgcgcgattctcgaaccgctcgtcgccctgctcgcacccttcgcgccgcatatcgccgaagagctctgggaacggctgggacataccgcgtcggtctgcgacgccccctatcccgtctgcgacgaaagctatctggtcgagcagtcgttcgaatatccggtcatgatcaacggcaagctgcggttcaagcaggagtacgccctgacggcgtcgccggatgagatcacggccgacatcgtagcacggcccgccgcacagaaatggctcgacggcaaggcgccgaaaaaagtgatcgtcgtcaaaggcaagatcatcaatatcgtcctctga

SEQ ID NO: 1198 - DNA, 2316 bp, Alistipes obesi
atgtataaacgatttacgatgcaggaaaatttagttatcgtcgagtcgccggccaaggccaagacgatcgagaagttcttgggtaaggatttcatggtcaagtcgagcttcggccatattcgcgacctctcgaaaaaggatctgggaatcaatctcgccgacgggttcgcgccggtctacgagatcccgaaggataaacgcaaggtcgtggacgaactcacgcgcgccgcgaaggaccggaccgtgtggctcgcctccgatgaagaccgcgaaggagaggccatcgcatggcacctgaccgaagtgttgggtctcccggtcgaggggacgaagcggatcgtcttccacgaaattacgaagcgggccattttggaggctatcgagaacccgcggacggtcgacatgaatctggtcaacgcccagcaggcgcgccgcgtgctggatcgtctggtcggtttcgagctgtcgcccgtgctatggaagaaggtgcggccgtcgctgtcggcgggccgcgtgcagagcgttgccgtgcggctgctcgtcgagcgcgaacgcgagatcatcgccttccggtcgaccccctatttccgcgtcgtggcgcagttccatgccgccggggacaaggatcggacgctcttcaaggccgagctgccgacgcgcttcgaatcgcgcgaggaggccgaggcgttcctccgcagctgcgtcggcgcgaccttcacggtggccaaggtcgaggagaagcccgtgcagcgctatcccgcgccgcccttcacgacctccacgttgcagcaggaggcggggcgcaagctggggatgtcggtttcgcagaccatgtccgtcgcgcagcacctctacgagcagggtctcatcacctacatgcgtaccgactcggtgaacctctcgacgctggcgctggcgcagtgcaaggagcagatcacgaatctctacggcgagaagtattcgtcgtaccataactacaagaccaagaccaagggggctcaggaggcgcacgaggcgatccgcccgtcgtatatcgagcggcaggcgatcgagggtacgccggccgaaaagcggctctacgacctgatctggaagcgcacggtcgcttcgcagatggtttcggccgagctggaccgcacgacgatcacgatcgcgatcgacggccgccgcgaacagttcgtcgccacgggcgaagtggtgcgtttcgacggtttcctgcggctctattcggagtcgaccgacgaggagccggccgaggacagcgaagggctgctgcccaaactctcggcgggcgacgaggtgctctatcataccattacggccacgcagcgtttcacgatgccgccggcgcgctacaacgaggcgtcgctggtcaagcggctcgaagagctgggcatcggccgcccttcgacctatgcgccgaccatcacgacgatcatcaaccgcggttatgtggtcaagcagagcaaggaggggcagaagcgcacctacgaacaactgacgctcgcgggcggcagcgtgtcggccaagacgctcagcgagagcttcggcaaggagaagaaccggctgcaacccaccgatatcggtatgctggtgaacgactacctcgaacagcagttcgcaccgatcatcgactataatttcacggccaacgtcgagaaggagttcgaccgcgtggccgagggcgacatcacgtgggacaagatgatcgccgctttctacgggccgttccaccgcatggtcgatacggcgatcgagacgcagtccgacaaacacgggcaggcgcgcgtgctgggtgccgatcccaagacgggacgcacggtcaaggcccgcatcggccgctacgggccgatggtcgagatcgagggcgaaggcgaggagaaaccccgtttcgcctcgcttaaaaaagggcagctcatcgagtcgatcacgctcgacgaggcgctggcgctcttcgccctgccccgcacgctgggcgaatgggagggcgagccgatggtcgtcgggctggggcgcttcggcgcttacgtgcgctggggcaagtcgaccttcgcctcgctggccaagggcgacgatccctacacgctgacgctcgaacgcggcgtggaacttatcaaggagcatcaggcgcagcggacggcggccaacacgccgattcggagcttcgccgaagatcccgacatgctggtcaagaacggccgctacggtgcctacatcgcctacaaggggaagaactaccgcatcccgaaggggacgaagcccgaagaactgacgctcgacgagtgcctgaaaatcgtcgccgcgtcgaagaaatga

SEQ ID NO: 1199 - DNA, 2307 bp, Alistipes obesi
atgaaaaaacatatcatcggagcacttgtcgtgctcctgttgcctgcggtgtgcctcgccgcaggagaagccgtcgtgaaaaccggaaaacaaagcgatgcgaatattacggggcatgtcgtcgatgcgaagagcggcgagcaccttgcctatgcgactgtcgccgtgaagggcacgaccatcgggtgtgcgaccgacgccaccggacactatttcctgaaaaacctgcctttgggacgttttacgctcgtcgcgtcgtcggtgggctaccggtcggccgaaacgacggtggagatcgtcgccgacaggactgccgaggtgaatttttccctgaacgaggaggcgctcgcagtggaggaggtcgtcgtttcggccagccgtacggagaccaaccggaagttctcgcccacgatcgtctccgtcgcctcgacgaaactgttcgaatcgaccgcgtcgagcaacctggctgaaacgatgaattttcagtcgggattgcgcgtggagaacaactgcggcaactgcggtactacgcagttgcgtatcaacggattggaggggcaatattcgcaggtgctgctcgatagccggccgattttcagttcgctggcttcggtgtacgggctggaacagctgcccgtggccatgatcgaacgggtcgaggtgatccgcggcggcgggtcggctctgttcggcgccaacgccatcggcggcgtggtcaacatcatcaccaaggagccgctctacaactcggtgacgctggccaatacgaccaatatttcggagggcggtacggccgatttcaatacgtcgctcaacggctcgttcgtctccgacgattacaagacgggcgtctatctcttcgggatgatccgcgaccgcgactcctacgaccgtaacggcgacggcttttcggacattccggaactcaattccgagacggtcggatttcgtgcctactacaagacttcgccttatacgcggctgacagccgagtatcaccatatacatgagttccgccgcggcggcaatgccttcgatctgccgccccacatggccgatatcgccgaacagctgaaccacaagatcgacggcggcggtttgaagttcgactggttcagcccggacggccgccaccggctgggagtctatgcctcggcgcagcgcatcggccgcgacagttatttcggtacggaccgcaatcccgatgcctacggtgcgaccggcgacgagacgttcgtcgccggcacgcagtacacctattcgttcgagcggttgctcttccttccttcggagttgaccgccggcgtggagtacaactacaacgcgctcgacgacaggtatctcggattcggccgcgatttccggcagacgacccgcagcacggggtttttcttccagaacgagtggcgcagcgagcggctcaactttctcgtcggcggtcgtgtggacaagcacaacatgatgaagaacgccgttttttcgccgcgcgtcaacgtgcgttacagtccgacgccggcggtgggcctgcgggccagttatgccagcggttgccgtgcgccgcaggcctataacgaggatctgcatatcgacgcgctggacaacaaggtggccgtcatccgcctcgacccgaacctgaggcccgaatattcgcacagcctcagcgcatcggtcgacctctaccgcaatttcggacgggtgcagggaaatctgctcgtcgaggggttctatacgttgctcgacgacctctttacgctcgaaaaggtcggcgaggacgaacagggcaacgtcatcaaggagcgccgcaatgcggcgggcgccaccgtcgccggcatcggcgtggaggccaaggccggtattccgggacgtttcgagttccagctcggctataccttccagcgcagtcgctacgacgaacccgaacggtggtcggacgaggtcgcgcctcagcggcggatgttccgttcgcccgaccattacggctacctgacggccgtctgcaccctgacccgcggtttcacggcgtcgctcttcggcaactataccggacggatgctcgtacagcacaacgcgggattcattgcaaaggataccgaacggctgacgcccgatttctgggacatgggtgcgcgcctgtcgtataccctgtcgcttaccaggcagttgagactcgaactgaatgcgggggtgaagaaccttttcgacagtttccagcacgatctcgatttcggtcagaggaaggacgcggcctacatttacggtccggccgcgccgcgcacctatttcatcggtgcgaaattcgcgttatga

SEQ ID NO: 1200 - DNA, 3663 bp, Alistipes obesi
atgacacaagaaaagatcaaaaagcccgactacatggcaggaatccgccacacgacggtcggcagcgacagacacgacgttcgcagagagaacttccgaaacaagaccgtccggacagcaaaacgccggagcggtcttatcggaaggctgttcgcctgttctgcgacgctggcgctggcattcggcgcctgcacggacgacgcccccgtcgaacaaccgaaaagcggaggcgttgacctgacctgcatcgtcgaatccgacctgacggcggctctcggatcgtcgacggacgacagacacccgtgggaaagcggcgacaggatcggggtctacgccgtatcgtcggcaccgacgctcaatgccgaagcctccgtcacaacgaacgatggcacaagctcgatcgcattccacgtcaaccgcgccgaaaccggcgacaagctccatgcctattttccctacacgaaagacaattcgtccaacgatgcgaaaaacgtggcgctgtcgatcgctgccgtacagtcgcagtccgaagccggcgcattcgacatcgcgaacctgccaatggtctcctatccgcaaagactcgacgccgagtccctctctgagatacccgccctgcaaatgcacgtgctgggaggaattctgcgcgcaaaggtcttcgcagacggacagtacggagacgagaaggtgcaatcgatcgctttcgccgacgagaatacgccgatggccggtgcatttaaactggatctgaccgggctgagtgacgaggcgtcgctgatcgtgacaggactcgcctcccgcacggcaaaaacccagctctccattccttacgccgtcccgtcgtcgcaggagagcgccaaagacatttacatgatactcgctccgggcacctacgacgggaccctctccgtaaccaccgaaaaagccgtgtacacgcagccgttccaatgcgaaatgaaacgtaacgcctgctacgatgcgagcataaacctttcgaccgcagccagagaatccatcgacggctggaacggcgaaggaaccgccgaagccccctatcaggtggcgacggcagaagacctgcaacgactgatcgctctttgcaacagcgacggcggcgaatacgccgaattcgccgacaaacattacctccaaatcgccgacatcgacatggctcagatcgcgatccaaccgatcggactcagcgaacaatcgccgttccggggcgtttacgacggcggaggccacacgatcggcaatttcacgctgacaaactgcgaatccggcgcctgcggtctgttcggttatctggacggagcgaccgtgaaggacatccatctcgaagagtgcgaatactcggcttccggactccatgcaggcggtgtggccggcgtggcgaaacaaagcgtgatccgcggctgcacgtttgaaggatcgctcgtcggaacggccgaaacggagttcgacggatatgccgtcagcgacgtcggcggtatcatcggctacgcgctcgactccgagatcgcaggctgcacgttgaaaggctctattcgcgcgctggcacagatcggcggcatggccggctacacgagcgggacgaagatatcggactgcacggtcgacgccgcggccacgatcgatgccgaaactcacttcctcggcggcatcgtaggccgcgcccgtcacaattcgacgatagagaactgtacggtgggcggcaaagcatcggcctacaacggcaattatgtcggcggaatagcgggacatctcacttcgggcaagatctccggctgcacgatcgccgcatcggcctcgctctcgtcgaagggcgatcacacgggcggcatcgtcggggcgctgcaagccaacgaggaaaacgccgacgacggaagcaatatgacggccgtcgtcgaagattgcgaaaccgacatcatggtattcggagccgataatgtcggcggcatcgtcggctatcagggaaccgccacagcggagcacacatcgatcgtgcggaactgcacgtcgcgggaatccatcacgggatacggctacaatacaggcggtatatccggttcgatcacctcctacggcgacagtttcatcgaaaactgccaggcctacggcgacgtcagctcctcattgcatcaggtgggcggtatcgtgggctacatcgtatcgaaaggcgaaaccgccgtcgacggctgcatcgcctacggcaactgccgcggacagcatagcgtgggcggtatttgcggatacgccaaatgcaacgacgcggcctgcatcgtcgacatcgtcaacagcatctacgccggccgcgaggtcgaggcgacgggcaacaacggttccaacggctatacgctcgcaaccggtctggtcggctggctgcaagtcggaacgggcaaagcccacatcgtcaactgcgcatcgcgcgtccaaaccgtcaagaccgtaggcaaggcaggcggttatccctcggccaacaacacgctgtcgggtatcctcggtttccagaacggctcgccgacagccgccgaactctacggactctactcgaccatcggccacgacggcttcctgaccgacggcgaaccctcgacctccatctactgcggcggcatctacgccaaaatccacagcggcagctatacgatcacctcactcaaacattgttatttcgatccgagcacgcaggccggtccgggaatttcgaatctcactaaggcggacgcagcgaccgtcaaggcctacggagagatgtcgacgctgctggccgacctcaatgccgctgtcgccgcttacgagggcacttgcggccgcacactgaaaaactggacgctcgacgccgacggataccccgtcatcgaaggcatgaccaccctgctgcccgtgagcaagaccaagcgcatcagcgttatcggcgactcgatttcgaccttccgaggtttcgtaccgtcgggttattcatgccactatccgacctcggaccacgatctgacctccgtgtcgcaaacctactggtaccggctggcccacgacctgatgtccgacgcccgcatcgagcgcaacatctccttctccggtacggccgtcgcccgcacgaccgatccggcctacgcttcccaggcatggtacggcaacgacttctgcgcccgcttcatcgcacagggcggcgtggggcagcccgatatcgtgctcatccacggcggcacgaacgactacgcgcacaacgtcgacccgctcgctccgggcattccgatccaaagcgccgaggcaccgtcggaggcagcgctggccgaattgttcgccgcagccgacgcggccgcgacgcgcgccgagatcgaagcgctcgacgacacgaccttctgcacggcctacatcaaactgcttcgcttgctgaaagagcgttatcccgacgtcaagatcgtctgcatcatcggcgactacctctcgacgggcatcgaacgctcgacgctcgccatcgcccgccactacggcgcccgctgcgtcgacctctacgccgtgaacggcttcaacgaccagacctacatgcccaagcacgactacaatcccgccacgggcaaggggtgtcacccgagctccgaggcgatgaagttcatcgccgacaagatctacgccgagctgggcagctggctcgaggagtga

SEQ ID NO: 1201 - DNA, 2586 bp, unclassified Prevotella
atgaaacacctatttcgaaaaacaaataatacagccagtcaggaaataccacttcttgtgcgcaagtttgttacaggcgtcgctacattaatcaggaaaggccgaatgccgtacacgccggtcctgctactatgctatgcctttgcaatgtttttcacgtcatgctccgttacgaaaaacctgcccgaaggcgagcaactgtacacaggtattaaatcaatcgaattcggcgaaaagaaaaaaagcaataacgattctaccggagtaataaaggccattgcagaaacggcagagaccatcgacaaactattcacctcatccggcaacagttccgctccggccgataccgtcgtcaccgacacattgtccgaagccaagaaaaaagaattgcgcgaagccgagaaagcacgcaaggaagccgacaaaaaatcactcgaaaccgttaaggaagaaataaacggcgttcttgcctatgccccaaacaatgcactgttcgggagctcgtcgcttcgccagccgctggctttcggcttatggttttacaacggctttgtcaacagcaaaagcgcaatcgggaaatggattttcaagaactttgcaaagcaacctgtgcttatcagcactgtaaaccccgagctgcgcaccatggtcgctaccaacgtgctgcacaactacggctacttccgcggaagcgcagactacgagcttcttccgagcgaagacaacaaaaaatcaaaaataagatacttcatcaacccgcgcgagccctaccgcctcgactccatagcgtacctaaacttccctccaacggccgacagccttatacgcaagacctggagccagcgaacgataaagaaaggcgacattttcaatctctcgaaaatcggcgaagaacagacacgcctgaaagacctgttccgcaacaacggctactacttttacagcaacgagtacaccactttccgagccgacacgttcgtgcggcccggatatgtgcagctgcagattttgccaataaacaatattcccgacaagataaagcgcaagtggtattacgggaagaaacgtatttacataaacacaatccccggcagtaatatcgggaaaagtttctctttcggcgaatacgagttccattacaccggcaagaagatacccctgcgcccgtcggtatggcggcacaacatattctcgaggcgcggccgcgcatactcttaccgcgaagagcagttcacactcgagaaactcagcagcatggggctgttcagccagctgaacatgtcatacgttccgcgcgacaccacaggaaccgacacacttgacgtcattatttacgcaaagatggacaaaccttacgaaagcgagttcacaatggacataaactccaagagcaacgaccagataggtcccggagccgcattcaaggttaccaagaaaaacgccttccgtgccggcgagagcatgagtttccgcatatacggctcatacgaatggcaaatggccaagtcgggccagaaaaggaacgacctgttgaactcctacgagctcggcagctcgttcgatctcaagttcccgcgcatattcttcccctggcttgcaaacaagcagttcttttacccgtcgtcaaccaccttctcgctaagtgccgactggatgaaacgctccgattatttcaacatggtgaaattcgggctttcgatggcctatgaatggaaacgcacccgccatgccacacacgagttcaccgttttctcgctcgacttcgaccgcacgctcaacaaatcggccaagttcgactctatcatgaacgccaacccggcactctatgtcagtatgcgcgaccagttcattccctggataggctacacgttcacctacagttccaccagccgcgaagaaaatcccatttggatacaggccacgttcaaggaggcaggcaacctgctttcgggcgtgtacgccgcagcaggcagaaggttcaacgagcctaacaaaacgctgttcgacaacccgttcacccagttcatcaaagccactgccgaggtgcacaagacgttcagcctcggctcgtcgctcaagctggccactcgcctgttcggcggcattatctacacatacggcaacagcaccgtagccccctacagcgaacagttcaacattggcggcgcaaacagtgtgcgcgcgttcaccgtaagaagcatcggcccgggacgtttcaaatccgaccagacgaaatattcatatatggaccagaccggcgacgtaaaactggccgccaacgccgaattgcgtttcccgctgtttggctcgctctacggcgccacgttcctcgacgccggaaacgtatggctgctgcgcaaggacgagtcacgccccggcggacaaatcaacgccaaggacttcctgaactccatagccttgggaacgggccttggccttcgctacgacatggaattcctcgtgcttcgcctcgacctcggtattgcgctgcacaacccctacgacacgggaaagagcggatactacaacatacgcaaattcaccgacggcctggctctacacttcgccataggatacccattctaa

SEQ ID NO: 1202 - DNA, 2274 bp, unclassified Prevotella
atgaacaagatacttgtaaaagaacgattttcagaaaaagtatataaactggttgtagaagctcctcttatagcacgtgcacgcaaagcaggaaactttgtaataatacgtaccgaccaggaaggagagcgaatacctcttactattgcaacggcagacaaggaaaagggaaccataaccctcgtagtgcaagccgtagggtactcaaccataaagctctgcaatatgaatgtaggcgattcgcttgccgacattgtgggaccgttaggaaagcctacagacattcagaacttcggtacagttgtgtgtgccggcggcggagtgggcgtagcaccgatgctgccaattgtcgaggcacttaaaaaggccggcaataaggttatttcagtcctggccggaagaacaaaggaacttataatccttgaagaacaaatacgcgaacattccgacgaggtaataataatgaccgacgacggctcatacggaaacaaaggccttgttacagaaggaatagaaagcgtaataaaaagagaaaaggtagacaagtgctttgccattggccctgccattatgatgaaattcgtatgccttcttacaaagaaatacggaatacccacagacgtgtcgctcaatactattatggttgacggtacaggaatgtgcggcgcatgccgaataactgtaggaggcaagacaaagttcgtttgcattgacggacctgagttcgacgggcacgaagtagacttcgatgagatgttgcaacgaatgggagcatatcgcgaagcagaacaggaagaaataaaactccttggggaagaggaagccgaaggacgcgatgccgaatggcgcgtgaatttgcgcaagtctgtcaaaccgaaggaacgaatgcaaatagaaagggtagaaatgccggagctaccgccttcatacagggcgcatagcctgtatgaggaagtaaaccgcggactgtcgaaagagcaggccatgaccgaagcaagccgttgtttggattgcgccaatccgggttgcataaaaggctgcccggtaagtatcgacataccgggatttataaaaaacatagaacgtggcgacattttgaaagcagcgcgcattctcaaagagacaagtgcactgcctgctgtatgcggccgcgtatgtcctcaggaaaagcaatgcgaagcacagtgtatacatttgaaaaccggcggtaaagcagtcgcgataggataccttgagcgcttcgcagccgattttgaacgcgaaagcgggcacgcggcattacctgtatgccagccaagtaatggaataaaggttgcagttataggttccggaccagcgtcgctctcatttgctggcgatatggcaaaactcggctataaggtaaccgtgttcgaggctttgcacgaaattggaggcgtattgaaatatggtattcctgaattccgattgccgaacaaaatagtagatgcagaacttgacaacctaagaaaactcggagtagagttcataaaagactgcattgtagggaagacaataaagatagaagaactcgaggaacaaggttacaaggctttctttgtaggaagtggagccggcctgccgaggttcatggggatacccggagagaatcatataaacatcctttcttccaatgaatatttgacacgtgtaaatcttatgggcgcgtcgaacaaagaaaatgctacacctatagtatatggcaaacacgtagccgtaatagggggaggaaataccgcaatggactccgtaagaacggccctgcggctgggagcagaaagtgcaaccataatataccggcgttctgaagaggaaatgcccgcgcgtattgaagaagtaaagcatgccaaagaagaaggcgtgaagtttcttactctccacaatcctatagaatatctggctgacgagaaaggaaaggtatgtaaggtaaggctgcagaaaatggaacttggcgaaccggacgcttccggccgtagaagccctgtgcctatagaaggtgccatcgatacgcttgatgtggacctcgttatagtaagtatcggagttatgcccaacccaataatacctacatcggtaaaaggattggaaataagcaagaagggtacaattgtcgtggacgaaaaaatgtgctcttccaaacgaaatctttacgccggcggcgatatagtacgcggcggagcaaccgtgatattagcaatgggtgacgggcgaaaagcagcaaaaatggctgacgaagcattgagaaacgcaaagtaa

SEQ ID NO: 1203 - DNA, 1989 bp, unclassified Prevotella
atgtcgaattatagcaaagacgaactcttgaaaaagagtgaagccgaagtgcaagccatagctgagcaattcgggataaatcccaagaattcaacatctgtagaagatttagtataccagatacttgatgaacaggccgtacaaagttcaataaagaaaccggctacaaaacggcgtgcccgtattgtgaagaaagaggctgaccgtgtgtattctgcttcaaaagaccacggagagaatgtggaaaagaagaatatggagcaaggattgcagccttccacagctgtttctgcaaaagaatcaagtgcggaatcctctttagcagaagattcaggtactttacaggaacagaatgaggagtcacttcctaaacgtaagcgcggtcgtccccgtaaaacacaagacaagcaggaagaaaacgatttgaagtcaggtgaagaaacacagagtgccgaaggtccgtcgctgtttgacgaaagtgaagaagagaacaaagcacaaaaggaacctgaagtaagcaagcctgtttctatttcagatttggtcactgattacgaaacgatacgcaatatcctgcctcggaacgaagactcctcattgaatttctccgacaataattcggaagaaagtgttgaaagcaaggacatacagacagtttcccaagatttggatttcatacccgtaacagacattccggtgattgaggattatggaatgtctgtagtagacggacttcacgatacaacatctgttgccgacaataattatcctttatcagacgaaaaattcgtacaaggagaaattgcggccggcaggatggggacagtgcattccgaccagcaggcttctctgcctaaggtgaactacagtttcgatgatatacttagcgggagcggctctttggaaataatgcccgaaggtttcggctttttacgttcgtctgattataattacctgtcgtcgcccgatgatatttacgtttccggacagcagattaaggcatacggattgaagaccggcgatgtcgttgacggcagtgtaaggattccacgtgaaggcgagaaatatttcgcgttgattaacgtgaataagataaacgggctttcgccgtccgaggttcgcgaccgtgtaccgtttgaacatcttactcctttattccctgacgagaaatttaatctctgccatggccgcaacgataacatttctaccagaatagtcgatttgttcacacctataggcaaggggcagcgagctttgattgtggcacagcccaaaacaggtaagaccatcctgctgaaagatatagccaatgcaatagcaaagaaccatcccgagacgtatttaatgatgcttcttatagacgaaaggccggaggaagtaaccgatatggcacgtacagtgaatgccgaagtaatagcttctacattcgacgaaccggctacacgtcacgtcaagatagcaggccttgttatcgaaaaagccaaacgaatggtggaatgcgggcacgatgtggtaatattcctcgattccataactcgtctggcgcgtgcgtacaacaccgtgtcgccggcaagcggaaaggtgctcaccggcggtgttgatgctaatgcccttcaaaagccaaaacgtttctttggcgcagcgcgtaatatcgaaggtggaggttcgctcaccattatcgccactgcgttaattgatacgggcagtaaaatggacgaggttatattcgaagaattcaaaggtacaggcaatatggagttgcagctcgaccgttcgctcagcaacaaacgtattttcccggcagttaacattatttcgtcgagtacacgtcgcgacgatttgcttcacgaccgtcagacgctcgaccgtatgtggattctccgcaagtatattgccgacatgaatcctgttgaggcaatgacgttcgtgaaagacaggctcgagaacacggcaagcaacgaagaattccttatgtcgatgaactcataa

SEQ ID NO: 1204 - DNA, 1086 bp, unclassified Prevotella
atgacagaagaaccaataccaattctcagtggcttaaaacctgaaaatttccgtaaaacaataaacggcaaagaaacgtatctgtttacacttcggaacaatgccgacaacgaaatctctatcacaaattacggaggtgctatcgtatcaattatggttccggacaagaatggtaataaagcaaatatcattcaaggtcatgacaacatagatgacgttattaatagccccgaaccgtttttaagcacattaatcggacgttatggaaaccgaatagccaaaggaaagtttattcttaacgacaaagaatattatttggcagtaaacaacggaccaaaccaccttcacggcgggcctactggatttcacgctcgcgtttgggacgcagaacaaataaatccacaaaccttggtgctgagatatgtatcagcttattatgaagaaggcttcccaggagagctttcaatgaatgtcagattcacatttacagattccaacgaacttattatagactatcgtggcaagtgcaataagaaaacgatagtaaacatgacgcaccacggatttttctcattggccggaatcgccaaccctactccaactgtcgaagatgtgatttgcacaataaatgctgattactatttacccatagatgagacgtctattcctacgggcgagataagaaaagtggaaggcacgccttttgatttcagagaacctcatgccgtaggtttatacatagactcggataacgagcaaataaagaatggcgcaggttacgaccattgctttgtattaaacaagcatgaaccgggcgaattgactttcgctgctaaaatcgtagaacccgtttcgggacgctctatggaagtttatacaacagaaccaggaatacagttctactctgataattgggctgacggctacaaaggacaaaacggagcgacgttcccgcgtcgtagtgcattgtgctttgaagcacagcatttccccgatagccccaatcacccctacttcccttctgttcttctaaaaccaggagaattgtattcacaaaaaaccatatataaatttggtgtggagtaa

SEQ ID NO: 1205 - DNA, 1362 bp, unclassified Prevotella
tttttaaggatatttttaacccgggatataaaatatcttattttaatggttttgttgttcatttacactaactttgcattgaaaacggaaggagacgctatgaaaaactttgtattggtatttgcggtaatgttcttgaatgtgactacggccttagggcagaaggaatacaggcagattcgcgcctctcttaaagcaaataacggggacgcggctttagctgatgtgcagaaatacgagaagacggaagaattcaaggaggatcccgagctgtatcattacggctttgaggcgtatgtaaaaaagaacaacacacttaacgagcaagcataccttaagcagttaaaggatacagcaggcttattcaacagtgtgtatggaattttcgagtatgccatacgttgtgatagtttcgacagcaagcctaatgacaagggaaaggtgaaaatacgataccgcaaagaccacgagtcgatgttgcgccgcttgtatccgaacctcaataacggcgggcttttctttgtatccaaaagtcagtttcccgacgcctacaagtttctttctatgtatatcaatgtcccgcagcaaccggttttcaataagaaactttctgacaaggacagtttgaatattatacgtgcggcttattgggctacggtatgcgcgtatcagatgaaagattccgcgaagttcttcacctattacccgttggccgtgaaagattccacatatcgcgctaaggaaatggaactcgctgccgaaatgtacgcgttggcaggcgacgtggagtcaagggtcaaatgcctccacaaaggagtgaaagagttccctacgaactattacttctttgcaaatcttttggattactataacgaacaaggccagtacgacaaagcgttggcactttccgattccatgctttccgacgacccgcgttctgtaatatcgttatacggcaaaagtctcgtgtttttaaagatgaagcgctatgacgattgcattacagtttcgaaaagccttttgcagaacgattccacttatacggacgtgtattacaatatcggcgcctcgtattatgccaaggctatagaatatgacaataaggtaacagcggatatgggcatgaccgaaatgcgtaatataaagcgtgaggtcgacaaactgtaccgcaccgcgctgccttatttggaacaatacagggcaatggccgcagataagatagaccggtggggcaggccgttgtaccgtatttatctttcgttaaatatgggcgacaagttcgacgagatagacaaactgcttttgcagaacgacgcgcagaaagcggccgaagcgcaaaaggcagaaggagaaaagaaataa

SEQ ID NO: 1206 - DNA, 861 bp, unclassified Prevotella
atgcacaaccttatagagttcataaaaaaacatttccactggctcgtctttcttatactcgaaagcgtcagcatggtaatgcttttccgcttcaacgactaccaggccagcgtgtggctcacatcggcaaacgaccttgccgcaagggtaaaccaaaagtattccgacataatggcatacatcaacctcggcgatgtcaacaaagacctcacaatgcgcaacgtcatgctgcaaaggcaggtaagcgaactgcgcgacgcgctggcatacatgggggcagactccgcaataatagacgaaaagcaaagaaacgcgctcgaaggatacgacattatacctgccacggtaacttccaacacaataaccaaagccaacaactacatagtaatcgacaagggagaggccgacggagtgcgctctgaaatgggcgtggtaggcggaggagggattgtcgggatagtatacctcaccgggaagcactacagcctggtcataccgatactcaacagcaaatcaagcataagttgccgcataagagggcacaactttttcggttacctcagctggaacggcggccacccattagtggcataccttaacgacgtgccccgctacgcacgcttcaaggtaggcgactatgtcgagacaagcggctattcatccgttttcccgcccggcctgttcgtagggaaaatcttgtcaatcgaagactcgcgcgacggcatgtcattcagcgtaaaagtaaaccttgccaccgaatttgccaaactgcgcgacgtatgcgtggtttcgaaccgcgacaaggcagaaatagacacactccgaatacatgccgccgaagcagaggagaacacaaactga

SEQ ID NO: 1207 - DNA, 408 bp, unclassified Prevotella
acggtgaatatgattctacagacgcacaaaatatatagacgtatggcaaagattcaaaacgaaacggcttacaaggcggcaatggaacggatagaagaacttatgccgctggtagatgaaaacactccccgtgacgacaagaacctggtggagttggacttgctgtcggcgcttgttgaagattacgaggaagagcattatccaataaagtccccttcgctcgtcgagacaataaggcttcgaatgtatgaaatggggctgaatcaggcaaaactgtcggagcttcttggagtaagcccttcgcgcgtgagcgattacctcaccggccgtagcgagcccacgctcaaagttgcgcgcgacatcagcaggaaacttaatatcgacgcaagcattgtactgggcgtgtag

SEQ ID NO: 1208 - DNA, 657 bp, unclassified Prevotella
atgcgcattcaacagaaaggatttttattcactgaaattatgattacatataaaaggattctcgacctttgcctgagccgtgaaagggaatacgacaaattcccttcgttcataaacctgctgttccgctgttttggcgcactgatgatgattccctacgggataacaaaaatcgaagactacgacaaatacgtaaacgactttttcggcgacccgataggactgggcaacgtcccgtccttgtggctcacgatgtttgcgcaattaatttgccctgtaacgctggccattggcttccaaaccagaatatcggccgcaatactggccttcaacatgctcgtagccacgaaataccactttttcgacccgttcgtaacaaaatcgctgcccatgctgttcctggccatgtatatagtgatacttatgtggggagcaggaaagtattcagtagaccacaagctgtactcgcataaatccggcagctgcctttcgggcagtgaaaagcgcggaataatatgcgttgccgccgcatacgcaattctgtgcgttgtgttttcaaacgtgttgagcggaatcatgtcggtcataatgtcgtccgtggcacttgggctgtttatattggcacacacttatataaacaggcaaacagccgactga

SEQ ID NO: 1209 - DNA, 819 bp, unclassified Prevotella
atgaataaaataatttattctttggcttgtcttgctattgctggctctgcagtatcgtgcagcggagttaaagaaacaacggtacttgtttcaaactctttgaatgcaccgcagattcaacctcttaaattgtcagtcgataaaggctatatcgttctgttcgacggaaagaaccttgacggttggcgcggttatggcaaagaccatttgcctaactgctggaatattgatgagggcgcattgcatttctcacgcagcaacggtaatgaaggaggagatattattttcgcccacaagtttaagaactttgagcttgaacttgaatggaaagtagcaaaaggagctaattctggtatcttctatcttggccaggaggtaacaaccactgaccagaacggtaacaagaatttagagcctttgttcatatccgctcctgaatatcaagtgctcgacaacgaaaatcaccctgacgcaaaattaggaagggacaacaatcgtaagtcggcatctctttatgatatgatacctgcaaagccgcagaatgctaatccttatggccagtggaacaaaactaaaattgttgtaagcaacggcacaattcagcattaccagaacgacgtaaaagttgtagaatataagatgtggacgccggagtggactcaattgttgcaagaaagcaagtttagcgaaaaggcatggccaagggcattcgaactgctgaacaactgtggtggcgataaccacgaaggatacataggccttcaagaccatggcgacgatgtatggtatcgtaatatcaaagtaaaagtattgaaataa

SEQ ID NO: 1210 - DNA, 777 bp, unclassified Prevotella
atgataataaaacagacgatgaaatttgtagcgataataccagccagatatgcttcgacccgtttcccggcaaagccgttggctttattaaaagggaaaccaatcatacaacatgtgtatgaaagagttagacaaactataccggatacttttgtggcggtcgacgacgaacgtattaagtcatgcgtcgaatcttttggagggaaagcgataatgacttctgtagagcacaagagcggtacagatagaataaatgaagcatataacaaaataggtttggattgcgacgtagtaataaacgttcaaggagacgagccttttattcgctgcgaacaactggaggctttgatgaagtgttttgatgacccaggtactgaaatagcaactcttgttaagccttatccgggaaacggagacttgtcaatgctaatcaatgcaaactctccgaaggttgtggtagataataacatgaatgctttatatttcagccgttccgttataccttttatccgtggagcagaacaaagcagctggcttgaaaagcatacttactacaagcatataggcatatatgcatataaggctaaagtgttgtctgaaataactaaactaccgcaaggaactttagagaaagccgagtctttggaacagttgcgttggcttgaaaacggatataaaatcaaagtaggcttaacagaccttgagacaatcggtatagatacaccagaggatttgaaaagagcggaagcctttttaaacgataaccaatatttataa

SEQ ID NO: 1211 - DNA, 732 bp, unclassified Prevotella
atgtacaaggaatcaaacgataagaaggcggcggcagtacagggcaatgacgcgagtacgaaacatgacgctgctttttcggacaacaccttttgggtatcgcgcaaaaaggcagccgagcgtatcattatgggcatagacccgggaacgaatatcttgggatacggggtgctcagcgtgaacggaaggcaggccaagatggttgccatgggtgttatcgacctgcggaaagtaaaagatgtgtatcttaagctcgggcgtatttacgagcgcataaattcgcttatcgcaagtttccttcccgatgagttgagtatcgaatctcctttctttggaaagaatgcgcaaagcatgctgaagctgggccgcgcccagggagtagctattgccgcggccatcaataaggatatacctatacatgagtatgctccgcttaaaataaagatggccataacgggaaacggacgggcctcgaagcaacaggtttcggcaatgttgcagcgttaccttaatataaaggaagaaattctgcttccttatttcgacgcaacagatgccttggctgccgcatattgtcattttcttgaaacttcctgtaaaatgtacagcacgtcggccgccgggaaaataaaggtgattgacgaagctgcgttgatgaagcattcaggcgatcggcacgtttcgaagaactggaaagattttgtagcaagtaatcccgagagggtaaggtag

SEQ ID NO: 1212 - DNA, 861 bp, unclassified Prevotella
atggaaaatttgctttatgattaccaccgggcacagtcgatggcggactcgaaagacagcgcagattataaattgcgcttatacactgatgccgtgttggccaaatatgatttgtcacacgatgatttcgacagcataatgaaatggtactcacggcatgccgacaaattgtataaagtttatgagaaggtaaaccagcgccttgacaatgaagcgcaagtgtatggagcttctccaaatttgcgggcttcagggaaatatacaaatgtagcaaccacgggcgataccgctaatatatggagaagcgctaccgaaggccttcttattcccaaagccgggcataatatattttctttccgtatcgtaaacgacagtatatgtaagcccaaagataaattcgagtggaatttcaacacacaattcatctaccagtcgggcagaaaaaatgccgttgcagttatggcagtcaggtatgagaacgactcggttacgtcggtacagcaacaattgtacggaaacatggacaatactttagtgttgtctgctgccaatttaccaataaaacagatagaaggatttatataccttgaagagcctttggattcaaaggcaaagctgttgttcttgtcgaaattcgtacttgtgcggtttcataataccgaaaaacgcgacagtatcataatatcaaataccgacagtacggccgttaaaggtgacagttcaaaggttatgaccgaaaaagaaaagcaagagttcatagattccatacagaatacggcaaacggcgataggcaaggagatcatttcagaacagctccccgaagaagggctatgcctcgtgagaagatattgccgagataa

SEQ ID NO: 1213 - DNA, 558 bp, unclassified Prevotella
atgaacaatactgcaaatcttaagaatgtttacgcagagcgtatagctccggcgttaaaacagaaattcaattattcttcgactatgcagattcctgtattgaaaaaaatcgtgataaaccagggcttgggaatcgcgactcaggataagaagataattgatacggcgataaatgagataacggcaatcacaggtcagaaagcagttgcgacagtttcgaaaaaagatatatctaattttaaacttcgcaagaaaatgcctatcggtgttatggtaacattgcgtcgtgagcgcatgtatgaattcttggaggaacttattcgtgttgctttgcctcgtatacgtgacttcaaaggaatcgagagcaagtttgacggacgcggtaattacaccttgggaatacaggagcagataatattccccgaaattaacatagattctgttgagcgtattatgggtatgaatataacattcgtaactacggctaagacagacgaggaaggttacgctcttctgaaagaatttggattgccttttaaagacgtaaaaaataactga

SEQ ID NO: 1214 - DNA, 684 bp, unclassified Prevotella
gtgcaaatcactgacataaagaaaaaaggggcgatacctgtaatagccgttattgccattgtttttatcgaccaactgataaaatttgcggtaaagacgaatttttgcctgcatgagtcggtagaaattacatcctggatgtatcttctatttgtagaaaacagcggtatggctttcggcatgagtttcataggaaccatgttccttacaatagttaggattgcccttgtcgttcttttgacgctgtatttgcggcagatagtagtcaaccgctttccacgaggatatattatatgcgtctcgatggttttggccggagcattgggcaatattatcgacaatgccttttacggtcttatatacagcgaaagtacagtgttcgatgtggctgcgttagtgcctttcggtgagggatacggaagtttcatgtctggaaaggtggtcgacatgttttatttcccgattattgagactgacattcctgcgtgggttcctttttggggtggaaaccattttatctttttcagtcctgtgtttaattttgcggattcttctattacctgtggagcaatagcaatattgattttttacaggaaatacttgtcaagcgcaaaggtgctttcaaaagaaagcataaataaaaagtcggataattcagaaaataaaatcaagaaagacagttga

SEQ ID NO: 1215 - DNA, 1227 bp, unclassified Prevotella
agattatgcctgccgccgtgggcttccaaaagaaacgatattcaagttcttgcaatcaaacatacaacaatgattaccagaataagccttttgttgttttttcttatcatatttcccgctgcgttcatttactataaaagattgcgccgctgcaagcgcctctttcccaaaatactttttgcactccctaaccttgttctactggtgttaaccatttatttcatggtgcacgataacaatatcgccaggaacgctgacgccgtaggcatttaccttatattacttttatttactaccctccccgaattaattttttccgcctttctcggtatttcattgctcttaaaaaacaaaatgcggaaaatcattatgcgtttgggagcggtgcttgcaacgtcgattgcatgcgcagtagtcgtgggatatgtatcgtgttttactgtaataaaagtaggtcaccacaactatacgtcccccgacgtgccggagagtttcgacggatacaggatagtacatgtatccgacctacatctcggtacatacaacctgtttcccgaaacggtggacaggatagtaaaaaaggtaaacgagcagcacggggacgttattttctttaccggcgacttggtaaacttttcgcacactgaagccgcacagttcataaaccggttaagagagatgaaagcgcgcgacggagtgtattctgttcttggcaatcacgattacctgagatacgtgagctataataacgaaagcgagcgactccgttacatggaagagatgaaagaaatgcaacacaaagctggctggaacctgctactgaacgaaaaccgcataataaggcgcgggaacgacagtattttcgtagtaggctcggaaaacgacggcctgccgccattccctgcaaaaggagacctgaaaaaggccttaaaaggcattccctccaacgctttcaaggttctgctgagccacgaccctacgcaatggcgacgtaaagttttgccactaacaaacattcagctaactttgtcgggacatactcatgccggacaaataaaaatcctgggacattcgccctcggcccttgtctacagcgaatgggacggtatgtacagccaagacggccgcgtcctgttcataagttccggcgtaggcgaggcattagtgccgttccgccttggcgcatggcccaaaatagacatcataacattacattccagcaaatga

SEQ ID NO: 1216 - DNA, 1554 bp, unclassified Prevotella
atgcaacagaaaataattattcttgattttgggtcacaaacaacccaactgatagggcgcagagtgcgtgaacttgacactttctgcgaaatacttccctataacaagtttcctgaaggagatgattcagtaataggagtcattttgagcggttcgccttatagcgtgtacgaccccaaggcttttaaggtcgatttgggcaaattgtgcgggcgttatccggtattgggcatttgttatggagcacaatacatagcatatactcatggcggaaaggtagaacctgctgcaacgcgcgagtacggccgcgcaaaccttgcgtcctacgacgcaaagaatcctttgttcaaaggaatatccgaaaattcacaggtgtggatgagccacggcgacacaataacggctttgcccgaaggatttacggcaatagcttcaaccgaaaaggttaagtatgcggcttttgcttcggaaagcgagcgcgtgtggggcgtgcagttccatccggaagtatatcacacagtgcaaggaacacagcttttgcgcaacttcgtggttgatatttgcggcagcaggcaggactggagtgccgcctcttttgtggacactacagtggcagagctgaaagagcaattaggaaatgacaaagtaattctgggactcagcggcggcgttgattcgtctgttgcggcagtgcttttgaaccgggcgattggtaaaaatcttacctgcatttttgtagaccacggattgcttaggaaaaatgagttcgaagatgtgttgcgtgagtacgaatgtctcgggcttaatgtcataggcgttgacgcgagcgagaagttcttcagcgaattggccggagttaccgaacccgaaaagaaacgcaaaattataggcaaaggatttatcgatgtctttgaagccgaagcaaggaagatacaagacgcacgctggctggcgcaaggcacaatatatcccgaccgcatagaaagtctcaacataacaggcaaaacgataaagagccaccataacgtaggcggcctgcccgaaaagatgaatttgaaattatgcgagccgctccgctggttgtttaaggacgaggtgcgcagggtcggacgtcagttaggcatgcccgacaaacttattctgagacatcctttccccggtcccgggcttgcagtacgtatcttaggcgatataacacgcgagaaagtaagaatcctgcaggacgctgacgacatattcattcgcgggcttcatgattggaaagtaactgacgagaacggaaataccgacgaactctacaatcacgtttggcaggccggggtaattctcctgccgatccgcagcgtaggagtgatgggcgatgagcgcacctacgagcaggctgttgccttgcgcgccgtaacaagcaccgacgccatgaccgccgactgggcaaggcttccgtatgactttcttgcgcaggtgagcaacgacatcattcgcaacgtgcgcggcgtgaaccgcgtttgctatgacgtatcctcaaaaccaccttcaacaatcgagtgggaataa

SEQ ID NO: 1217 - DNA, 804 bp, unclassified Prevotella
atgaaagacatactttccgaaatagtagctcataagcgcgaggaaataaatgcgcttaaagagcgtatgcccgtcgacaaaatatacgtaaatgcgtgtcatcatccaacggcaagcctgcgcaatgcacttgaaacgtcctcgcacggcataattgcggaattcaagaggcgttcgccgtcaaaaggctggattaaacgcaaagcgaaaccttcagatataatacccggctaccggaaaagcggagctgctgcgctgtcggtgcttactgatgaaaaatatttcggcggaactctcgatgacgtgcttgcagcgcgcccgcttgccgacatccccatcctgcgcaaggatttcacagtcgacgagtatcagttgcaccaggcttgtgcggctggagccgacgcggtattgcttattgccgccacgctgggcgtgaacgaatgcaggcacctcgctgccgttgcgcacgaactgaaacttgaaacggtgcttgaggttcacagcgaaaacgaactcgaatatgtgaacgacaacatcgatataataggcgtgaacaaccgcaatctgggaacattcatcacaaatacggccaattccgagtaccttgcccctaaacttcctgtttcgataacgcgcatatccgaaagcgggataaaggacgcacaaacaattttaagattgcagttgcttggcttcaaaggattccttataggagagtcgttcatgcaggcagataatccggcgcaggaacttgcgcgtctcgttgccgaaatatgggaattatatcaaaatccacgggtatga

SEQ ID NO: 1218 - DNA, 1458 bp, unclassified Prevotella
atgataaacaacaataaggatacaagcagcaaggaagtcttgcgcaaagtgtggcgttacgaagaaatgcttcgctcgaatacaaaagtttacttcgacgaggatgatttgctcgacatagcggaatattactattacgatatgtcgaaagacgctgaggctttgcgttgcttagactatgcgctgaagttgcatcctgagtcgttgcctgtaaagctccgtatatccgagataaggtatttccaaggagagacagcagaggcgtgggagcttctgaagtctgtttcagagcaagatgatcccgatgtgttgtattttcacgggcttttttcgctcgaagagaaagactaccgtaaggccgaggaatattaccgtaaggcgtattcacaggagcaaggcacgggggtagatttgttttgcagcatagttacggattatttggagcatggagttatagacgttttggacaaatggttcaacatgctgccagatgtttatcagagcgagccaaaggttcttgatttgaaagtttcctatttgcagatgtcgggtcgtccggctgaagccgtaaaactcgtggaaaaactgatagacagtgagccttacaacgtggagcactggattaaccttacgaagctttacatgcagctgggcgagtttggcaaagcccgcgagagcaatgcttatatccaggatatagaccccggcaaccatgtgtctctgtgcttttcggccgacatagagttccatacgggaaacatgaggcttgcccacgatttgtatgacaagtatatttcggtggaggacaaggatgcttatgcgtatttcaacaatgctttttgccttgtatatatgtataagctcgacgaggccatgcagcagttgcattattcgaaaaaattcgtggaagaaggtaataccgagctacggaaaaagatatatctccttactgcctcagtgctgatatgcaaggataagctcgatgaagcgaaggaagagttggaaaaggcgcgggagtgtggtttgcccgatgaggattaccagcataacagcgccatgattcttttcaaagacggcaaggccgccgaagcggtacgcatattggacgccctgctgttgaagtatctcaaggaaggcacattccccgagccggtgtacaatgcctatcttgttttgggcgattatgatgatttgataaaagccctcgatacgacagttgcgttttgcagctcgacagacacgtgccagaacttcgataccgagtgctcgcccttttatgctttttgttattatgaaaagaaagagaaggtgaagttcctgaattatctgaagacggcagttgaaaaatccccgggggtagttgcaaggttgtttgaaagcgtattccccgaaagccttgatgtaaaggactattatacttatgccgagcggggtatgctgaacagtaaaataaagtag

SEQ ID NO: 1219 - DNA, 993 bp, unclassified Prevotella
cagttggaaaataaattaataatatataaaatgggttttttaggattcttttcacgcgataagcagcagaaactggattctggtttggataagaccaagaaatcattgttcagcaaattggctcatgcggtagtaggcaaaagtcaagtggatgacgatgtgctggacgctttggaagaaactttgattacttccgacgtaggcgtagatacgacgctcgaaataataaaaagaatacaagagcgtgtagctcgcgataagtatgtaggtgtagacgaattgaaccgtcttttgtgtgaagaaatcgaagcaatgctcgcactcaacgataccagcgaaagctccattgctaaaataggtgagcgcgatactccttatgtgataatggtggttggagtgaacggagtgggtaaaaccacgaccataggaaaattagcacacatgttcaaacaggcgggactgaatgtagtgctcggagctgccgatacattccgtgctgccgccatagagcagttgtctatttggggtgagcgggtcggtgctccggtcgtgaagcagcaaatgggcagcgacccggcgagtgtcgcttttgatacactacgctcggctgtggcaaacaaagccgatgtcgtccttattgatacggcaggccgtctgcataataaagtaggactgatgaacgagcttacaaagataaagaccgtcatgaaaaaggttgtcccgacagccccggatgagatacttctggtacttgacggatcaaccggtcaaaatgcgtttgaacaagccaagcagtttacattggctaccgaagtaacgtcacttgcaataacgaaattagacggaactgcaaagggcggcgttgtaataggaatttcaaaccagttgaaagtgcctgtaaagtacataggtctgggagagaagatagacgatttgcaaccgtttgaccgcagtgcgtttgtgcgttccctttttaatcagaaaaaggcttag

SEQ ID NO: 1220 - DNA, 1071 bp, unclassified Prevotella
atgaaaataggagatgaagtaaggttccttaacgaagtgggcggcggcaaggtcgtggcttttagggacaagaacgtggtgcttgtgaaggatggcgacggttttgaaataccaatgctcataaacgaggttgtcgtagtggaatcagactcatacgacaggaaattcaatgcagcaaaggccgagaagcccgttgcgcccccgaagtccgaaaccgtgcggcgtgaaaagacggccgacgtacaggcagccgcaggcggattccatgcggaacgccgcgagggtgagaagcttaacatatacatggctttcgtgccggtcaatcccgaggatatggtaagcacaacgttcgacacatatattattaacgacagcaattatttcgtgacgctttcatacctctcggccgaaggcctggcatggaacgcgcgttttgaaggtacgctcgaaccgaataccaagtttttcgtcgaagagctcgggcgtgaagaccttgacaagatagcgcgcgtagccttgcagatgatagcctataagcgcgagaaaccttttgccctgaagccggctttgagcgtggaactgcgtattgacggctccaagttctataaaacgggagcttttaagaagaacgacttttttgtagagccgacgctgatttacgacgtagtgcgcgacgacgaacctgtgcgcggcatttttgccgacgcgggaaaaatacgcgaagcccttttggaaaaggatgtgcccgcgccttcgcggaaaacgccggccgccaagccgaggaagaatgacaccgttgaagtggatttgcacgcacatgctttgttcgattccaccgaagggttgccgtcgtccgacatccttaaccgccagctggccgaagtgcgcgacgttatggagaaatacaagcgtaataaagggcagcgaatcgttttcatacacggcaaaggcgacggcgtgctgcgctccgccgtgctcaaggagctgaaacggcattatccttcgtgccgcacgcaggacgcttcgttccaggagtacggtttcggtgcaacgctcgtggtggtgggatga

SEQ ID NO: 1221 - DNA, 1068 bp, unclassified Prevotella
atggaactggaattacagaaactgaacctgccgggtgttgaagaaaaacgcccgttgataattgccggtccctgcagcgcagagacagaagagcaagtgttcaatactgcaaagcagcttagcgaaaaaggaataaagatattccgcgccggaatatggaagccacgcaccaaaccgggaggcttcgaaggaataggcgagcaggggctgccgtggatgcagcgtgtgaaaaaagaactgggcatgcttgtggccactgaggttgcaaacaccaagcacgtggaagctgcgctcaatgcgggcatagatattttgtggataggcgcacgcacttcggccaatccctttgcaatgcaggaaatagccgacgctctcaaaggcgctgacgttcctgtgctaatcaaaaacccggtaaatcccgaccttgaactttggattggcgccattgagcgcataaacggagcgggaataaagcgcatagctgccattcaccgcggtttctccacttatgacaagaaactttaccgcaacctgcctatgtggcatattcctatcgagcttcaccgccgcattcccaatcttcccgtaatctgcgacccgagccacataggcggacgccgcgaacttatcgcgccgctgtgccagcaggccatggacctcggctttgacgggctcatcatcgaaagccattgctcgcccgacaacgcatggagcgacgcaaagcaacaggttacgcccgatgtgctcgatttcatcatcgaccgcctggttatacgcaacattatatcttcgaccgagagcatcgaggcattgcgctcgcagattgacgagtgcgacaactcgcttctcgacatactggcaaaaagaatgcgcataagtcgcgagatagcaacttacaagcgtgagcacaacatgactgtcgtgcaggccacgcgctataatgaaatactcgacaagcgcggtgcgcaaggtgtgctttgcggcatgagcgacgagttcgtaaggacgatttttgaacgtatccacgaagaaagcgtccgccagcaacttgaagtgataaacaaataa

SEQ ID NO: 1222 - DNA, 540 bp, unclassified Prevotella
atgggaaaaaagacggaacatatagtggaaattcccgaacaaagcgtaatacaagcagctgcaaaaggttatgacgaattttgcgggttgttttcaaacgcagccctcgtttctgttggcggaatactgacaggagaaagcatgttgaagttgaattccgaccaaataaccttgattgcgtatatgatattgcgtaacgaagttatggaaggaggtttcatacagcttattcataatggttacggcccgttcatattcgaaaatccgtttgcaaaggccatgcgcctcatgggattgcacgatttctcaaaactgttgtatgatgtaagacgccagtatgtgaatagcggtagcaaactgactaaggattgcagcgatgaagaatttatggcattgtacgagcaacatcccgagtatgatgagtatgatgatgaattcatagagcgagaaccggaatacactgaagcaatagcgcgatatattgatgaacatatggaaaagtttgccgtgattgccaaagatgaatgtgccgacgtgtaa

SEQ ID NO: 1223 - DNA, 1404 bp, unclassified Prevotella
atgataaagaaaacgttccttgcttcaatgctcgtaatgttgagcgttgttgtttttgcccaacctaaggccaagtatgttttttatttcattggcgacggcatgggagtaaatcaggtaaatgcaaccgaaacatatctcggagccctcaagggtgttataggtgtagagcctatttgttttgcgagcttcccgaatgcggctttggtaaacactcagtcggccaccaatggcgttaccgactcggcagccggcggcacggcgcttgcaaccggcaacaaaacaaaaaacggtgctataggcacgcttaaagaccagacaacaccggtaaaaagtatagccgaggccgcacgtgatgcaggcgcggcggtaggcgtatctaccacagtgtcgatagaccatgccacacccgcggcgttttatgcccacgtaaaagaccgcaacatgtatcacgaaatcggtgtgcagctaacaaagtcgaatttcgacttctttgccgcttcggatttccttgagccggtaaaggacaatgagaatctgtacgaactttcggaaaaggccggatataccatagcacgcgggcttgccgattacaaggcaaaggaagcaacatcggagcgcatgatacttttccagaccgaagaggcaagcaaaaaggacaagtcgtgcctgccttacgccctcgaccgtagcgatgacgaccttacgctcaagcagattgcagaaagcggaatagatttcctgatggacaagaaaaaagacggtttcttcttcatgctcgaaggcggtaaaatcgactggagctgccactcgaacgacgcagcccccatgatagccgaagtaatcgacatggacgaagccgtaaaggtagcttatgaattctacaagcaacatcccgacgaaacactcatagtcataaccgcagaccacgaaaccggcgggcttgtcctgggacgcggcccgtatgaattgcacctcgatgtgttgcagaaccaacgccagaccgtaggtactttcacaaagatggtagacgaactgcgcaaggaaaaaggtgacaacctgcaatgggaagacgttaaggcactgctcacaaaaggcttcggcttctgggacaaagttaagctctccgacaagcagaccgcacgcctgcaaaaagttttcgacaagatgaaagccggcaactctaaagacaccaagagcatgtacgcccgtcaggacgaactggcaaatacggccaaagacatccttgccgagattgcgctcgtaggctggcagagcggcggccattcaaacggatatgttcccgtgtttgcgataggagcaggtgcggagcagttccatggccgcatggacaacaccatgattcctaaaatcattgcaaaatccgcaggctggaatctttga

SEQ ID NO: 1224 - DNA, 567 bp, unclassified Prevotella
atgaatttatacttacgctattttagcgaagagacacttgttcacagtgtggatgaagctgtgaattttctaacatcactttcagatttcagggtagacgaaaacatgataaacgacctccggcagtttgcagagagttcggtgtcatatcctaaacgttataaaatcaggccacgtgtatatttcatagtaataaaaaccacggccaacacaatggaagaattcaaggctaacaacaaaaagaacgccactgccaccgacagcacgaacgaggcagctgccccgcacaaaaacgacaagcaggcagagctggccgaagagaaaaaaggctggtacgaaggctccattatgttcaaacgtgttattccgatacaaggcacggggaaattccaataccgcgacactttgttcgtggcacgctgcaaagccaacagcgcaatacactgctacgaacgtattgttcagcatttgcgcaaccgacaggacgtagacttgcgcagccagtttccttcggccaaagggaaaaacttttcctacaaatacctcggcgaacaacttcccgcataa

SEQ ID NO: 1225 - DNA, 468 bp, unclassified Prevotella
atggcatatatgtcacaagaaggctacgacaaaatggtagcccaactccgacacatggaactcgttgaccgccctgcggcttcggctgcaatagcagaagcgcgcgacaagggagacctgtcggaaaacagcgaatacgacgctgcgaaagaggcacaggcaatgctggaaatgaagataaacaaactcaaagccgccatagcggaagccaagataatagatgccagcaaactcaagaacgataccgtgcagattctctcgaccgtcgaaatgcgcaacgtaaaaaacaacgccaggatgaaatacaccatcgtgagcgaatcggaagccaacctgcgcgaaggcaaaatatcgtcgcaaacacccgtggcgcaaggattgctcggacacaaggtgggcgaggtggtaaaaatcaagattccgcagggagttgtagagttcgagataatgaatatctcggtaggataa

SEQ ID NO: 1226 - DNA, 1371 bp, unclassified Prevotella
atgaaaacaatctgtttatatttcgaaatacatcaaaacatccatctcaaacgctacaggttctttgacatcggcacagaccattattactacgacgattacgaaaatgaacgcagcataagcgaaacagctgagaaatcctacgttcctgcgctcgaagcgttgattgatatggctgaaaagaacaagcattacttcaagtgtgccatttcgctgtcggggtgtgctattgaacaattagaaaaccatgctccacaggttatcgacttacttcaaaagctatacgcaaccggatgttgcgaaatattggcagagccatattcacacggactgtcgtcattagctaaccacgaaagtttctgcgatgaagtcaagaggctttgccgtaaggtacactccatgtttggcgcaacaccgaaaatattcaggaactcatgccttatatattccgacgaaataggcgaattagtagccggtatgggattcaagggaatgcttaccgaaggcgcaaagcacgtattaggttggaaaagcccgcattttgtttacaactgtgccaatgcgcccaaattgaaactgcttttacgcgactaccacctgtctgaagacattagcttgcgtttcaacgattcttcttggagcgaatatcctctttttgccgacaaatacatggaatggatagagcagcttccacaagaagaacaaataataaacatattcatggaattgtgtgcgttgggaatattccaacctctatcctccaatatcctcgaatttttaaaagcacttccggctgaggccaaaaacagaggaatcacattctccacgccctccgaaatttgctctaaaatgaaaagcgccggtgccctaagcgtaccgtatcctatttcttgggttgacgaagaacgcgacaccagcaactggcttggtaacgtaatgcagcgcgaagcatacaacaagctctacagcattgacgacagtgtaaggatttgcgacaaccgcccaataaagcaggattgggattatctgcaggcaacaaacaatttccgtttcatgaacaccaagcccagcgcacaaaacgattaccgcggaatatatgaaaccccatacgacgctttcacaaactacatgaacatattgggcgattttataacgcgcgtaaacaatctatatcccgatattgacaacgaagaactttcgtccttgctcacttcaataaagaatcaagaagaagaaattgaaatgaaagacaaggaaattgtaaagttgcgcgccataataacaaagctcacgcgagaaagcgaaaaaagcaaaaagccgaccaagaaaacaacaaaagaaaaaaccgtaaaagtaaaagaagcaaattaa

SEQ ID NO: 1227 - DNA, 942 bp, unclassified Prevotella
atcgggcatggtttcgtatatttgcacgaaattagcgcttgttatatggatcgacaaacaatatcgcaatgcccggcatgcggttcggagcggattcataaatacgtttctgcaatgaactattatgccacgggtgaggcattcgacatctacgaatgcgacgcctgcggaatgcggttcacccaggacgctcctatcgaagccgaagcagcgcagtattattcctcgcccgactatatctcacacaccgacatacgcaaaggactcttcaaccgcacgtaccacgcggtgcgcacggtaatgctgcggcgcaaggcacacctggtgatgaaagccctgggcagcaaggaaggacgactgctcgacataggcgcgggcacgggatactttgcgcgcgaaatgcagcggcggggctttgccgttgaagccgtggaagtaagcgaagacgcgcgcaaggtggccgaaaagaacgccggaataaaggaaaaggacatcagcgcgctcgccacgttcgaaaacgagagcttcgacgccataacgatgtggcacgtgctggaacacgtttacaacctggccgacgagtggcagacactgcggcggctgctgaaaaacgacgggcggctggtcatagccgtgcccaactgcgcctcgctcgacgcaaaacactacagggaattctgggccgcatacgatgtgccgcgccacttgtggcacttcaactcgcacaccatgaaactcatggccgaacagtacggcttcaagataatgagcatacaccccatgccgttcgacgcctactacatctcaatgctgtcggaaaaatacagcggccgcaagccctacttcctgcgcggcatgatgttcggcacatattcgtggttcaaaaccctgtgcaacaagaaaaacagcagctcgctcatctacgtgatgagaaagctgtaa

SEQ ID NO: 1228 - DNA, 513 bp, unclassified Prevotella
cacacaatggaaattatactgttagaagacgtacaaggattaggatacaaggacgatattgtaaaagtaaaaaacggctacggccgcaattacctcataccctacaagaaagccgtaatagccagcaagtcggctaagaaagttttggaagaaaaactgaaacagcgtgctcacaaactcgaaaaaatcaaaaacgacgcactcgcacttgctgagcagctttctaaactcgaagcattggtggttgctacaaaagtaagccccaccggtgtaatttacggttctgtgaactcactgcaaatatccgatcttcttaaagaaaaaggcttcgacatcgaccgcaagaaaatcgacgtcaaggatgtaaaggaaattggaagctatcacgcagtagtacatctgcacaaggaagtttcggtaagcattccgttcaatgttgttgacgaaaacgcaaaagccgaaaccaaagaagctgccgaacccgctgctgaagtagaagaagcacaggcttaa

SEQ ID NO: 1229 - DNA, 1899 bp, unclassified Prevotella
atgaaaacaaaatatttttattccactttgctatgctgtgcggcttttgcagcaactgcggctgccaatgccgcaaacgggacaaccgaagaccgacttgccgcgtcgttgctcaaaagcaagacaccgtgcgtcgtaaacattaagttcggcgggcatgtagggcaggacataaacgactgctttacgcaccgcgtgctcggcgagaataccgaagaactggttgaaccgttccggcataagaaagaaaaaaaccagtggcagactgagttctggggcaaatggatgctcggagcggtagatatgtaccgctacacgcacagccgggaactgtacgacaagatgaaggcttcggtagacgaaataatagccacgcagcagcccgacggctacataggcaactatgcaccggagcaccggctaaaggaatgggacgtgtggggacgcaagtacgttgtgcggggcctgcttgcctggtatggcatatccggtgataagaacgcgttgaaagcagcgcgcaaggaaacagactgccttatcgaagaattgaaggaaaagaacaagaaaattgtcgaaacgggaaactaccgcggcatggcgagcgcttcgatactcaatgccgtagtaaaactttacaaggctacggatgacgagaagtacctcgactatgccaagcagatagtggacgatatagaatcgccgcaaggaccacagctcatcaagaaggcacttgcgggcaatcctgtggcagaacgtttcccttatcctgcgtcatggtacagctatgaaaacgggcataaggcctatgaaatgatgtcgtgctacgaaggcatgctcgacctttataagataacaggcgatgagaacctgttcaaggccgctaaaatggcggtagacaacattgtcgacaccgagataaacatagccggttcgggaagtgcgcatgagtgctggtatggcggcaaagcgttgcaaacacgccccacgttccacaccatggagacttgcgtaaccaccacgtggctgcaaattctaaaccgtttgcgggcaatgacaggcgaaagccgttattccgaccttatggagcagacgatatataacgcattggcggcttcgctcaaaagcgacgcttcgcgcatagccaaatacatgccgcttgaaggcgtgcacactcccggagaacagcagtgcggcatgacaaccaactgctgcaatgcaaacggccctcgcggctttgcgctcgtatcgcaaacggcttatacggttaagccttcggagataacggccaacttttatgttccgtcgaccgctaccataaacataggcaacaaaaagtgcgtcaccctcgaacagactggcgactatcccaaggacgacgtcgtggaaataaaggtcacgtccgagaaagctgaggactttgcgctcaagttgcgcattcctttgtggagcaacgccacagccgtttcagtgaacggtacggcggtagacggtgtaaggcccggcacgttcctcgcaataaaccgtacatggaaaagcggtgatgtggtaagcatacggttcgacatgaacccgcgcgcggtgcagcaggacaactgcgaagccctgatgtggggacccgtggtgctggcccgcgacagccgcttcaacgacggcttcgtggatgaggccgtaacagtaagccgcaaagacggccgcgtggaactcaaaccggcagaagctccggaatgggcgtggatatgcttcaaagcgcccatggtggtcggactcgacgagatagaccacggcaaaccgcgcgacgtacttttctgcgatttcggttcggccggaaacacgtggaatccgaaggaacgttaccgcgtatggctgccaaaagccctcgatgtccataaaaagcagtaa

SEQ ID NO: 1230 - DNA, 1695 bp, unclassified Prevotella
atggacaacaagataaaaatctcttatccctcatctgaaaaagtttatattcccggtaacatacataaagacataaaagtggccatgcgccgcgtcaaactgactcctacggtaagtatagtaaacggagagaaaaaaattaaggaaaacagtccggtttatgtatatgataccagcggaccgttcagcgacccgaacgcagaaatagatttgaaaaaaggccttccacgattgcgtgaagaatggatctcccgacgcaatgacacggagcaacttcccggtctaacatccgaatacgggagggaacggctggccgacaagagtcttgacagcttgcgcttcgaacatatacgtatgccattgcgggcaaaagaaggacatcaggtgtcgcagatgtattatgctaaaaaaggcataataacagccgaaatggaatatgtcgcaattcgcgagaatatgaattgcaaggaactcggaatagatacgcacattacgcccgagttcgtaagggacgagatagctgccgggcgcgctgtgttgccggctaacataaaccatcctgaagcggaaccgatgataatcggccgtaacttcctcgtaaaaataaataccaatataggaaattctgccactacttcaagcattcaggaagaagttgagaaagcggtatacagttgcaaacttggcggcgacacgctcatggatttgtccaccggcgcaaacatacacgaaacgcgcgagtggataatacgcaactgccctgttcctgtgggtagcgtgcccatttaccaggccatggaaaaggtgaaaggcaaggcatacgacttgtcgtgggacatttaccgcgacacgctcatagagcagtgcgaacaaggcgtggactattttaccatacactgcggaataaggcgaaagaacatagggctttcggccaaccgtctttgcggcatggtaagccgcggcggcagcattatatccaaatggtgcattgaccatgacaaggaaagtttcctctacgaacatttcgacgatatttgcgatattctcgccaagtacgacgtggcaatatcattgggcgacggtctgcgccccggctgcataaaggacgccaacgatgccgcacagtttgcggagctcgacaccatgggcgaacttgtggaacgcgcatgggcaaagaatgtgcaggcttttatcgaaggcccaggacatgtgccgatgaacaagattcaggaaaatgtacagcgtcagatagaaaaatgccacgaagcaccgttctataccctcggtccgcttgttaccgatatagctcccggttacgaccatataacgagcgctatcggtgcggcgcagataggttggtacggtacggccatgctttgctatgtaacacccaaggaacatctcgggctgccaaacaaggaagacgtgcgcgagggcgtagtggcatataagatagccgcacatgccgccgaccttgccaaaggacaccctgcagcacagattcgtgatgacgcattgagcaaggcgcgctatgagttccgctggaaagaccagttcaacttgagtcttgaccccgaccgtgccttggaatatttcaaggaaaacagcaaagacgacaagaattactgcaccatgtgcggacctaacttctgcgccatgcgtataagccacgacgtgaacgattgtgcgctttga

SEQ ID NO: 1231 - DNA, 1404 bp, unclassified Prevotella
atggaaaaaatcaaaagaatcagaatagtagaacttctcaagtcgaaagactacggtgccaaagtaaatgtaaaaggatgggtaaggacacgccgtggcagcaaggccgtaaattttattgccctcaatgatggttctacaataaagaacatacagattgttgctgacgtcgaaaaattcgacgacgaactaataaagcaaataaccaccggcgcatgtctgagtgtagacggagttttggtagaaagcataggaagcgggcaaagtgtggagctgcaagctgataacatagaactgctcggagcatgcggaagcgactatcctatgcagaagaaaggacagagctttgaatacatgcgtcaatacgcacacctccgcttgcgcacaaatactttcggtgcggtgttccgcatacgccataatatggcaatagcaatacatcgctattttcacgagcacggcttttattatttcaatacgcctctaataacaggaagcgattgcgaaggagctggacaaatgttccaggttacgacaatgaaccttgccgatataaagaagactcctgacggtaaggttgactattcagacgacttttatggaaaaccggcttcgcttactgtttcgggacagctggagggagaactcggcgctacggcattgggcgctatatatacttttggaccaacgttccgcgccgaaaactcgaacacgccacgccacttgtcggagttttggatgatagagccggaagtcgctttcaatgatatagaagacaacatgaaccttgccgaggatttcataaaatattgcgtgcgctgggcattggagaactgtgcagacgatatagaattcctcaacaaaatggttgacaaaggattgatagaacgcctcaagttcgttgtcgagaatgattttgcccgtatgaaatataccgaaggcatagagattctcgaaaaagctgtaaaagacggccacaagtttgaattccctgtttattggggttgtgacctcgcggctgaacatgagcgctatttggtagaacagcactataagcgtcctgttataataaccgattatcccaaagagataaaggcgttctacatgaagatgaacgacgataaccgcacagtgcgtgccatggatgtgctgttcccgcagataggtgagataataggtggctcggaacgcgaggagagctacgacaaactcaaggcaagaatcgaagaactgcacataccaatgaaagatatgtggtggtatcttgatactcgcaagttcggcacatgcccgcacagcggtttcggccttggctttgaacgtttgatactgttcgttacaggtatgcagaacatacgcgacgtaataccgttcccccgcacacccaagaacgcagagttttaa

SEQ ID NO: 1232 - DNA, 1086 bp, unclassified Prevotella
atgtttgcgatttgttcgtgcggtcgtaaaggcacgtctcagagtgtgagcggagattctgtgacttttcgccacgcccggcttttgcatgttgaaaagttcggtaattacagcgttgcacgcataagcaacccgtggaaagcaggggaaacgctgcatacctacgtgcttgtaccgcgcggcatgcctgtatcagaccgtttgccgtcgggtacggttgtaaaagtacccttgcagcgggcggcggtctttacgtcggtgcattgcggtcttctttctgccttgggcaggcttggctccgtagccggggtttgcgattaccgttatatattgctgccttcggtgcgcagacatgtagaaagcgggaaagcaaaggacctgggagcgtctgccagtcctgacgtggaacgtattgtttcagtaaatcccgacgcattgctcgtgtcgccgttctccgggtcggggacatacggcaaacttgccggtacgggtgtccctataatagaatgcgccgattacatggagcattcgccattggccagggctgaatggatgcgtttttacggcatgttgttcggttgctctgccgaagccgattctctctttgccgtggtagagaagaattacatgtcgtttaagaaaattgcttcggtcatgcctcgacatcccaagctgatgtgcgatcttatgcaaggcgctgcctggtacgttccgggcgggaaaagtaccatggggcaggctttcaaggacgcaggggctgaatatattttcggcggtaacaactcggccggctccgtgcctttgtctttcgaggcggtttacgaccgtgcgcttaatgccgacgtgtgggtaatgcgttgcggcatggcgggcgttacatacgcttctctcaaaaaggaacgcgaggcatattcgcatttccgcccgtggcgggagcgccgaatctattcgtgcaatacgcttgaagtgccgtttttcgatgaatcgcctttccgtcccgattatcttttgggtgatttggtcaagattctgtatcccgaaaaatgcactgactacagtttccgctatttttcgccggtcaagtaa

SEQ ID NO: 1233 - DNA, 573 bp, unclassified Prevotella
atgaaagcagtaataatagacaattacgactcattcacctacaatctggctcatgccgttaaggctctcggggcagagaccgaaatagtacgcaacgacaggttcaaactcggctacatcgggaaatacgacaagataatcctgtcgccaggaccgggaataccttccgaagccgggctgctgctcgacgtaatacgcgaatatgcaggcaagaagcccatgctgggtgtttgcctcggcgaacaggcaatcggcgaaaccttcggagcaaagctcgtgaacctcgtgaatgtctttcacggagtacagactcccgttgaaataacgtccgacgattatattttcgacagcttggagcacgaaattccggtggggcgctaccattcgtggatagtaagcgacgaaagccttcccgaatgtctcgaagtgacggcgcgcagcaaagaaggctacataatggcgctgcgtcacagggaactcgacattcacggcatacagttccatcccgaatcggtacttacgcccgacggaatgactataataaggaatttcatataccataaccaagcctga

SEQ ID NO: 1234 - DNA, 672 bp, unclassified Prevotella
atgcctaaagttggtgaagaaataaaaaaggttctcaatgagcttcctattggagtggaattagttgctgtgtctaaattccactcatccgaggacatattggatgcatacaatgccggtcagcgaatctttggagaaaaccgtcctcaagaaatgacggagaagtacaaaattttgcccaaagatataaaatggcacatgatagggcatttgcagaccaacaaagtaaagatgatagcaccgtatgtttctatgattgaatctgttgactcaataaaactattgcaagagattaacaagcaagcagcgaactgcaatcgaatcatacggtgtcttttggaaatacacgttgcaaaagaagaaacaaaatcaggctttacacccgatgaatgccgcacttttttagacaaaggcgaatggaaaagctttaacaatattcaaatatcaggcctcatgtgcatggcgtcgaatacgacggacgaaaaaagagtatttaatgactttgaaacagctcaaaacctatttaatgagtttaaggaatcacattttgctcattgtgactcattctgttatcgttcttggggaatgagtaacgattataaaatcgctatagaaaacggggccaatatagttagaataggaacacgcatattcggtgaacgcaattattaa

SEQ ID NO: 1235 - DNA, 1098 bp, unclassified Prevotella
atggtaatatcttcactgtccgtaatcaattataagaatatagcgcaagccgatttggctttctcgccaaagattaactgtttcatcggctcgaatggcgagggaaagacaaacctgctcgacgctgtttattacctttcgttctgccggagcagcaatacccctctggatgcgcaggtggtcaggcatgagcaggatagtatggcaatacagggcgtttatatggacgacgacgggaatgaagaggtaatttcggccggcgtgttccccggcaaacgcaaacgtttctgccgtaaccgcaagccttaccagcgcctggccgagcacatcgggcttgtgccgctggtaatggtttcgccgcaggacaacgtgctcgttacgggtgggggcgaggaacgccgcaagtttttggatacggttatttcgcaatacgacaatatttatttggactcgctcataaaatacaaccgtgcgctccagcagcgcaatgtcttgctgcgtggcgaggccgaacccgacccgacggtaatatccatattcgaggagataatggccgcagaaggagaaataatcttctccaaacggcgcagtttcgtcgagctgcttactccgatattccaggactattatacaaccgtctcgagcggtaaggaaaaggtggaacttgtgtacacgtcccactgtatgcgcggcccgctgctcgacgtcatacagcgcgaccgtgtaaaggaccgcattatgggttattcgctgcatggcatacatcgcgacgagctcgacatgcgccttgacggctatcccatacgccgcgaaggctcgcaagggcaggccaagtcgttcctcgtggctctgaagttcgcacagctcgaactgctcaagagggtgggaaggcataccgtgcctttgctgctgctcgacgacatcttcgacaagctcgacgccgggcgagtggcacagatagtgaacctcgtggcgggtgacggcttcgggcagatattcataaccgacaccaaccgcgaccacttggacagcatactggctgccacgcagagcgattatcggttgtttaacgtaaagggcggagaggtttcggaatga

SEQ ID NO: 1236 - DNA, 393 bp, unclassified Prevotella
atgaacaacacagaagtcaacacatccgacttgaaagtctttaccaaccatatatatgagctggaaaagggcgtgaggcgaatggtgctgtacacaacgcacggaagaaaccgcgacttcgtggtgcgccgcctcgacaaccgcaacatcagctacgttgagcagcctgtgggtaacggacggataaacatttttttcggttcagacgaatgtatcgacgccgtgcgcctgctgctcagccgcccgttgtacgaacttacgccggaggaggattttatcctcggagctatgctcggatatgatatttgcgcccaatgcaaacgctactgccgccgcaagggagcacaatgcgacgccaagctgcgcagctggcccttaaccggcaggggctaa

SEQ ID NO: 1237 - DNA, 927 bp, unclassified Prevotella
aaggatacgcaaaatgttcccggtaaaactaagaataaaacgacattaaacatatttatcattatgtacaggttaaagttttttgctattttaattataacacaagcatttgcgcaggcatttgctacggtaaacgttatttacaatcccgaggattccgttgaaatagaaaggtggctttcggaagcaccttcgggaaaaacacccaacgagcttaccttatattttgcaaacaaaatgataggcaggccttatgttgcccatacattggaaaggagcgacagcgaatgcctcataattaacatgaaagaactcgattgcacaacattggttgaaaactccgcagcaatggcaataactgccaaacaagggaaaaaacgtttctctgactactgtgatgtgctgcgcagtttgcgataccgtaatggcgagataacagattattcgtcaaggctgcattacttctccgaatggattaaatacaatgaagaaaaaggacttgttgaagacattgggaaaaaaggtgcttatccatttatcgcaaaacaaattataaaggctgacttcatgtctacaaatccgcaatattacaagcagcttaaaaacgacaccgctatggttgccaaaataaaggaagcagaaatgcgcataagcggaacggctgtcaactatatacctaaaagtctgcttaacaacgggaaagatttattgggagaaataaaagacggtgacataattgctctgattacaaataagaaaggattagaaataagtcacgttggaatcgctgtctggaaaaacgggaaactgcatttgcttaatgcctcaagtctaaaaaacaaagttattctcgacacacaaaccttatatgaataccagaaaacaagaaaatcacaattgggaatccgagtaatcagggtatattaa

SEQ ID NO: 1238 - DNA, 573 bp, unclassified Prevotella
atgactgaaaaggaactgcgggcggcaggcatgtattaccgcccctttcaagacaaggagttgcgggatgaataccagcgtgctgccaggcttgtgtttaaacttaattctatttgtaataacgattatgctgcccgctacggagtgttacgcgaactttttggaggcataggcgaggagtgtaccgttgtttcgcctttccattgcgatttcggctacaatataacggtgggcgagaaactgtttgccaacgttaacctggtcatcatagattgtgccagggttacgataggcaataacgtgttcatcggccctaatgtaggaatctatacggccggacatcctgaggaagttgatttgcggattcgcgactatgagtacgcacaccccgttacgataggcaacaatgtatggataggcggccatgcctgcatcctgcccggagtgaacataggcgacaatgccataataggtgcgggcagcgtggtaacgcacgacatacccgccgggagcgtagccgtaggcaacccatgccgcgtggtgcgaaaaatcaggcaggaaagcaaggaatga

SEQ ID NO: 1239 - DNA, 1170 bp, unclassified Prevotella
tggtcgagatggcacgaaacggttggaatccttcggagatacataacagtaataaatgaagagatgatagagtacttgaaactttacgatataagcaacctttatcaacctcagctttccgaagctgtagagagggtggttaggtcgggaatatacctttacggcaatgagacccggcagttcgagaaagagtttgccgaatattgcggtgcgcaatactgctacgcaactgcaaacgggctcgacgcgctcaccgttatactgttgtcttacaaacatctttacgattggcaggacggggacgaggttatagtatcggcgcatacatttgttgccacgctgctggctataacgagggcaggaatgcaaccaatagtgtgcgacgccacgttagacgattatcttattgatgtgaataagattgaatcgttgataacttcgcgcaccagggctataatgccggttcacttgtatggtgctgtttgcgacatggaggccatacgtgccgttgcagcggctcataaactcaaagtggtggaggacgcggcacaggcgcatggcggcgtagggcgcaatggcgcaaaggcaggtgcgttgggcgacgcggcggctttcagcttttatccgggtaagaatctcggcgccctcagcgacgctggtgcggtagttactaacgacgaagaactgataaaaacagtacgcattatatcaaattatggggcacaggaaaaataccgccatgttctgccgggaataaacagccgtatcgatgaaatacaggccgctgttcttagggtaaagctcccttatttggaaaaggtgatagcacgtcgtagagaaatagccgcaatgtacaaccaaggtatatgcaattcttgcgtaatcaagccttacaatggtgagacggggaacagtgtctttcatgtatatccggctttatgtggagaacgcgaccggcttatgcaatatttgttgagtaacggcgttaaaacgttaattcattatccacaagcgccgtgcaaccaattggctttgcagagttgtttgaaaggccaggcgtcacctgtggccgagcgtatttgtggcatggaactcagcctgcctataaattcagctcttaagaatgaagaaataaatactataatcgaactgataaatcaatttagatga

SEQ ID NO: 1240 - DNA, 621 bp, unclassified Prevotella
atggccaaattattttctacagaaaacagagaagtccttaccgcaccgctcggaaaggataatccgataacgatacaaattctcggtatttgttctgcccttgcagttacttcacaactcaagcctgccatagtcatggggctgtcggttacaattattacggcattcagcaaccttattatatcacttattcgtaaaactatccctaacagaataagaataatagtacagctcgttgtcgtagcagctttggtaacaatagtaagcatgttgctcaaggcggtggcatacgatgtaagcgtgcagctgtctgtgtacgtaggattaataattactaactgtatactcatggggcgactggaagcctttgccatgaaccacgcgccatgggaaagttttcttgacggcataggcaatggacttggatacgcatacattttggctatagtaggggctgtaagagagatattaggttccggaagcctttttggtttcaaattcatccccgatgccgcatacaatttagggtacttagacaacagcatgatgacaacgcctgcaatggcactgataatattgggctgtataatctgggtaagccgaataatacaaaaagactaa

SEQ ID NO: 1241 - DNA, 1074 bp, unclassified Prevotella
atggcgagaacagaaatttcaacattgggcgaattcggccttataaagcgtttgacttccggccttgaaatgaggaatccgtcgaccgaaaaaggcgtgggcgatgactgcgccgtgctgcattaccctgacgaacaggtgctcgtaaccaccgacatgctgctcgagggcgtgcatttcgacctgacatacgtgcctttgaaataccttggctacaaggcggcgatagagaatatttccgacatagtggccatgaacggaaagccgcagcagatgacggtggccttaggcataggccggcgcttctgtgtggagaatatcgaagagatttacgaaggcttgcgccacgcttgcggcaagtacggagtggatctcgtgggcggggataccacatcgtcactcacagggctgaccatagcgataacgtgtattggctcgtcgccgcgcgaccgtattgtttaccgaagcggagcgcacgatacagaccttgtttgcgtgagcggcgacctgggcgcggcttacatggggttgcaactgctcgaacgcgaaaagacagtgttcgaaaacaaaagcgaaggcctgaaaggcgcaaacgccgcgctcgaagccatgcagccagactttgctgggcatgaatacctgttgcaacgccagctcaagcccgaggcgcgccgcgacataacggaacgcctggccgaagccggcattttgccaacgtcgatgattgacatttccgacggcttgtcgtccgaactgctgcacatctgcgagcagagcggcacagggtgccgaatttacgaggaaaggattccgatagactaccagacggcggccttggccgatgagatgaagattggcgccataaccgctgcgttgaacgggggtgaggattacgagcttctgttcaccgtgcctcttactgattacgaaaagattcttaaagtggaggacgtgcatgtgatagggcatatcacgtcggccgacgcaggacggacgttcgtaacgagcgacggggcagaggttgaactgcgcgcacagggctggaacccgcttgcgcaaaaggatgatgaatga

SEQ ID NO: 1242 - DNA, 1254 bp, unclassified Prevotella
atgaaagaagaactaatcacaaaagcctacgaagtggcaaaggaacgttacgctgctatcggcgtagatgtagatgctgttatcaaacaaatgcaggacttccacctgtcgctgcactgctggcaggcagacgacgttatgggcttcgaaaaacaggccggccctctcaccggcggaatacaaacaaccggaaactatcccggccgtgcacgcaatatcgacgagttgcgccaggacatactcaaggcctgctcgctcattcccggcacacaccgcctgaacctgcacgaaatatacggcgatttccagggcaagatagtagaccgcaacgaggttgacgttacctatttccaaagttggatagactggggcaaggagcacaacatgaagctcgacttcaacagcacatcgttctcgcacccgaaatcgggcgacctgacactctctaaccccgacgaaggaatacgcaacttctggattgaacacaccatgcgctgccgcgaaattgccgaagccatgggcaaggcgcagggcgacccctgtatcatgaacatctggctgcacgacggaagcaaggacatcaccgtgttccgctacaaataccgctcgctgttcaaggattcgctcgacaagattttcgctgtcaagtacgacaacatgaaggactgcctcgagtcaaagacattcggtatcggcctggagagcttcacttccggctcgctcgagttctgcgttggctactgcgcacagaacaacaaaatctacacaatcgacaccggacactaccaccccaccgaaagcgctgccgacaaggtttccgcaatgctgctctacgtgcccgaactgatgctccacgtaagccgccccatacgttgggactccgaccacgttacaatcatggacgacaccaccctcgacctgttcaaggaaatagtacgcgccggcgcgctcaagagggtacactacgggctcgactacttcgacgcttcaatcaaccgcataggtgcttacgtgataggcagccgcgccgcacagaaatccatgctccaggctctgctcgaacccctgccaaaactgcaggaatacgaatccaccggccgctggttccaacgtctcgcgctgctcgaagaagcaaaatcaatgccttggaatgcagtttgggattatttctgcctcaagaacaacgttcccgtgggcgaagaattcattcccgaaatcgagaagtacgaagccgaagttacttcaaaacgctaa

SEQ ID NO: 1243 - DNA, 411 bp, unclassified Prevotella
aaggaaaaaataatgggaagaagaaaaagattagcggcaaaagccataaaggaaagccgcaaaacccagtactttgccaaactgaaggatataccctcttcgcctcgtaaaatgcgatatgtaatagatatgattcgtggtatggaggtaaacagggctcttggaactttgcgcttttcagctaaagctgcttcggtgccagttgaaaaattgctccgttcagctataaataattgggaacagaaaaatgaccgtaaggctgaagaaggcgaactttatattactaaagtgttcgttgatgaaggtgctacactgaaacgtatgcgtcctgcaccgcaaggacgtggctatagaatacgcaaacgctctaaccatgtcaccatgtttgttggtacaaaaaatgaaaaataa

SEQ ID NO: 1244 - DNA, 1548 bp, unclassified Prevotella
atggtttgtaaattggaaaaagaagtattcgagaaccctgttttaattaaaataaactctattacttctatgtataacccgaatttaatatcgaagtttttactgatgttatcaacattgataatatcatattcatgttcgggcgattacgacaattattcagaaacatctaacgaaaagcccgtaatttttccggattataccgatataaccatacctgtaaatatagctccattaaattttaaaatgcctggcgccaagcaaattcgcgcacaagtatttgtaaatgagaaacagattttcgatataaaaagcgattctgttattgagtttcctgtagaagactggaaagaacagattaaaagctacgttggtaaagatttgtccatcacgttgactgcatggacatcaaaaaatcctgctggtattaggtataaaccgtttaatattaaaatttctcaagacaagatagatccatggattgcatatcgcctcatacctccaggttatgagttatggaaaagaatgggtatatatcaacgcaacataaccaactttgacgaagagcctatagtaacaaatgaccaaaataatggtggctgcgtcaattgccacaatttttgtaaatacaaccctgatacatgggtttttcatgcacgtggcgaaggaggcggcacgatagttacatataaaggagtttcacgtaaggtcgccattgaaaagaaagggccacaaaaaggcgcaacatatccggcatggcatccttcaggacgatatatagtattttcttcaaacgtaacacgtcaaaatttttacggtattagccgtgataaaatagaagtatttgatacagaatcagaccttattgtttacgatgtgctcaaagacaatgttttggctgaccctcgttttacagaacgtcacaattgggaaacattccctgcattctcacccgacggaaaaaatctttactattgtgtagcacattcaaatgatgaaagtaataatgcaaatagaaaacccacattcttttgggatctgaaatactctttatgccgtgttccatttgacgaaacaactggaaaattcggcgaacaggtagatactatttatagtgcataccgtgaaggcggaagtgtatcatttccaagaatatctcctgacggccgatacttgctttatacattggctgactgtgccacattccctatacaacatgtagaagctgacttgaagatgaaagacctaaccacaggagatagcattaatacaaatattttaaatagcgaatatagcgatagctatcattcttggagttcaaatggcaaatggattatattcagttcgaaacgagtggacggacgatatacacgcttattcttctcgcattttgacggaaaagggaacttcacaaaaccatttttattaccgcaaaaagacccagaacataatatggccagattaaacgcatataatataccggagttcataaaagcaaaagaaaaagtggataaagacaagatggctaattacttccacgttaaataa

SEQ ID NO: 1245 - DNA, 726 bp, unclassified Prevotella
atgataaagattatacctgcaattgatataataaacggacattgtgtacggctgtcccaaggagattaccaaaggattacagattacagcgaaagtcccgccgctatggcagaaaatttcgaggcattgggcttcaagcggctgcatgtagtagatttagacggcgcacgttcaggaaaggtaataaacataaaagcactaaaggaaataacaagccgcacaaatttaattgtcgatttcggcggtggaattaaatctgaagaagacctaaaaaacgtatttgaagcgggtgcaagcgcagtaagtattggaagtatagcggtaagtgacccggatatagtttcgctatgggcagattcgttcggagctgaaaaattcataatatcggcagacgttcgtgacaacattgttaggacaaacggttggacaaaaaattcaggcattactcttaatcaacttatatcaagataccggaataaaaatatacgccgcgtgttatgtactgatatctcgcgcgacggaatgctgtgcggttcaaatattgaattgtacaaaaccattatggaacaattccccgattgcaaactaattgcaagcggtggtataagttcgttagatgacataaaaaaactggatgaagccaaaattcctgccgttgtcataggcaaagccatatacgaacaacaaattaaccttgaagaattagcacaaacttttattcaataa

SEQ ID NO: 1246 - DNA, 366 bp, unclassified Prevotella
atgatacaggtagaaacaaaattaaacgttgctgacaatagtggagctcgcgaagcgctttgcattcgtgttttaggcggaactaggcgtcgttatgctactgttggagatattattgtcgtttcggttcagaatgtgattccttcaagcgacatgaagaaaggaacagtatcaaaggctttaattgttcgtaccagtaaagaggttcgtcgtgcagacggttcttatattcgctttgacgataatgcatgtgtgttgctaaacaatgcaggagagttaaggggaagtcgtatattcggaccggtggctcgtgagctacgcgctgtaaatatgaaggtagtatctttagctcctgaagttctttaa

SEQ ID NO: 1247 - DNA, 750 bp, unclassified Prevotella
atgacagtaagaggaacagaaagaggctctttcgattttaaaagtataaatgccataatttttgactatggcggcactctcgatacagccgggcggcattggtcgtttgtgcttagagaaggttatgaagcttctgggatgtttctgaacgaagagcaatggaaagacgcttatgtctttggcgagagggcattggcaaagaatcgcatagttatgccgcaagataatttccgcgatgtcttactgaaaaagattgacaaggaatttgtttgtttggaggagaacgggcattttaatcctgagaagaaagaacgcagccgtctcataggacaaatagcggattattgttatcgctatgccttgaggcatgtcgatataagtcgcgaggtgcttgaaatactttcaaagaaatatcctttggtgcttgtgtcgaatttttacggaaacatacatgccgtgttggatgatttccgattgaatttctttaatgacgttatcgaatcgtcggtagtaaaggtgcgtaaacccgaccccgaaatattcagattaggtttgaatgctttgggaacagctgctgctgaaactttagtgataggcgattcgtattcaaaagacataataccggcctcggctgccggatgcccgacagtctggattcggggtgaagggtggggaaaagaccccgacgatataagtattccaaaaagaataattacagatgtacgccagctgttgccccttatgatttag

SEQ ID NO: 1248 - DNA, 1206 bp, unclassified Prevotella
atgtcagacataatttttttcacgtgccgtgtatttttttccttgaactacagcgcatccaattatataccgcccgattttgaaaagacggcggaaaaacgtaactttgtcacaaagtttaacgtaactcaccgcactaaaaccgttaagcctgtggcgcacattctggctatacgcctttcagccctgggagatgtagcgatgacggttccggccatacattcgcttgccataagctatcctaacgacgagataaccgtagtatcgcgccgcaaatggggtgcgctcttccacgaaatgccggcaaacgtgcatttttacggtatcgacatggacgactacgccggcatacgcggcctggaacggctcttccgcgaactgcaggaaatgcggttcgactgtgtggccgacctgcacgatgttctgcgcaccaaatacctgagcctgcgtttccgcatgaaccacatacccgttgtgcccataaaaaagggccgccgggcaaaaaaggagctcacgcggcgcaaaaacaagcggctcaagccgctcgaaacctcggtgcaacgatatgccgacgtgtttgcccgcttgggttacccgttcgaattcaatttcacctcaatcttcggcgaggaaaaaggcgacgtaggcacactggccgaactcgtagggtcgaaaaacgaagacgaatggataggcgtggcacccttcgcacagcataaaggaaagatatacccgcccgaactgacggaacgcgttgtttcgatactgtgcaaatacccccggcggcgaatattcatattcggcggcggagaggaagaaaaaaacatagccctggaatgggagaagcgttatccggcagtaacttccatgataggctacgggcgcatggaagacgagctcggggtgttgagccgcatggacgtggttctctcgatggactcggccaacatgcacctcgcctcgataacaggcgtgcccgtagtgtcgatatggggagccacacacccgtatgccggctttcagggatggggacaggaaccttcaaacttcatacaggccgacatggactgccgcccgtgctccgtgtatggcaacaagccatgcctgaggggcgattacgcctgccttacaagaataagccccgacaccgtggccgagaaaatcgaatcgataatagaaaaacgaaaactcactaacgcaaaatga

SEQ ID NO: 1249 - DNA, 909 bp, unclassified Prevotella
atgaattccagcgaaataacgcggctccttaacgacacggtggatttgctttcacaaacttctaccatgaaaggattgtgccgccgccaccgccatggcgaccccttgccttcggggcaggtgctggccgaagtaatcgacctttgccgcgcggtgcttttcccgggatattacggcaagtcggttgtgaatgccgacacggtgctttataccataggcgtaagcgtggaacgccttttctttttgctacgccaccagatagaagccggactgtgctttgaaaacgacgacgacagcgaccaggcgcatgccgacatgcacctgcgcgcacgcagcatggccgccgaactgatacgccgcctgccgggcatacgtgccgtgctgtcgaccgacgtggaagccgcatacctgggcgaccccgccgccgggagctttggcgaagtgataagctgctatccggtgataaaagcgctgaccaactaccgcgtggcgcacgagctttacctcataggcgtgccgctgctgccgcgcattctaaccgaaatggcacacagcgagacgggtatcgacatacatcccgccgcacagataggaaaacactttacaatcgaccacggcacgggcgtggtgataggagctaccagcataataggcgacaacgtgaagctataccagggcgttacgctcggagcacgcagcttcccgctcgacgagaacggcaaccctatcaaaaacataccgcgacaccctatactcgaggacgacgtgatagtctattcgaacgcctccatactgggacgcataaggataggcaaaggtgccgtaataggcggtaacatatgggttaccgaagacgtgccgcccggagcacgtatccaacaacacagaaactctcccaaacaaaattaa

SEQ ID NO: 1250 - DNA, 693 bp, unclassified Prevotella
atgcataaaagcaaactattcattcttgcggcaatcgcgcttgtaatggcagggttcaccttacagtcgtgcgaagatgaagacagctacggcgaacgccgggaacgcgagcgcaaagtaatacgttccttcatcaataaaggaactttaatcaaggctctcgactcggacgacactcttatatacgtcgcacctatcaaaaccatatccgaagcacagttcgaagcccaggattctactaccaacctgcaagaaaacgaatacgtgcttttcaaatcatcgggcgtgtacatgcagatagttcgcaagggagccggcgaaaaactgaagaacggcgaaaccgccacggtactggcaagatacaccgaggtgaacctgcggggcgactcgatacaaacgtcgaacgacaacctgtacagcgttgccatacccgacgtaatgaccgttacaaatacgcttggcacatttacggcctcgttcgtatcgggttcgatgtactcgtactgcggcggctccgtgccctcgggatggcttatacctttcagctatgtaaacataggccgccagtcatcgcccgatgaagaaatagcaaaggtacgtctcatcgtaccgagcaccgaaggccagcaagacgcaagcggaaacgtgtacgcatgtttctacgaaataacatttcagcgcggctacagataa

SEQ ID NO: 1251 - DNA, 1302 bp, Ruminococcus callidus
atggactatgatacgttcggcacagcgttggactctgtgctgattctggcggcggcgttgctgtgcggactgcacctgtggttttcggcggcaatggcatcggtgcagaagctgggcggacagatgagcacgctggcggaagaacacccgcccatgcagtactatctgaaacaaaagaaccggctgcggatcacggcagtggcggaggtgatctcgttcacggcactgctgacactggcggcgtacctgctgatttttgcaaagggctgggcacatcactggaacatctggctgacactgctgctgccggctggggtttcgctgacggcggcactgctgctggacggctgtgcgagaggactggggcgaaagcaggcggaactggtggcgggaaagtcactgggattggtgaagctggtggcagtgctgtcgctgccggtctacggtatctatgagggtatggactgccttgccggcggaaaacgtccggcaaaggaacgcgtgacagaggaagatattctgcatctggtcaacgccggcaacgaaaacggcgtgatcgaggagcagcagcgggaaatgattaacaatatctttgaatttgacgatattcccatttctgatgtcatgacgcaccggaaggaactggttgccattgacgtggaaatggcgattgccgatgtggtgaagctggcacaggacgagaaatattcccgcatgccggtgtatcaggacaacatcgacaatatcattggagtgctgaacgcaaaagacctgctggggctgatcgggcggcaggatatttccggatacggcgtgagatatttcatgcgggaggctcttttcgtgccggaaacggcgaagtgcgatgacgtgctttcggaaatgtcccgccaaaaggcacaaatggcgatcgttgtggacgagtacggcggcaccgcgggtgtggtctgcatggaggatattctggaagaaatcgtcggcaatattcaggacgaatacgacgaggaggaagccgaggtgcatcgggtgacggattcgctgtacctcatcaacggacatgctgatccggaggaaacgctgccgctattggggcacgagctgccggcggatatggaattcgacaccatgagcggttttgtggtggatctgctggggtatattccggaggcacgggaaaatccgtcggtacagtgggaaaatatccggtttacggtgctgaacatggaagaaaactggatctcgcgaatcaaggcggagattctgccggagcaaacggcggaagaacagccggaaaccaaataa

SEQ ID NO: 1252 - DNA, 1476 bp, Ruminococcus callidus
gtggaaaagatctgcccgaaattccaaggagaatctgtggtttccacttttccggagcctctattattactactatatattcttttctttgtattctgtcttttcgcagctccgctgcaaaaaacagcggatagcatgcgctgtacactgtggacggacagcaaaaaactgtccgtgatacagctgcaaaatcaagaaacgtggctgaactgcgtgatatttcctgtccgcgaagtggctgcaaaaggacaatcggaaagacctcggacaacacagatacaaaacggatacagcgttgtccgggacactcattccgaaccccattcaaaattgaccgatccattggatctgaataaaggaagacgacccatgataaaatttacttgtgaccgacaaacattctatactgccattacccatgtggcaaagggtgtttctcaaaaatccaccattccggcactggaacgcctgaagctgcggctggatcacgacaatctggaactgaccggctatgatctggaattcgggatccagcggagcattgaagtcgaatctgactgctccggcgaatttgtgatccttccccgtctgctgagtgaggctgtccgccggttctccggcgatatggtaaccatggaagtggatgacaactatgtggtaaaactgttctgtgatgccaccgagtttcagatctccgccatgtcctcggaggaatatccggctctgcccagtctggatctgaacgtcggcatgcagatcgaacagccggtattaaattccatgattcgccagacaagttatgcaacttctgtcagtgaggcgaaaccagtgctcaccggcgaattgtttgaagtggagggagatacccttcatgtggcagccattgacggctaccggctggcagtccggcaggaacccatttccagtgcggagaattaccgttttgtggttcccaaacggatgctgctggaagtggcaaacatgctccacgatgacgcagaggaactctgcaccatttctgcggaccggcggcacgtggtattcgaattcaacggctatacggtattctcccgcctgctggaaggcgagttccacaactaccgcagcagcattcctgccagctatgaaactgagatcaccgtggacaccagtgccctgacccgttgtctggaacgctgctccctgctgatcagcggcaagtacaacgcaccggttcgctgcacgtttgccaacggcagtcttggcgtgtggtgcaagaccggtattggtgagatcaacgacaaaattccggtggagatcagcggcaaagatgtcaccatcggctttgataaccgttttctgctggacgctgtccgtgcggcagactgcgataaggtaaaaatccagctgagcggcggcaatcgcgtggcaaaactggttccgccgcagggcgaaagcttcattttcctgctgatgccgatccagctgcggggataa

SEQ ID NO: 1253 - DNA, 1632 bp, Ruminococcus callidus
atggcaaaggatattaagtacaatgcagacgcaagaaacggactgatcgccggtatcgacaagctggcagacaccgtaaagatcacactgggaccgaagggcagaaacgtggttctggaccgcgaattcggtgctccgctggtaaccaatgacggcgtgacgatcgcaaaggacatcgaactggaagacccgtttgaaaacatgggtgcacagctggttcgcgaagttgctaccaagaccaatgatgctgctggtgacggcaccacaaccgcaaccgttctggcacaggcaatcattcacgaaggtgcaaagaacatcgctgccggtgcaaaccccatggtgctccgcaagggtatcgcaaaggcagtgaacactgcggtaaaggtcattcaggaaaattccaaggtcgttaacggcacagaggatattgcaagagttgctaccatttcttccgcagatgaaaatgtcggcaagctgatcgcagaggcaatggaaaaggtttctaccgacggcgttatcaccattgaagaaggcaagactgcggaaacctacagcgaagtcgtagaaggcatgcagttcgaccgcggttacatgtccccgtacatgattactgaccgtgagaagatgaaggtcgtttatgatgatgctctggtattcatcaccgataagaccatcagcaacattcaggacattctgccgatgctggaacagatcgtcaagatgggcaagaagctgctgatcattgcagaggacatcgagggtgaggctctgaccactattatcctgaacaacctccgcggtacctttaagtgtgcagctgtcaaggctccgggcttcggcgacagaagaaaggaaatgctgcaggatattgcgatcctgaccggcggtactgttctgtcttctgatctgggcatggaactggctgatgcaaacattgagatgctgggtaaggttagtcaggcagtgatcgacaaggaaaacaccattctggtcggcggtgcaggcacttcggaagcaatcgaggagagaatcgcagagatcaagaaccagatcgctgcttccacttctgatttcgacaaggaaaagatgcaggaacgtatcggtaagctgtccggcggtgtagcagtcatcaaggtcggtgctgcaacagaagttgaaatgaaggaaaagaagctgcggatcgaagacgctctgtctgcaaccaaggcagctgtagaagaaggcatcgttgccggcggcggtactgcactgatcaatgcaattccggcagtagaaaagctggttccgtctttggacggcgatgaaaagaccggtgcaaagatcgtactccgtgcactggaagctccgcttcgtcagatcgctgcaaatgctggtctggaaggcagcatcatcgtggataagattcgccgcagccgcaaggttggctatggcttcgatgcatacaacgaaacctattgcgatatgatgagcaatggtatcgtagacccgaccaaggtcaccagaagtgctctgcagaacgctgcatcgatcgcttctatggttctgactaccgagagtgccgttgcaaacattccgaaggaagaaccggcagcagcagctccggcagcaggcggcatgggcggtatgtactaa

SEQ ID NO: 1254 - DNA, 2055 bp, Ruminococcus callidus
atgcaatccacacagaaaaccactgcaaatgattttccactgtatttattccatcaggggaaaaattttgaagcacataaattctttggtgcacacccgttccgacgaggcagaggacagttctatcgtttccgcgtctgggcacctcacgccaagagtgtatctgtcatcggttcattcaaccaatgggatcgcacctgtcacccgatgtacaagatctctgacacggtatgggaggcagagctgccccgactgaaacaatttgacagttataaatacagcatcgaaactgaagacggtcagattctggacaaagctgacccctatgccgctcactatgagcgacggccgggaacggcttccaagctgttcgaaagcagctatgtctgggaggaccgcgactggcagctggaaaagaaaaaacacgtcccctacaaaagccccatgaacatctacgaggtgaacatttcttcgtggaagcacaaaccggaggaaaagttccccagctatatcggcttcgcagaggagatcattccctatctgaaaaagatgtcctacacccacattgaatttatgccgctgacggaatacccgttcgacggctcgtgggggtatcaggtcaccggctatttcgcaccgacctcccgacacggcacaccggacgacttccggaaaatgatagacatgtttcatcaggcaggcatcggtgtcattctggactgggtgccggcacacttcccgaaggatcctatggggctctgcgagttcgacggtacatactgctatgaatatgccgaccccctgaaaatggaacacaagggctggggcaccagagtatttgactatggaaaaggcgaagtctgctcgttcctgatctccagtgcctgctgctggctggaagattttcatctggacggtctgcgggtagatgcggtagcatcgatgctctatctggactacgaccgaccggacggcgaatggcggcccaacgtctacggcggacacgaaaatctggaagcggtagactttttgcggcacctgaacgaagccgcctttgcacggaatccggacattctgatgatcgcagaagaatccacggcatggccgatggtgacgaagcccacggatatgggcggtctgggattcaacttcaaatggaatatgggctggatgaacgatatgctcagctatatctcattagacccgatctatcgggcgttcaaccacgacaagctgacattctcgttcttctactgtttctcggaaaactacattctcccgatctcccatgacgagatcgtctatggaaaatgctccatgctccagaaaatgagcgggcagaacgaggaagaaaaatttgcctcttaccgtgcgtttctgggctatatgatggctcaccccggcaagaagctgctctttatgggacaggaattcgctcagaaaaacgagtggaattatgaaactcaactggattgggagctgctggaacagccggctcacaaacaaatggaacagttctcacaggatctgaacaagttctatctggaacaccctgcactgtggcaggacgatgactcgtggcagggattcagctggatctcccacgacgactaccagcaaagcgtcattgcattccgccgcatcgacgacgacggaaaagagatcattgcgatctgcaacttctgtccggtacagcggaacgattacaaaatcggcgttcccaaagagggcaggtatcaaactgtattcaacacggatgcggcagtctacggcggcagcggcatcaccgaaaagaaattcgaaaccctgccgatttccatgcacggctttgagcagtgcatttctatgacactggctcccctgtctgtactgtatctggaatatgcaccagtgaaaaaacgggcaccgcgaaaaaccactgcggcgaaaagtaccacaacgaaaaaagcagccgtaaaaccgaaaaaagccgtgatccgcacagaaagtgcagcaaaaccgacggcatcggtttccgcccgtaaaaagaaagccacaaagtcagaaagtgtgtaa

SEQ ID NO: 1255 - DNA, 684 bp, Ruminococcus callidus
atggaaaagaagcaaaaaaataagtggctgtcctttctggcggacggtatgctgtccggtctgatgatcggcatcggctgtgtcgtcagcatgtcctgtgaaaaccgctatctgggggcatttctgttctcgctgggactgttctgcattgtgcagttccagtatggactgtacaccggcaaggtgggatacattttcgaccgtgacaaggcgtatctgggcgaaacgttcttcacctttttggcgaatgcgatcggtgccggcctgactgccggcatcgtgcacctgacacggttcgcaacggaaaccaaggtaaacggcatggacgtgacactgatggatcgtgcacaggcaaccatgtccgccaagttggacgacagcttgcttagctcttttgtgctggcgttcttctgcggcattctgatgttctccgctgtagaaggctcccgccgctgcaacgaaaagaagaacttcatcggcggcgtgttcattgtggtaatgccgatcatggtattcattctgtccggcttcaaccactgcgtggcagatgcgttctattactgcatggctggctgcccgaacccgcttcgtgcactgtgttatttcccggttgcaattctgggaaatctgtgcggtggtgtgtgcattccgttgctgaagcggctctcccgcaatcctctttga

SEQ ID NO: 1256 - DNA, 1134 bp, Ruminococcus callidus
atgccggataattttgaaaaaaaaggtggaactgtaacaatgaaattaggtatggtcgggctgcccaatgtgggaaaaagcacgctgttcaatgctctgacaaatgccggagcagaatccgcaaactatccgttctgcaccattgaaaaaaatgtgggtatcgtttctgtgccggacgctcgtctggacaagctggcagaaatgtatgaaccggacaagttcacaccggcaacgctggaatttgtagacattgctggtctggtaaagggtgcctccaagggcgaaggtctgggcaacaagtttctgggcgacatccgcgaagtcgatgccattgtacacgtggttcgttgcttcgaggacgacaacattattcacgtagacggcagaatcaatccggcttccgacatcgaaaccatcaatctggaactgatcttctccgatatggaaatggtagcacgccgcattgaccgcaccaagaaagccctcaagggtgacaagaaattacaggtacaggtggactttctggagcgtttgcaggcacatctggaagaaggcaagtctgcccgcggttttgatttcaccgaggacgagttgagctggatccacgacatgcccctgttgtccgcaaagccggtcatctacgctgccaacatgagcgaagaagatttccgcaacggcgtggacaagaacgaacattatcaggaagtcaaggcaatcgccgaagccgaacatgccgcagtgctgccgatctgtgccaagatcgaagaagacattgccgacatggaagcagacgacaaggcaatgtttctggaagatctggggctggaagaatctggtctgaaccgtatcattcgggagggctattccctgctgggactgatctcctacctcactgccggcaagcaggaagtccgtgcgtggaccattaccaagggcacaaaggctccgcaggctgccggaaaaatccacacggatttcgaaaagggctttatccgtgcggaagtcgtttcctatgatgacctcatggcatgcggttctatggcggctgccaaggaaaaaggactggttcgtctggaaggcaaggactatgtcatgcaggacggcgacattgtgctgttccggtttaacgtataa

SEQ ID NO: 1257 - DNA, 1266 bp, Ruminococcus callidus
atgaaacataccaaaatcgtgctgctgactgcggcagtcgtcatgatgacacaggcactgggactgtcggctgcggcagaggaagaaacctctgcccagagcggcgaagaaagcgtgatcgacgcagacagcttatccagcgatgagagcagcaaagaaacgctgaccagcggggattattcctatacgctggacggtgacaacgccaccattaccaagtataacggcagcgaaactgccgttacgataccggacaagctggacgggcacaccgttaccacactgggcagcggcacatttgccaccaaggatatgatcacttcgatcaccattccggcaacggttgacacaatcaacagttcctgcttctacggctgcaccgtgctggaacaggtgtcgctggcagagggcaacacggcgtttacggtgacggacggcgtactgttttccgcaaacggagaagatctgatcgtctatccgcaggcaatggagggcacgtcctataccattccggacactgtcagagagatctggacctctgctttttccaataccaagctgactgacgtgacatttccggacggactgctgtacattgacgactgggcatttgcctcctcggcactgacttctctggatctgccggatactgtcacagaaatcggacagtacgcctttgcatactgcactggcatttcggaaatcgacatgccgaaaaatctggaactgattcaggcggcagcctttgccggcgaaaccagtctgaccaaggtgacattttatgacagcctgacggatattcaaatggcagcctttgccggcaccggtctgaaagaagtgaccattccggaaagcgtttccaccattggattctgtgcattcggctatgaagacgatatggtgaccaaggtacaggacttcgtgatctacggcaaggtcggttcacaggcagaggcatactgcaccgcagaggactctgaaaacgactattccaacaacttcaaattccgcagcgtgatgtccgaggaagtttcggatacggagaatacggctgttgctgttgaggaaaccgaaagcggctggcagaaatacggcaagtggatcctgctgggagccggtgcactggtactgctcatcggcggcggagtgctgatctttgctggcggcggaaagcagaagaaatccggcaaggcagccaaaaaggatacccagtctgtggaaagtaaagaagagccggaagcggcagaccatgaggataccaaatga

SEQ ID NO: 1258 - DNA, 1437 bp, Ruminococcus callidus
atgaaacgacaactcattatcgggctgattctggttctgctgatcggtgtgtgcttcagtgcctatttcggcgtggactactaccagacccaaaaagaggaaaaggctgcagaagaagcggcagctctccagctgagttcctttgattccgatgcagtaacaaagctggtgatccatacaccggaactggattacaccattgacaaggacgacaacagccagtggcaggttgccgagggggatgcgatgcacatcaatacctattatattgatgccctctgcacctacggctgttctctgacagcgaccaaggatctgggaactgcggacagcgacaagctgaaaacctacgggctgtccgatccgatttcgatcacctactacaccagtgatgcagacaagccggaaaagaccctgtacatcggcggtcagaatcccaccaagtccagcttctatgtgatgcaggacgatgacgaccatgtgtatctggcagatgccaacaccgccggttatctctatgtcaccaaaacgcagatgcgttaccgctatctcatggacgacaagagttctgacattctcaagctgaccttacagcggaacggcgaaacggtctatacctttgaggacacttccggaaactctgactacaaactgacagaaccgctggaaacgccgattgcggtcaacaacgccaacctctctaccctgttcacccagcttaccgaactggaagctgatgatttcggggacagcgatgtgaccgaggacaagtatgccgagtacggattcgacaagccggcatacatgttccagtttacacaggcgaccggagaagtcaccaccctgctggtgcaggatttcgatccgctgacatcttcttatgtagactgtctgcacaaggaaaccaacgagatcctgaaactggactccagctatctgggattcctgcaaaaaaatgcttcagattacatggacgacaccgtctgctatttcagcatcagtgaggtttccgcactgaccatgcagtatcacggttctttcaatgacaagaccatagacatcgacgacagcttcacatttgacgatgccagcaccacctacagctgcaacggaaaaagcttcaacagcgacgacacggaactgaccgaggcgttcaagaccttctacaccgcactgtccgagatctcctacgaatcgctggacacttctgcacaggctccgacagataccgagccggctctccacttggagtataccatgctggacggcagcacccatgtggtagaccttgtgaaaaaggacgacaccacctattgggtattcattgacggagaattcacccacgccgttgtgcggcagcgtgccttgagtggtgaagacaaggtgctggaaacctacactgcattccagaagcttctggaatctgctgcggcgtaa

SEQ ID NO: 1259 - DNA, 1428 bp, Ruminococcus callidus
ttattcggaggtatcaaaactatgttcaaatggaaaaaggctgccgctgctctggcggctgccgcaatgactgttgccggtgcaggctgcactgtcggcagcggctctgcgtatgcaatgacaatcgacggcgagcagatcaatgcaggtatctatatctactattcctatgcatcgtacatggaactgacacaggccttgcagtcccagaattcggaactggacgtaaaggacgacaatgtcgtaaaagaacagaaaatggacggtgtcagctcggaagaatggatcaagaacaaggcactggaatattgccagcggtatgtggcaattgaaaagaagttcgacgaactggatctgtccctgacagaagaagagtccaaagacgtggagagcaccattgattctttctgggataccaatggcgagacctacgagaaaaacggcatttccaagaattctgtcaagagcgttctggaaaatacgtatatgaccaacgaagtattcctctattattacggcgttgacggcgaagaaggcactaccgaggacgatctgaagcagtactatgaggaaaacaatgcccgtgtccgctacatcaagtttgatctgacagatggaaagggcgaggctctggatgatgccggcaagaaggaaatgaaggcaaaggtcgaggactatctgggcgagatcaacgcactcaagggcgatgaggacgcaatggaggacgaaatggacaacgtgcagagcgactataacgcttatgtgacttccatttccgaggaagctgccgcagcaacagctacttctgcaactgatgcggacggcaacgagatcgctgcaacaacagaagcaactactgtcgctgctgaaactaccacagaaactaccgcagccgcagaggaaagtgctgctacagaaactgccggtgcagaagaagctgcggaaaccactgcggcagaagaatctgcttcggaagaaactaccacgacagaagcagctgtggaaaccgatgaaaacggctctgaagtgactaccaccacgactgctccctatgcaaatgaacagatcattgcaaaggtgactacaaaagagaacaccaaggaagaagatgtgacttatagtccgtgcaagaatgtatacgactatgtattcggcgacggacagaagaactatggcgtggcaactgtggtagaagatgacacggcttactatatcgtaatgtgccgtgacatcaaggagcgtatgacagaggacgacctgtggacagaaacacagcagaatactgtgatctctcaggcatatagtgatgcgtttgaggatatgctggacggctggactggcgagcagaaggttgagaagaacgacagtgcgatcaagaagtacgatgcgttcaagatcgacatggacagcagcagtcagacggcataa

SEQ ID NO: 1260 - DNA, 1029 bp, Ruminococcus callidus
atggcgtgcaaagccgtcaggcgggctttgtgcggtgttgcccttggtttttatattgttgtctatatcattattctggaaaaggagttacgcgttatgtctaagatttatcaaggtgcagtagaactgattggaaacaccccgctggtggaagtcaccaatctggaaaagaaacaggaactgaaagcccgtgtgctggtgaagctggaatatctcaatccggcaggcagcgtcaaggatcgtatcgcaaaggcaatgctggaagatgcagagcagaaaggcaagctgaaagaaggctctgtgattattgagccaacttcggggaatactggtatcggactggctgctattgctgcatcaaaggggtatcgtgtgatcctcaccatgccggaaaccatgagtgtggaacgccggaacattctgaaagcatacggtgcggagatcgtgctgacacaaggcgtaaagggcatgaagggtgccattgaacgtgccaaggaactggcggcagaaattcccaacagctttattccgggacagttcgaaaaccctgccaatccggaagcacaccgcaagacgaccggtccggagatctggcgggatacggacggcaaggtggacttctttgttgccggtgtcggcaccggcggtactgtcagcggtaccggcgaatatctgaagtcccagaatccggatgtgaaaatcgttgccgtagaaccggcagattctccggtgctcgccggcggaaagcccggtccgcacaagattcagggtatcggtgccggatttgtgcctcagaccctgaacaccaaaatctatgatgacattttcgaagtacagaacgatgatgcgtttgcagcagcaaagctgatcgcgaagcatgagggcattctggtaggcatttcctccggtgcagcactccacgccgcactggaactggcgaagaagccggaaaatgccggaaagacgatcgtggctctgctgccggacagcggcgaccggtattattccaccaccctgttcgcagactaa

SEQ ID NO: 1261 - DNA, 897 bp, Ruminococcus callidus
atgggcaacatgcgtgagatccgtgaccggatcaagagcatcaacgacattatgaaaatcaccaatgccatgtatctgatctcctcctccaagctgaaaaaggcgaaaaaggatctggcggcaacacagccctatttcaataagctgctgtatgctatgcggagtatcctttcccgtgcaccggaggacatcgatatgcggtatttcgatcaacgggaggagatcaagcccgaagaccggaaggtgggctatattgtcatcactgcggacaaaggcatgtgcggctcctataaccacaatatcatcaagctgacagagcagaaaatggcggcacacaagcaaagtcacctgtacgtcatgggacaggtgggaagaatgtacttccagcggcgtgcccgtgccggagaactggacgtggatacagagtttatctataccacccagaaccctacgctctatcgttcccgccgcattgcggagcaaatgctgaaagcgtttgacgagggaaagctggacgatgtgtatattatctataccgatatggtttcgtccattgcctttgaaccgaaaattttgcagctgcttccgctggatgcagaacactttgtacagagtgcgggcgagatcaccaagcaccatgaggcagtgttctcccccagcccgaatatcgttatggagcatctgactccgaactttatgaagggcatgatctatggtgccatggtcgattcgttctgtagtgaacagcaggcgagaatgtctgccatggactctgcaaccaccagtgcgaaggatatgttacaggatctgtcgctgcaatataaccgtgcaagacaggcggcaatcacgcaggagatcacagagatcgtcagcggtgcaaattccgccgaattgtga

SEQ ID NO: 1262 - DNA, 1257 bp, Ruminococcus callidus
atgaagaaatacgacccgtttgaaaatgtgcagacggtaatggaacaggcggcgatactgggaaagatcgaccgcagaatgtttgagatcatcaagaatccccagcgggaaacgaaggtgtatcttcccgtagaaatggacgacggcagcattcgggtgttcgagggctatcgtgtgcagcactccaatatccgcggcccgttcaagggtggtatccgttaccaccagaactgcgacctgaacgagatcaaggcacttgccacatggatgtccctgaaatgtgctgtggcgaatattccttacggcggtgcaaaaggcggcattcaggtggatcccagtaccttgtccaagcgggaactctgccgtctgacacggcggtatacttacgccattgaaccgctgatcggagcggacaaggatattcccgcaccggacgtaaacaccaatgcccagactatggcgtgggtgctggatacttacagcatgctccacggaaaaccatgtccgggcgtagtgaccggaaagcctgtggaactgggcggttccagaggacgtgcttccgccaccggcagaggcgtggtcattgccacccagctggttctgaagaccaacggcgtggattcactggacggcgtaaaagttgccgtgcagggtatgggtaatgttggagccaacgcggcacgaattttctgccaccgcaacgcctgcgttgtggcactcagcgatgtgtccggtggcatttactgcgaatccggattagatgccgatgcggtttccgcgtttctggaagaggggcacctgctgaaagactatcaggcagagggcgtttctcatatttccaacacggaactgctgacttgtgactgtgatgtgctggtgccggcggctctggaaaaccagatcaacgccgaagttgcagaacaacttcgctgccggtacatcgtagagggtgccaacggtcctaccactgtggaagcagatgcgattctggaacagcgtggcattactctgattccggatattttcgccaacagcggcggcgtgatcgtgtcctatttcgaatgggtgcagaatatccaggaactgacgtgggaacgctcacaggtcaacgagatgctggaaaaactgatgacggcttctttcggcgaactgctggaagaacgaaaaaagacggcatgttcttatcgtatggcagcttatatcgtagcactgcggcggctgctgtacgccgaggacatcaagggactgttcccataa

SEQ ID NO: 1263 - DNA, 1230 bp, Ruminococcus callidus
atgcacaaaccacacgatgtgaggccctttgctttgcatcgtgttgtgtttatgggcacatggatcaaaaaggagaatgataaaatgaaaaaggcaatctcgattctcggatcgacaggttctatcggaacacagtctttggaagttgccagatcccacgaaatgcagatttacgcattggctgccaatcgaaatgttgatgcattggaacagcaagcacgggagtttctcccgaaaaaggtctgcatcttcgaaactgaaaaatacgcagaactaaaacagcgtctggcagatttgccagtacaggtgctctgcggtatggagggactatgtgacattgcatcagataaaaatgcagatattctcatcaattctgtggtaggcatggtcgggctgctgccaacactgaccgcgatttctgccggtttggacattgcattggcaaataaggaaacgctggttgccggcggttctctggttatggaacaggcagcaaaaaaaggcgttcgaatttatccggtagacagcgaacattctgccattttccaatgtttacagggcaatcggcgggaacagctgcacaaaatcattctgacggcttccggcggaccgttcttcggaaaaactcgtcaggaactggagcatgtcactgtagcagatgccttaaatcacccgaactggagcatgggcaataaaattaccattgactctgcaacactgatgaataagggactagaattcattgaagctaagtggctctttgacctgacaccggaacagattgaaattgttgtacaccggcagagtgtggtgcattccgcagtcgaatatcaggattgttcagtcattgcacaaatgggcgtgccggatatgaaaattccaattcagtatgcactattgtatccggaacggctgccttgtccaacaaaacatctgtcactgactgattacggaacattgacttttgaaaaaccggatatggaaacattctcctgtctgaaaacggcaattgcagcaattacaaccggtggcacagcaccttgtattgtaaacggggcaaatgaggtagcagttgctgcattcctgtccggaaaaattcgttttctggacatcggtgcattggcacaaaaggcaatggaaatgattccggcaaccaagatagaaacctatgaggatgttatgcgggctgacacaaaggctcgggaatttgtacgaaatactatcgcataa

SEQ ID NO: 1264 - DNA, 1737 bp, Ruminococcus callidus
atgacatacagcaatgactttttggaacaaattcgggcagcatgccccatggaaacgattgccggcaactacgtcaatctgatccggcggggcagacactatgtttgcaactgtccgtttcactctgaaaaatcaccgtcctgtaccatttttccggaaacccagagtttctactgcttcggctgcggggctggcggcgatgtcattacgtgggttcgccgcatggacaatctggaatttaccgatgcagtcaagcagctggcggaacgatgcggtctgcaagtgcctactgatcgggaggcagaccgccgtgcgtatctccgcacccgcgtgttcgcagtcaatcgggaaactgcaaatttctatttccggaatctcatttccggcagcgacaaacgcgggctgcaatatttcatttcccgccagctgaaaccggaaactataaaaaaatacggactgggctacgcttcagacagctggaatgccctgaccgactacctgctgcaaaagggattcacagaggaagaactgcttctggcaaatgtggcacatcgttctaacaaaggaaatctgtatgatgcctttcgcggacgtgtgatgttccccattgtggatacgcggggagctgtgatcggcttcggcggcagagtgctggacgacagccagccaaagtatctgaacacggcaaaaacaccggtgttcgacaagggcagcaatctgttctccctcaatttcgccaaggacagttcttccacgatcatgattctggcggaaggatatatggacgtgatcgcgatcaaccaagccggcttttccaatgtggtggcgacgctgggaacggcgatcacgccggaacacgcccgaaagctctccagatttgccaaggaagtggtcatcgcctacgacagcgacggccccggacagcaggcaacccagaaggcgatcaaccggctcagtgaggtgggaattgccacccgcattctccacatgaccggtgcaaaagatccggacgaatacatcaaaaaatacggctcagagcgtttccggctgctgctggaaaacgctggtgatgccattaacttccggctggaccggtgcaaagagggattagaccccgacacggaagccggaaaagtacagcttctgaaacgggtggtatctgtactggcggaaattcagaacccgctggaacgggaggtatacctctcccgcacggcgaataagtgggagatctccgcagaagttctgcatcagcaggtggaacgcactatacgcagcaaaaagaagctggcttctacgcaggcgtggaaagatattattgaacacaccgtccgaccggaaccgcagcagccgcagtctgcaattccgctgcgggagtacaaggcggaggaacgcattctctgctacgtgctgaaccgaccggacgagtcggcatgggtcatagaacagatccagccggatgcgttccctacaccgctgtaccggcaggtgcttgaggcatttgctgacagcgtaaagcggcaaaccggcttttccctttcagcaatgggcgatgtgctctccgacagtgaaatgggaaagctcagcggcatttctgcccgcaatcaggagatccctgtgacagcagaagaagtcaaggactgcattcgtactctgaaaaacgatatgccgtctgcaatcgaaactgatgaagacttattaaaactgattcagaaaaagcagcaccctgacgggtaa

SEQ ID NO: 1265 - DNA, 1440 bp, Ruminococcus callidus
atgccacacaatcatctacaggacgcactggcgtacttgcatacgctgtacgctacatatgaagcacagggcatcacgatcaccggcagccgcatgccgctgacacaatacgccaactttgccgcaatgaaatatctgctgtttctggcaaatcaggaccgtgtcatcaccgatgcagaaaccaattttatcaacaactgtctgcaacagtctgccacgacacagacaatggaacgctttttgcagcagttctccatttccttttccggtgcggcagattctttactggcactgctggcggcactggtgcgtgtcgatttgcagggcagcggcgtaaagggcagcatttccctgctctggctggaaaccattgcacaaatgggaacgcagttttcgctgaatactgccggaaaaatagaaccacagcagcagatcgtgcagaactccatgatgcagcagctttcccgttatcgagatgccgccatgcgtggctgtcgtcgtccggaactggaaaaggctgctgtcattccggcgaatttcaatgccgaaaagacgccgattccggctgaaaaagaagcggtcgtcgatgatgctgaaattacagaagctcctacggaaacgctggacgaactgctggcacagctgcaccagctggtagggctgcaaaacgtcaaagacgagttggaaagtctgattcacctgctcaggattcgaacgatccggcaggagcgagggctgcccctgccgcagacttccctgcacatggtcttttccggcaatcccggaaccggcaaaaccacagttgcacggctgctgtctaaaatctatgcccgactgggtgtcctgaaaaaagggcatctgatagaagctgatcgtgcgacgctggtcagcggctatgtgggacagacagcaatcaaaaccaagaaggtcgtggaaaaagcaatgggcggcgtgctgttcattgacgaggcgtacacgctgaccagttccggcggcagcaacgacttcggcacagaggcagtcaacaccctgctcaaagaaatggaagatcatcgggacgatttgatcgttatcgttgccggctatccggaggaaatggaacagtttctggacaccaatccggggctgcgttcccgcttccggcaggtgatctttttcgatgactataagccggaagaactgatgctcatcttctctaacctatgcgacagctactgtctgaaaatgccgacagacacctatgcctatgtacaggaatatttccggaaacgctgtgcagaagcaggaaaaggatttgccaatgccagagatgtccggaactttttcgaatttgccctgaccaatcaggcagaccggctggcaaaactgccggagccgctttcggacgaagaactgctgacattgctgccggaagatgtacagagcattccggttgcttaa

SEQ ID NO: 1266 - DNA, 732 bp, Ruminococcus callidus
atgttttcactatataaaaaggaattacagagttactttctgtcgccgatcgcgtactttgtcatcgcgttctttatggcgacattctccctgacgttcattcaggagatcggtaatgtttcttcatctacctatacgttttcgttctcctcgatcttttacgtcaacatcttctatttcatcttcctgctgccgctgctgaccatgcggacattctccgaggaacgcaaaaacggcacggaaaccttgctgctttccagcccgctgaacgtcacgcagatcgtcatggcaaagtttctcgccacggcgaccattctgctgatcatgctggcggcttccctgttctatccgatcatcacctccatttatggccgtgttatctggtccagcctgatctgtacctatatcggcttcttcctgtttggtctggtgtgcatcgccctgggcatcttcatctcctctctgacagaaatgcccctgctggcgatcctgctgagcgaacttgctatgctgatgctgatcctgatggacaacctgagtgtcaactctttcctctccggcattccggtgctctctgatgtattgagctggttctcgaaccaaaccaaattctatgtattctcccaaggtctgatgcagttctccgacttgctgggatatgtaacggaaatcgcggtattcctgatctggactatcatttccattgaaaaaagacgctggagccggaggtaa

SEQ ID NO: 1267 - DNA, 1461 bp, Ruminococcus callidus
atggaaaacatggaaaacaattttgacgtgatcattgccggttgcggtgctgccggactgtacggtgccatcaatctgccgtcagactgccggatcctgctgctgtgcaaacaggaactgaccctgtgcaactctgcactggctcagggcgggatcgccggtgtgtacaagtcgccggaggattccattgaactgcacgagcatgacaccatggttgccggcgggtttaccaacaatccggaaacggtgcacattctgaccacacatgccgcacacgagattcaggcgattctggatttcggcgtggactttgaccggacaccggacggcgaactccaccggacactggagggcggtcacagccgccaccgcattttccaccacaaagatgccaccggtgcggagatcctggacaagctgatcaaaaaggtaaagaccctgcccaatgtgaccattctggaacacgccatgatgacgggcatgcaaaagaccgacaccggcttttctgtcaatgtgatgcagggcggatcctgcactgtgtacagcagccactttatgatactggctaccggcggcatcggacgggtctaccggttcaccaccaattccaagatcgctaccggcgacggcattgcatttgcctatgaaaacggtgcggagatccggaacctgcatctgatccagttccaccccacagcattcaacgaccaccacaccagagagtgcttcctgatctcggaggctgtccgcggcgagggggcatatctgctgaactgcaacaaggaacgcttcatggaccggtatgacgaacggctggagctggctccccgtgatgtggtttcccatgccattattctggaaagccgcagaacccattccgacaacttctatctggacatttcctataaggactcggagttcatcaagaaccggttccccatgatctacgaaaaggttctggaacagggctacgacatgaccaaggagccgattccgatcttcccctgccagcactacctcatgggcggcattcaggtggacgacaattccgaaaccacagttcccaatctgtacgctgccggcgaatgctcccataccggcgtacacggcaacaaccgtcttgccagcaattctctgctggaggctctggtgttctccagacaggcggcactggacattgccaagaagctgccggacgctcccaagacctttaccgccgcagaatttcccaccaagccgaacccgcagaagattccgaaaggactgcgtaccgaaattcggcagatcatgcaggacaactattttgttattcccaacaaggaaaagctgccggagggattccggagaatcaccgagatccgcgaccagctgctgaacggcaactatattgtagatgccgactatgtagaagcaaagtcgctggcaacggtggcatatattattctgaaagaagtactttaa

SEQ ID NO: 1268 - DNA, 1383 bp, Ruminococcus callidus
atgaacatggagtatcgcattgaacacgattcgatgggcgaagtaaaggtgcccgccgataagtactgggcagcacagacagaacgcagccacgagaactttctgatcggtgtgggcattgaaaccatgccccgcgagatcacacacgctttcggtatcctgaaaaaggctgccgctatggcaaaccacaagctccgtccggagcgtatgacagaggagaagctttctgcaatctccactgcctgtgacgaagtgatctccggcagcctgaacgagcattttccgctggttgtatggcagacgggcagcggcacacagtccaacatgaacgccaacgaagttatcgcaaaccgcggtaatgaagttgccggaaagaagatcctgcacccgaatgacgatgtcaatatgagtcagtcttctaacgacacattccccactgcaatgcatatctctgctgttctggctgtagaggataaggtactgccggcaattgacgaattggtggctaccttccgccgtctggaagaagaacacaagggcattgtaaaaagcggcagaacccacctgcaggatgcaacaccgatccagttctcgcaggagatcagcggctggcgtacttctctcgagcgtgatcgcgagatgctcgtttctgcgttgccgtacctgaagacactggcactgggcggcaccgcagttggtaccggtctgaatgcaccggagggctttgatgtagaagttgccaaggcagtttctgaactgaccggcaaggacttcgtcaccgcttccaacaaattccacgcactgaccagcaaggatgagatcgtatttgcacacggtgccctgaaggctctggctgcggatatgatgaagatcgccaacgacgttcgctggctggcaagcggtccgagagatggtctgggtgaaatcaccattccggaaaacgaaccgggttcttccatcatgccgggcaaggtcaatccgacacagtgcgaacaggcaacgatggttgctgttcaggtaatgggcaacgacgtggcagtcggcatggcagcttctcagggtaactttgagctgaacgtatttatgccggtttgtgcgtataacttcctgcagtctgcacgtctgctggcagagtccattgtctccttcaataagaactgtgcagtgggcatctgtgcaaaccgcgaaaagatgcaccataacctgcacaattctctgatgctggtaaccgcactgaacccctacatcggttatgagaatgctgcaaaaactgcaaagaaggcgttccatgacaacatctcgctgaaggaagcctgcgtagagctgggattcctgacagctgaacggttcgacgaagtattccatcccgaggagatggcgtga

SEQ ID NO: 1269 - DNA, 3642 bp, Ruminococcus callidus
atggattggacagaacagcaaaaagaagcaatcacccgacgggacagcggtctgatcgtttccgcggcagcgggcagcggaaaaacatcggtgctggtggaacgtctgctgcggattctgatggacgaatcaccggagaacaaagttcccgcagatcatatgatcgtggtaacattcaccaatgatgcggcagcagaaatgcgttcccgtctgtatcaggcactggatcagaaattgcaggaacagccggaaaatacgtggctgtaccagcagcagatccgcctgcaaaacgcccatatctgcacgatcagttctttctgctttgaactgattcgggaaaatctgggcgatcagggaatcaccgcaggctttcgcatcttgagtgaaaccgaaagcaaaatgatgacttccaaagcggcggacgtggtactgaaccagtggcacacagaccgtgcagaagatatgcagctgttgtggaacagcttctgtgaaaaagacgacaccgatctggaaaggctgctgctggaactgcacaagtttctgggcacagtaccgttccgtgaaaactgggtacagcaggtgcagcaggaactgcaaaagccgctggaggattctacctattatcagatgctgtcggcaggcatggaacaaaatctgcaaatgattctgtggctggcaaatgaagcggcagatactgcctcggaactctacgaatctgttacggataacaaggcgttggcgtggatcgaagcagacgtgcacatgctggagcagacgctccgcatgatgcagcagcaggaatcagatgcagaaaaactgctggaaccttacgcaaagctgaaacaggaacggacagggaaaagattttccagcagcaaaaagggcttgctgaacgaagaagcccttgcacgtgccaaatcactccgcgaaatgtataaaggcatgatagaagatgtggcgttgcagatagaaaccatttacccttatacggcggaagatctggcacagacggcacagctgatgccgctgctgctggaactggaagagcagatttccgcggaaatctggaaagagaaagtgcggcagaatgccttgtcctttgacgatgcggaacgcatggcactggaacttctcgcagtgccgcaaaaagacggcagaatttttccgtccccgctggcagaggagttgcaggcatactatcagctgatcatgatcgatgaatatcaggattccaacaacaagcaggacgatattttcaagctgctctcccgcaattgcattgaaccccagaccggagctctgcgttacggggaaaacgtttttctggtaggtgatgtcaaacagtcgatctatcggttccgcctggcaaatccgcagaacttcagtgatgccattgcctctgccggaaagccggacagcgtgtgcaatcccattgtgctgaaccagaatttccgaagcgttcctgcgattctgaactttgtcaacttcgtctgcggcaacctgatgacgggatcctgcggcgatgtgacctataacgaagcggaggcattgtatgccggctctgccatttccgagatcctgccgaaagagcagcagaaagtctgcgtggcagttctggaaccggataatgaatacgatgcagaaatgacctatgtcgttcggaaaatccggcagatgattgcagaaaatgcaccggtggtgcaaaaggacggcacaactcgcccctgtcagtatcgggatttctgcgtgcttctgcgaaataatgatacctgtgcggcatatgcccacgctctggaagaagccggcattccggtgcagagcccggaggaaaagggctatctgaaagcacgggagatcagcattctgatcgacatgcttcgtgtgctggacaatcccacactggatacgccgctggcggcagtgatgctctctcccatgttctggtttacgccggaagaactgatgcagattcgtatgcttgccaaaaagtccaagctgtttcacgcggtgcagatcgccattggcgtggcagaagagtccgcatcggaaaagctggattcagtattggtggagaagtgccggcatctgtatgacaccgtacaaaagctgcggcaggactccggcatgatgacgctggaatctctgattcggcgaatctatgacaccacggatttcctgtctgtaatgcagctggcaaaagacggggaacgaaagcgggcaaatctgcgtctgctgctgcaatacgccaagcagtatgaggagaacaccgacgcatttcacggcagcgtgtccggtttcctgcggtatattgactggctgctggaaaataacgatgactttcagcagtcgtccgtttccgccggtgcggaaaacgctgtggcggtaaagaccatgcacggctccaaaggactggaatatccctttgtattcctcggcaatctggaaaaggctatgaagtacagggacggcgaaaagagtgccctgttttccgagaaagggcttgccggattctgcgtgaaagacccgacgacctatgtccgtgccagaactgtgccgtttgcagttttgtgccaggaaggtgaaaacgcctacaaaagtgaagaactgcgtctgctgtatgtggcaatgacacgtgcaaaacagcagctgttcctgccgctggaatggaaaaaatcctatctggggaaaagcggctgtctgaccaagtgcagtgcaatgatcttgccggaggggaaactgcctgtctatctggtacagtcagtgagcagcatggcacagtggatctggatgtgtctgttcctgcggcatgatgcggaattggcagatgcatgtaatttcccgccgcagtactggaaaacgccggcgtggagcgaaaacctgcaaattgcctacgaattcaaactgccagaggaaactgaaacggaagaattgcaggcagaggtgacggctccgccggacgaggaaacactggaagaactgcgtcggatcacggcgttccagtatgtatcgccggactgcgaacgggagtccctgcttagcgtttcggcaattcaggaggcaagacaaaatcgtgctcctgtctggaaacgtccggatttccggcagaaagagggcaggcttaccggtgcggaacggggtacagcgatccatacctttttccagtacgccgatttccggaaagcggaagccgatgttcctgcggaaatccggcggctgcaaacatacggctttttgacaccggagcaggcggctgtcgtaaagccggagattccggaagcattcttccgcgaccagttgtatcagcggctccgccgttcctgcatggtactgcgggaaaagaaatttctggtgcagtgtcgggacttgcaggcatatccggaagctgcggcgatcctgcaccgctatgaaaactccgacagtatcctgaaaggtatcatagacctggcatttcaggaggaggacggcttcgtgctggtggactataagaccgataccgtttcttcgccggaggaactggcggacagctatcgggaacagctgctgctgtaccgcggtgcattacagtgcatcacgggaatgccggtgcggcagtgctatctgtacagcacacatcttcagaaaagtattgaggtaaaatcatga

SEQ ID NO: 1270 - DNA, 1494 bp, Ruminococcus callidus
atgagtaagaagaaacatctgagtctgcgttttaccagtgcgttgctttgtatgaccattctgacaggcggcatggcagcaaactggacaccgatcagggatattccggtatcggcaaagacgctggcagaattacaggaagaacgcaagagcaacgaaaagaagatcgcagagaagcagaaagaactggattctttgcagtctgatctggaagaaaaggaagcgtaccagaagactttgcaggaaaagatcaccctgcagcagagcaatctggacatcgtttcacaggaactggatcgcattgctcagtctatcgacgaaaccacacaggcaatttcacaggcggaagatgacatcaaggtcatggaagccgatattgccattggactggacgagttcaagatgcggcttcgtgccatgtacgtacagggcaacgacagtttggcttcggctctggtaggtgcgaccgacttctacgacctgctttccaagtatgaactgatgtcccgtgtggcaaatcatgacaaccagctggtcaacgacctgaaggacaagctggaaacctgcaacgcaaagaaggcggaactggaaacagaaaagtccgatctggaaagccagcaggaagaccagcaggccaagaaggaagaattcaaggcggcaatcgaggatctccagcagacctattctgaaaccgatgaagccaaggagcagatgcagcggcagaaagagcagctgaacggcgatgtggcaacactggaagaaaacaacaaggctctggacgcagaagaagaccagatcaaggcggcaattgcagcggctgcggaagctgaaaagaagaagcgggaagaagcagctgcggcagaagaagccaagaagaagctggaagcccagaagcaacagcagcaggaggaagctaagaagaatcagtcctccggcagcagttcttcttcgaaaaatgacaacacatcttcttcgaacagccagaaggacaattccagcagctccagcagttcgaacagttcttccagcagcagttcagattcttccagcgacgacagcggcagtgttgcaccgtccggcggcggcttcacatggccctgccctggattctataccatttccagtaccttcggcaaccgctggggtaccacacacggtgcaattgatattgccggcggcaatgccggtgcagcgatcgttgcagcaaagggcggcacagtcgttcgtgttgtaaccggctgctcccacaactatccgaaaagcggcagctgcggctgcggcggcggctacggcaactatgtcattatccagcatgacggtacatattctacgttgtacggacatatggcatcggtggctgtttctgccggacagaccgtcagtgccggacagaccatcggctatgtgggaagcacaggcttttccactggtttccacctgcactttgaagtgcgtgtcaacggcaccaaggtggacccgatgaagtatttgtaa

SEQ ID NO: 1271 - DNA, 1107 bp, Ruminococcus callidus
ggattcaaagcaattcaaatagaaaattgcttccgtaacagacaacagccactgctatttcgattgacaggaggtcacatcatgcgtatttggaaaggctatcagcatggtatcaattttggcggctggttttcacagaaagagcataccgaaaagcattatcagacatttatcacggaagcggactttgcaacagttgcccgctggggactggatcacgtccggattccggtggactatgaattggtagaatccgagggcggcattctcaaggaagacggttttcgctggatcaagcagtgcattctctggtgcagaaaatacgatctgcacatgattttgaatttacacaaaactgccggctattcttttgccgatgagtcagattccggcgaattcttcaccaatctggcattgcaggctcgctttatctctctttggcaggaatttgcaaaacgctttggaaatgacagcgatgttgtcgcctttgaactgctgaatgaagcggcagacatgcacaccgcaaaagactggaaccagatcgctgccaacgccattgcagcgatccgctctgttgcaccggatgtttttattctggcaggcggcattcactacaacggtgccgacggtgtgacactgctggatgcaccggcagattcccgcatcgtctacagtttccactgctatgatccgatcattttcacgcatcagactgcacagtggatcaagggtatgccgaaggacttccacattgcatatccggacactctcgccaactatcgccgctggtccgctgcattcagcaaggaatatatcggttcacttctgcatgaagggctcacagatgtggaaacttctttctttgaagcaaatctttctgcggcaatttctgctgcagaaaaatatgatgtgcctctgtattgcagcgagtacggtgtcattcatcaggcagatctggaaagcactctgcattggtatcagactatttccgctgtatttgaaaagcaccacatcggacgggctgcctggacatataaagaaatggacttcggtctgacagatgcggaagcattccccgtgatgcagaaagtcctgcctttgctgtaa

SEQ ID NO: 1272 - DNA, 1395 bp, Ruminococcus callidus
ttgcgtgcaaagccgtcaggcgggctttatgcagtgtttcctaaacaagcgaatctgaaatcacccgccgccattccaaaggagggcattatgacaacagaaccaaacgaaaccgaaaccatgacggattctcaaaaggaagacgaaaaaaaagtccgcaagtgggactttgtcaacaaacagtgggcggcaacgatcatcttcagcggcgtagtgctgctgttggtggcgttcctgttcatcaagcgggaaatcttcaccggactgctcgcctatgtgttcgatgtcctgcggccgatcaccatcgggctggtcatcgcatttgtcctataccgtcccacctgtcagatcgacaagctattccgcaaggtacagcaaaaattcccgcggttccctgccggtgcaatggcggtgttctgtgcatacttcctcatgctggcactgctcagcattgtcatctggatcattgtgccgcagttcatcaccagtatccgcgacttcggggacaacatcatggtatactacaacaatatcatgaaattcctgaacagcgaccgcggcgaacagattctcaaactgttacaggacaacgacatcaatcccgcaatgctccgcaccaagttaatgagcctgaccacctacattccggacgcagtgggcacactgagtacatgggcaagcgggctgatcggcggtgtcattgactttttcatcgggctgatcttctccgtatatgtcctcgccggacggaacaaactccgcagacaggcaaagctgattttccggcatttcctgccgaaaaagcactacgaacaggttgcccactacggcagactgactttttccacgttctctaatttcgtcagcggacagctgtctgatgcgttcattctgggcgtgctgattttctgtgtcatgagtatcggcggactggaataccccatgatgatcgcggttatcatcggcatcaccaacatgatcccctatgtgggaccgtggatgggtactattccctgtgcgttgatcctgctgatggtcaagcccagtcatgccattgcatttgtcattatcgttatcattgtccagcagatcgacagcaacctgatctacccccgtgtggttggcacttctgtcggactgccggcaatctgggtgctgttcgccatcactgtgggcggcggcttgttcaacgtactgggcatgatcgtcggcgttccgatcatgtctatcatttacaccgtgattcgggaaaagaccaccggcagcaccggttcaccggagaataagtccacgcccaaaccgcggcagtggcatatccgaaaatctgtgcagtccctccgcagccgcgtttccagaaagggaacggaagccgaaaaggacacctcaaaagaataa

SEQ ID NO: 1273 - DNA, 1788 bp, Ruminococcus callidus
gtgatcatggatttgatgcaggatttacgccgcacctgttactgcggtgaagtgacaaaagcaggagaaaccgtcgttgtgggcggattcgtacagaaggtgcggaacctcggcaacctgatttttatcgatctccgcgacagaaccggtattgtacagctggcgttcaacgaccagaccgaccgtgccatttttgaaaaggctgcgtcctgccacagcgaatacgtgctgctggcaaagggcgttgtggcagaacgttccagcatcaacaaggacatgaaaaccggtgctgtggaagtgctggtagatgacctgcgtgtgctgtccaaggcacagacaccgcctttcgcgatcacagacgaaaccaagaccaacgaggaactgcgtctgaaataccgctatctggatctccgtcgtgctccgctgcagcacaacctgatgatgcggcacaaaattgcactggctgccagagagtatttctatgccaacaacttcattgagatcgaaaccccgatgatgatgaagtctacgccggagggtgcccgtgactatctgatcccctcccgcgtacacaacggcaagttctatgctctgccccagtccccgcagatctacaagcagctgctgatggttgccggcatggaccggtatatccagatcgcccgctgcttccgcgacgaagatctccgtgcagaccgtcagccggaatttacccagatcgacctggaaatgtcctttgtggacgtagaagatattctccagctgacagagggctttgtgaagtatctgttccagaaagtcctgcacatggatattaccacacccctgcctcgcatgacctatcaggaagccatggaacgctacggttcagacaagccggatacccgcttcggcatggaattgcaggatctgtctgacacagtcaaggacgtagactttatggtattccgttcggcactggaagccggcggcagcgttcgggcaatcgtggcaaaaaatgcagcttccgtgctgacacgaaaggaaatcgacaagctgaccgaaaaggcaaagggcatcggtgcaaagggactggcattcattcgctggaacgatgagaagcccacctgctctttcgcaaagttcctgccggagggcaagctggacgagatcctgtcccgtctggactgtgccaagggcgacgtggttctcattgtggcagataagaacaaggtgaccctgccggtactgggagcactccgtctggaagtggcaaagaagctggatctgattccggagggcaagttcaacttcctgtggatcacccagttcccgttcttcgaatggaacgaggacacccagcactgggacgcaatgcaccacccgttcaccatgcccatggacgagtgcctgccctatctggacagcgatccggcacgtgtcactgcaaaggcatttgatttggtgctgaacggtacagaactgtcctccggttccattcgtatcaccgattacgagttgcaggaaaagatgttccaggcactgggactgaccgacgaggaaatcgaagccaagttcggcttcttggtagaggcgtaccactacggtgcaccgcctcacggtggtcttggcattggtctggatcgtctggcaatggtaatgttacaggcggaaagtctgcgtgacgtggtggcattcccgaaggtgcagaacgcaagcgaactgatgagtgcctgccctgctccggtagatgccgaaagtctggacgtactgggcattcaggtaacgcacagcgaagacgacgaataa

SEQ ID NO: 1274 - DNA, 1032 bp, Ruminococcus callidus
atgacaacagatgaaattatgaaaaaaattcgggaaggtttgaccggtgaatacagcgtagacatggtctatctggaatcacaggcagacaagtaccgttccgcaaaaaatgcaaaagaaatcggaagtgcgatcgctgatctggcatatgagatcctgccggacgacaagcgggaagtcctgaacaaaatgatgtacatcgacggcaagcggctggacgttgtctttgccgaagccaacaagctgattcaggaaaagaaaatcgaagaatcgttcaagctgacagaagcactgtacaccaagattcgcatgaactatcgggaaaccgaatcggaagtatatcttagcttccgcaacacgctggaacatcagctgtatctgtacttctaccgcccgtccaagaagctggtgcgtccggtctttgacctgtcgcagatgatcctgctccacggttacaacctgctggaactgaaccgtgcagaagaagctgcacgcgtcatcaacgatgcgatccgctacaaccccatgaacacagatgcctatttcgaactggcagagtgctataagtccctgcgggatcacgaccagctgctttccgttatcaaggaaacactggaagttgccgtaacgccggtacagatctcccgctgttactgcaatctgggcttctactgtgtggaagtcaaggactatgaccgtgccgtttgcttctattatgagagcctgatctacgccgaccaccctatggttccggcagaactgcaccatatccacaccattacccagaaaaaaatcgtaccgcccacacgggaagaagtcaacgaggctttcgagcactacggtatgaagtgcggtgccaatgaggacgtagtcggtgttatcacagcactggcaaaggaagccatcgaaaacaaagacctgccggcaatccgtttctatctgcatatgcagtatggtctgaccaatgaccctgagatcaaggaaatgctggatcgctatgacaccctcgccaaggaacggggacaggcataa

SEQ ID NO: 1275 - DNA, 1395 bp, Ruminococcus callidus
atgattcataagtataaactgggcgactataacattgtgctggacgtgaacagcggcggtgtgcatgtggtggacgagctgacctatgacatgctggataatgttgcaccgccttttgctccggaatgtccagaggaagtcgtgacaaagctgtcgcggttttacgatccggaagaagtccgttcctgttatgcggaaattctggaggcatatcaggaaggcattctcttttcgccggacgattatgaaaagtatgccaacttcgctgtggcttctcccattaaggcgatgtgtctgaatatcgcccacgactgcaatctgcgttgcaagtactgcttcgcctctaccggcgatttcggcgagggcagaaagctgatgtcctatgaaaccggtaaaaaagcggtggacttcctgctgcaaaattccggcgaccgcatgaatctggaaatggacttcttcggcggcgaaccgctgatgaatttcgaaactgtgaaaaaaattgtggaatacgcccgttcacaggagccggtctaccacaagaagtttcggttcaccattaccaccaacggcatgctgctcaccgatgacaagatcgacttcatcaatcgggaaatgtccaacgtggtactgtctatcgacggcagaaaagaggtcaatgaccgcatgcgtccccgcgtagacggcaagggttcttatgataagatcattcccatgtacaagaagctggtagaccagcgtggggaaaaggaatactatgtccgcggtacttacaccaagtacaatctggacttctccgatgatgtgttcgctctgctggacgcaggcttcgaccagatctctgtggaaccggttatcgccgatgcggaagaaccttacgcaattaccgaggcagatctgccccgtatttttgaggaatatgaacggctgatgcagaagattctggactatgaggcaaccggcaagaagttcaacttcttccatttcatgctggatctggatcagggtccctgtgcgatcaagcgtctgcgtggctgcggctgcggcaatgagtacgtggcaatcacaccggacggcgacatctacccatgtcatcagtttgtcggtgaggcagactataaaatgggcaacgtggacgacggcacattcaaccgtgaaatgaagtccgacttcgccaagacccatatctacagcaagccggactgccggaactgctgggcaagattctattgcagcggcggctgtaacgcgaataactaccagttcagcggcgatgtgcacaaggcacacaagctgtcctgtgagatcgaaaagaagcgtctggaatgtgcgatcgtgctgaaggcgattcgcatggatcgggaagctgcaaagcaggaaagtgcggtattgccataa

SEQ ID NO: 1276 - DNA, 1275 bp, Ruminococcus callidus
aaaatgaaaaaggcaggggtatgcatttgcagtcctctgccttttttggaagaaaggattgtaagttatatgcgaaaacaatcagatgcaatgcaggaggatatgccaaaggaaaaaacagtgccggtgcggaaatcgacactgattctgctgttctgtctttgcggtgtgcttgtcgtaggaacagggctgggcatttatcggaactacgccggcaacacggagtacagggaactccggcagcttgccgcaactgtaaagcagaactattataccgacgtggacgacgaagccgttatgcagggggctatgaaaggctatgttgccggtctggacgatccttattcccagtacatgaccagtgaggaatatcaggcttatcagacagaggaagctggtcagaccgtgggaatcggcgtaacaatgacacaaacagacgagggctatttgcaggtggaggaagtcaatgcagattctccggcagaaaaagccggtatgcagcagggcgatattctcaccaaggtagagggcgaagatctggcagaactgggctacgccggagcactgtctaaaattcgaggcgaagcaggtaccacggtgcagctgacgattcagcggaacggcgacacactggaactggacgtggaacggcagaacatcgaagtgacgactgccgagggacagatgctggacggacagatcggctatatccggatcagttcctttaaaggcaacacgccggaacagtttcaggcgatctacgaccggctggtacaggacggggcaaaggcgttgatattcgatctgcgggacgacggcggcggactggtgtcggctctggagaagattctggatccgctgctgccggagggcgagatcgccattgccacctatcgggacggcacgaccaaaacgctggtggaatcagatgccacagagtgcagcttgcccatgacggtgatcgtcaacggcaacactgccagtgcagcagaactgttcaccgcttcgctgcgggatttcggaaaggcttccgttgtgggaacgcagacattcgggaagggcatcatgcaggtgacacagtccatgccttccggcggagcactgacactgacggtggcaacttatcagaccaccaagggggagtgttatcacaaggtaggcatcaagccggacgaaatcgtggaagccggagaagatgcagtggactacagcgatccgaatccggaaaaagacccgcagctgaaaaaggcaatcgaaatggtgcaggcgaagtga

SEQ ID NO: 1277 - DNA, 2181 bp, Ruminococcus callidus
ttgtttcatctgacgaaaaatttgacgacgcatctgccgcacaatctttgtgcggtattgcctttgacatctctggcggaatgtgctataattgataatatcgtatacaaaatttcgtacacattgccggaatggcaggaggaatatatgaggaaaaaatggacgtactggcggcgtgctgtgatttcgctgctgtgtgtcatcagctgtttgccgtggggacaacttcctgcggcggcggagccggacatgccggaggttctggaagaaacgtggaaacagaacgacgggctgctggtgccggcgaatgagccggcacagacggacacaccggaggtcacagacgacgaggcggaagaaagcctgcgtggagccggctcgctgccgtcttcctatagtctgctggacgtggacggcagcagttatgtcacttctgtcaaagatcagggctccacaggtctttgctgggcgtatgcggcactgggttcctgtgagtccaacatcatgaaacaggggctggacattccggaatcgtggaaagacagcagcggcgaactgaacttctccgaagcggcactgggctggtatccctttaccaatcatttgctggtaggcgacctcaccagcggcgactatatcaccatggacaacaagggcatcagcggcggcaaccccaccattgccggctacggactggcggcaggcattggcccccagctggaacagttcgcctccatggacgactggtcacagggttattccgagtatcagcggtataacgcctactaccgcatgcagagctccgacctcttgcagcaggtggacaccgcggggcggactgtcatcaagcagtggctcatggaaagcggtgccgtcagtgcatcgttctattccaagggcatattttttgacaacggggactccattgcctattaccagaagcggcacggcaccggagatgctgaccatgcggttctgctggtgggctgggacgataactattccagagagaatttccaaaaaagctgtcagcccaagtcggacggggcgtggctggtgcggaacagctggggggcagatgatgttggcggcggctacttctggctgtcctatgaggaagcttctctctgcgaagcggcacggttccagatgacacaggacagcacacctgttgcacgctatcagtacgatggcagtgtttcctatgccaatgtaaacttttccgcagcagccaatgtgttcactgcggaaaagtccggcaaactgacggaagtcatgtttcccatgacatcgaacaattctcagggcgggtggtataccatttcggtgtaccggctgaaaaataacgcccagtcccctgtagacggcacgaagctttgcagcaaacagggcacagtgcagtacggcggctataagaacatttcactggcagcacaaaatgtgatgctgcaaaagggcgaccggttttcggttgtgctggaactgcgaaaggaaaagggcagcagggaaaaactctggctttcgtttgagtccaactccacggaaacgctggaacgccactgctcgatccagtcggggcagacgtttatttgcagcggcgacacatggatcgatatggttgacgtgaagcagtggcaaaacagcagcggcaaaaagccctattccaatctgggcaacgctgcaattaaagtaattgtgcgggaacaggacactgcggtcaactgggcacagtggaatgccgccatgtcttacggcgagcctgccgccgatgcagatccgctgtatcaggcagcctatgccgaagcggcagccctgtcggaagatgccacgcaggcagaggtggacaatgccgccgccaatctctttgccggactggaacgggaagggctgatacagtattctcagtatatctacgccaaggaaaccgcagagcctttgtttttgctgggcgatgtagacgggaacggcagcgtagatgccaccgatgtgttccagtccctgctggcacaggcacaagatgccgtgggctatgcttccggtttgtccatgtcgcaggcggcagcggcagactgcgacggcaacagtaagatcgatgccacagatgcattctatctgatgctgtactgtgcgtatcggggagccggcattcccaaaagctgggacgaaattttaagtacataa

SEQ ID NO: 1278 - DNA, 729 bp, Ruminococcus callidus
atgcggcatacacaagcgatcattctggcagcagtgctgcttgccggtatcgtgtccggcggctgcacccgaatccacagtgcagaggaattgacaaaggacaccagaccggaaaccacgccggtgttcaccgatgccccgaagctggaattctccgcagatggggtagacccttacgccaatgtgatcgcgtactatgtggaacagtatcagaaagatctggaaagtgacgatatgcttcagccgttcacctatgtgctctatgacatggacaaggacggcacaccggaactgatcgtccggacaggctacagcgaagcggattatgccctctacgtctggacagccgatgcggacaaacagccggtacaggtggagggctgtggaaacggtgcccatacccagatctacggctcggaaacagaactgggctttttcatcaacagctgtcacatggacacggagtatattgcacaggattatctgacagaggggaactcgctggaagaagtgcagatctacgcctaccagatggagaacgaagcacagtcggcttacggctattacgatctcaccgccggagagggctttttccggctggacgagcagagcatcgaggactatcgctataaagccagcccgcaggtgaaagatgccaaaactgccctgtcgctggaggagtatcagaaacagctggaacagctggacgatgctcacgctgtgggataa

SEQ ID NO: 1279 - DNA, 1134 bp, Ruminococcus callidus
gtgaaagtattattagcaggaggcggcactggcggtcatatcaatccggcacttgccattgcctcaatcatcaaaaaacatgacccgtccgcagagttcctgtttgtgggaacgcccaacggcatggaggcacgtctggtgccggcggcggggtatccgatggaaaccatgcatgtggcaggctttcagcggaagctgacgctgaaaaatattcgccggaactgtaaggcaatgtactatctggcaacttcgcagcaccgtgccaagcagatcctgaagcagttccagccggacattgccattggcaccggcggctatgtggcaggaccgattctccacgccgcagcccgcatggggattccctgtgccattcacgagcagaacgcattccccggtgtcaccaacaagatgctggcaaaggaagtagaccacgtgatgctgactgtggaaaaggcgttggaattcttccacctgaactgtccgtataccgtcaccggtctgccggtgcgtggcggcatttccggtatggacagagccgcagcacggaagcagctgggctttgatgacggcatgtgcattctctcgttcggcggcagtctgggagcaggctgcatcaacgaagcgatggcaaaggtgattccgtggcacgtgcagaaggggctgtcgatcaaccacattcacggctacggcggcatgggaaaggaaaccttccccaaggcaatggctgcggcaggcattccgctgaaaggcgaccgtctgcgaatcacggaatacatcaatgacatggacgtttgtctggcggcggcagatctggtcatctgccgttccggtgcgtccacgctggcggaactggaggctgccggacggggttccattctgatcccgtcccccatcgtcaccggcaatcaccagctgcacaacgccaacgtgctgggcgatgccggtgcggctgtggtcattgaacagaaagacgcttcgccggaacgcatcattgcagaagtggaacagctctatgccgatcgggaacgcctgacggaaatggggcacaaggcgaagtcgctggaaattgcagacacggacgaccgtatctggaacgtggtcgcccagttgtatcagaaagcaaaatccaaataa

SEQ ID NO: 1280 - DNA, 1182 bp, Ruminococcus callidus
atggctagtgaaatgcaattaaaatacggctgtaatccgaatcagaagccgtcccgcatctatatggaggacggcagcgatctgccgatcactgtactgaacggcaagccgggctatatcaatctgctggacgctttcaatggctggcagctggtatcggaactgaaagaagcaaccggcatgtgtgcggcaacttctttcaagcacgtttctccggcaggtgccgcagttggtgcaccgctgtctgataccctgaagaagatctatttcgtagatgatctgggtgaactctctccgctggcgtgtgcttatgcccgtgcccgcggtgcagaccgtatgtcttcttacggtgactttatcgctctgtctgacgtttgcgacgtgcccactgcaaagatgatccagcgggaagtttccgacggtatcattgcaccgggctatgagccggagccactggaaatcctcaagtccaagcggaagggtacctataatatcattcagatcgatccggcataccgtccggcagaactggaacggaagcaggtatttggcgttacctttgaacagggacataacttcctgaagatcgacaaggaaatgctgtccaatgttgttaccgacaacaaggaaattccggaaaaatatcagagagatctgctgatttccctgattacgctgaagtatacccagtctaactctgtatgctatgtcaaggacggtcaggcaatcggtatcggtgccggacagcagtcccgtatccactgcacacgtcttgccggcaataaggcagacatctggtggctgcgtcagcatcccaaggttatgggcttgcagttcgtagacggtatccgccgtccggatcgtgacaatgcaattgacgtgtacatttctgatgaatatatggacgtgctggcagaaggtgcatggcagaatacattcaaggtaaagccggaagtgttcaccaaggaagaacagcaggcatggctggcacagaacacagaggtttgcctcggttctgacgcattcttccccttcggcgacaacatcgaacgtgctcacaagagcggcgtgcagtacatcgcagagccgggcggttcgattcgtgatgaccatgttattgcaacatgcaataagtacaatatggcactggcgttcacaggcattcgtctgttccatcactga

SEQ ID NO: 1281 - DNA, 1218 bp, Ruminococcus callidus
atggaatggctcggttgggcatttgctgcggcaacggctcttttgctgacaatttttatttttctgtatctgcaccagaaacagcaggcacagcatcagcacaagaaaagtcaaaaggctcttggaaagctggaaaacgaaatgaaccgcatgcagaaagagctgcaccacgaacgggacatcatcgggctgattcaggagcacatggtagagggcattctgattctggacgattccgacaagatccagcttgccaaccgcacggcaacggcactgctgaacatcagcaaggaaagctgggacaacaaatccattttcattctgacaaacaatcaggactttctggacgcactgcgaaaatccaaaacagcacctcagcatgaactgctgccggaagacagtgaactgcacaagggctgctctgtgcggcagctgctgaagatcgacggcaagtatattcgggcgtacatcacccgcgtggaaatgggcggcattttcggcacgatcgtgctgctggtcgatgtaacctacaacgtcaaggcggaaaaaatgcggcaggaattcaccgcaaacgtttcccacgagctgaaaacaccgctgacgaccattaagggattcggcgaaatgttcggcagcggcatgatcaccaaagaggaagacgttgccaagtacggtgccatgatcgaacgggaaagcgaacgcctgctgtttctcatcaacgacattatccgcctgtcggagattgaggaacacacggaaatgctgaacacaccggtggcactggaagctgcggcaaagaacgccctgcaaattctggagccgcagattcagcggaacaaaattcacgtccggctggagggcgactgtctgctgctccacagcaacgagggctacatacgggaattgttcatcaacctcattgacaacgcgatcaagtacaacaatccggagggcaccgtgacgatcaccatacagcacctcggcacacaggcgaaaatcgtcattgcagacaacggcatcggcattcccctacaggcacagagccggatctttgaacggttctatcgggtggacaaaagccgttcgaaacagcgtggcggcacaggactggggctgtctatcgtcaagcacatcgtagactgccacaacggcaccatttctctccgcagcgaactgggacacggtacggaaattacgattctgctgccggcaaagtaa

SEQ ID NO: 1282 - DNA, 1302 bp, Ruminococcus callidus
atgaaaaagaaatccaaatccattcttgccattgtactggcgatcctcctcgtgatcgtggtggcaatctctctgaccacgaacattcttttttcccgaaaagacacaccgaagattttcgggcactacatctatctgatggaatatgatactatggaagcagcagcaggggctgccgttgccaccggcacttccggacaggctgccggctcagtcgatgacaccagtgctgcggcttcgatccaccagcacactgccgtgatcgcttccgcctacaaagaaactgatccgattgccaagaacaacgctgttctgtgcgtactggctccggacgacgcttccaaggacatcgactccgaccgcgttgctgtccgccgcatctacaacatcgaacaggacgaaaccggcgttctgaagtactatcccactaccatgaaagcaagtgatgtgggaactgagccgcctgtaactgtggacagcattctcggcaagtgctcctacgaaagcggcgaactgtatacatatgtaaaattcgccaccggcgttccgggaatcctgatcctgatggttctccccagcatcattctggtcatcatgctgatcgtcaccattgtacgggcaagcatgggacacgatgacgaatacacttttgaagaaaactatgacgaagtttacagtgaagattcctacgatgacggcgattctgcttatgatgacgaagaactgggcggacgctctccgctgtaccgtccgtctgaagcgacccagagccgttcctttgagaagaagcgttcttccattgcggagaacttcgaacggaaacaggtaaaccccaactcgccgtaccagaaggctcgtaccatgcagttcaaggcacagcatgatgtgccgatctacaccaatccggcagatcagctcccgctggacggttctgcaccggcagccggcagcaacactaccgcctatgagggcacacatgctgcaagcacttccaacactgcaacattcggcagctacagcagcaacacctacagcaccccgccgatcacagacgaaacacctgtcgcaccggcacagccggaagctccggtttccacttaccgcggcagccacgaagcaagctctccggaggaagcacggaatctgggcgataccccgttccgcagcagccgtgcatctgcaccggctcccgcaccgaagcctgctgcaccgtctgtttccaagaacaaggaagaccgcattgcaagtgcttctgtagacgaactgctggcaatgatcgaagacgaaaagaaaaagctgtaa

SEQ ID NO: 1283 - DNA, 945 bp, Ruminococcus callidus
atgaaattcctgaaaaaatattataagctgatcggtacgctgatcaccgtggtggcattcgtctttgtcatcaagaagatcgtgactatggacgtggactggtcgatgttcgcttccggcaaaccgctgggcatcattgccggctgtgtgctggtacagactgccattattttcttcatgtccaccccgtgggtgcagtttgtgcgaatcctgtccggcaagaaaatcgccatgaaagacgctctgccggtatacaccaagtgcaatctgatgaaatacgtgccggggaatgtgttccagtacgtgggacgaaaccagcttgccgcagacctgcacatcagccacgtggacgttgcctgtgccaccgttctggaaattctgtgttcgctggtggctccgctggtgtggatcctgctgctcatgggaaaagacatggtgggactgatccgcacctatgagaagaatttcctgctggtgctgggcatcggtgttgccgtactggtgctggcgtttttcctgctccgctggaagtttcgggagccgctgcggcggtatttcgaaaagtaccgcaaactgctgaaccggaaaattttgctgcgggtcgttggcgttttcctgctctacgtgctgcaatacctgttctccgccgccatgtatgccgtgccggcgttcctgatgttcgacgttccgcgggcacagatggggctgtttctgggaacctacctgttctcgtgggtcattggcttcatcacccccggtgctccgggcggcatcggtgtccgcgaagcagtcatggtgctcacatgcagcacatttctggacaccaacaccattatgctctacgccgttaccatgcgaatcatctccacattcggcgacgtgctggcgttcttcctgggctggctgctgcatctcatctggaagcggcaaaaggccaccgtgtaa

SEQ ID NO: 1284 - DNA, 1296 bp, Ruminococcus callidus
atgtataaaaacggactcacttatggaaaatgcaccacaattgtcttgttgacacacattattatgctgcttgcgattctgctccgcggcaaatatgatacgccgcaagacattttgccgttggcagttgctgtgatcgggttagatctcacgtatagtatagtgctgcgattcctgtaccgccaaatgacttatacgctggattttgtattgctgctgcttatcaacatcagtgtcatgtttcaatcctgttttggcggtgttggatttgcggcaaagcactatgttacttgtattgtagcactggcagtttgtcaagttggtttccttttgacacgaaatcatgtttggattcaatctaaaaaaattgtgctgtatattctgttgggtgtgctgattttgagtattttgctgctgactggcagtcgaagcatgtggatcaacatcggaccaatcagtattcagccgtcagaatttatgaagccagtttttgttttgatctgtgcgacctctattcgggaacagcatgagaagaaaaagattctgtttttctacgtttccaaggaaatgatgatcctgacaggagcatttattgtcattgtaggtttgcagtggtggtgtcgtgatttaggttcgctgcctacttttgccgctgcgtacggttgtgcgttggcatgtcgcttgtgttatccaaaagcaaaattttccaagaaaacaattatcggaatcagtgctattgctgcgattcttgtagcattggcattgcgatttgcaccgggttatgtacaaaaccgtctttcggttgacatctggaatcaaatggagggagatggataccagcagtgtaaagctttgattgcgattgcagagggcggtttgttcggaaagggaccgggctgcggctccttgtataaagtgtttgcctcggacaccgatattgttttttctaccatttgtgaagaatggggctttttggtggcattgctgtcgatattgatcttaatggcaatgatgctgcttccgatgatcaataaacctcgtagctatttccatacaactatgattcttggctgcgtggcagtgttgattgtgcaaatgggcttgaacatcttcggctcctgcaatctgatcccgtttactggtgttacaattccgtttatttcgcagggtggtagctccatgattaccagtggcttcttagccggtatgctgaaagcgggacagtcaccggtatttaagaaaccggaaccgaaaaagaaaaaagccaaagcaagaaaggcggtggctgcggcatga

SEQ ID NO: 1285 - DNA, 1431 bp, Ruminococcus callidus
cgggaaatttgcaagcagatggcgtgcaaagtcgccagacgttctttgtgcggtattgcctttacagaaatcacacataatattgtagtaagaaaggttggaattttttctcaaatggtaggtttaattttattgcagatcgccctgatcgccctgaacgccgtattcgccggcacagagatcgcggtgatctccgtcaacgaggcaaaactggaaaaagaagtggaaaacggcaacaagcgtgcccgctggctgttgaaaatggtgcggaactcctccggatttctggcaacgattcaggtggcgatcaccctgtccggctttctgggtgcggcatttgcctccgacagcttcgcggaaaagctgacggggctgcttcaaaagaccggcatcgggttgagtacctctgtgctgaacacgatttccgtcattctggtaacactggtcatctcctatttttccattgtctttggcgaaatggtgccgaaacgcattgccatgaagaatgccgaaaaattttcgctgacaatgtccggaccgatcacggtaatttccaagctgttcgccccgctggtgtggctgctgaccaaatccaccaacggaatcctgcggctctgcggcattgaccccaacagtgaggacgagatcgtcacggaagaagacctgctgctcatggcagatgcgggacacaaaaaaggaacgatcgacaccgaagaaaacgacctcattaaaaatgtatttgcatttgacgatctgactgtcggcgagatctgcacccaccgcaaggaagtggcggtgctctggctggacgaaaccattgctcaatgggaacagactattcatgaatcccgccactcggtctatccggtctgcggggacagcgtagaccagatcgtaggcgtgctcaacgccaaggactttttccggctgcaaaaccgcaccaaggaattcgtcatggaacacgctgtacacacgccctatttcattcacgaaaccatgaaagctgacgagttgttcagcaagatgaaacggcacgcagaccattttgcagtcgttgtggacgaatacggcggcatgtgcggtatcattactgtgaccgatctggtggaacagctggtcggagatttcgacgatgacgaaaccgaacggcaggaaccggaactggaacgtctggattcgaaaacgtggaagatccgcggcacctgttccctccacgatgtggcaaaggctctggatcacgaattttccgatgcggaggaatacgaaaccttcagcggctttctcatcggcaagctgggcgagattccaaaggacggcagccgcctgaagctggagatcgagggatacctgatccgcattctcaacgtccggcagcactgtgtggaaaaggcaatcgtccggctggagcattctccggcaaatccactgtaa

SEQ ID NO: 1286 - DNA, 810 bp, Ruminococcus callidus
gcaatatatttgcttatttttcatgttttatttgcattctccttgacattctccaaaaatacgcctataatagataaaaaagcacagaacaacaccgcacaagacttgtgccgtgttgccacaggaatattccggcagttctcgccggaaaccgcgaaaggaatgacaaaaatgacttttgatgaaatgtttgcacaggcaaaggcactgctggaaaacgccagtgccaaggacaccgacaccgccgtatcggtacagtttgatgtttccggtgacggctgcggtgcattctatgcagtagtttccgcagacagcgacaagctgaccattgagccgtttgactataaggatcacgatgtactggtatccgcagattccgctgccctgctggacgctctgcgtaccgcagaaaccgctgcactggaactcgccggtgaatgggaaaagatcgtggcattccgcagcgttctggatactctgcccaagccgaagaaggaggctgctcccaaggcaaaggctccggctgcgaagaaagctcctgcaaagccggctgcaaaaaaggcagaagcaccgaagactgctgcaactgtaaaaaagacggaaccggtaaagtctgctgcaaaaaaaccggcggctgcaaccgcaaagaaggaaaccgtcaaggctgaagctcccaaggctgctgcggctgtcaagaccgaaccggtaaagccggcagtgaaaactgctgctgcaactgcaaaggttcccgctgcaaagccggctgcaaccactgccaagactgctgctgcgaagaacagcaaaaagtaa

SEQ ID NO: 1287 - DNA, 1290 bp, Ruminococcus callidus
atggacgagaaaaaggaaaaacgatgcaacttttgcggtaagccggagcatctggtagaaggcatgatctccgccgcagatgtaaatatctgtagtgagtgcgtgacttattgctatgaaatgctctatggtcccgtcggcacgccggattccgcaaaggataagaagaaatcttccaaaaagccggcagagatccacctgctgaaaccggcagagatcaaaaaggtgctggacgagtacgtcgtcggtcaggatctggcaaagatcacgctggcagtgtcggtgtataaccactataagcgaatcctcaaccagtccaaggacgagtccgcacgagatgtggaactgcaaaagagcaacgtcctgctgctgggccccactggtgtaggtaagacttatctggcacagacgctggcaaagattctggacgtgccgtttgccattgcagacgctactaccattaccgaagccggttacgtaggcgacgatgtggaaaacgtgctccagcgtttgctgcaagctgctgatttcgatgtggaagctgcggaacgcggtatcatctacattgacgagatcgataagatctccagaaagtcggaaaacgtttctctgaccagagatgtcagcggagagggcgtacagcaggctctgctgaagatcatcgagggaaccgtttccaacgtgccgccgcagggcggcagaaagcaccccaatcaggaatttatccacgtggatacccacaatatcctgtttatctgcggcggtgcgtttgacggtttggaaaagctgatccagaagcgtatggctccggcagcactgggctttgatgctcccattgtgcagcagaagaaagatctggtcaatattttccgtcaggtaacaccgcaggatctgatgaagttcggattggttccggaactggttggccgtctgccggtcatcaccacactggacgatctggatgaagaagccctgatccgaatcctgactgagccgaaaaacgctctggtcaagcagtatcagaagctgttcgacttcgacgacattgaactggaactgacggacgatgccctgaacgcgattgcagcagaggcaattgccagaaagactggtgcccgtggtctgcgttcgatcatggagggaacgctgatggataccatgtataccacaccttccgtggagaacgtcaagaaaatcgtggtagatgccgactgcgtcaagggcactgccaagccgagattttatgatgcaagcggcaaggaaatcaccaatgttccgcagggaatctga

SEQ ID NO: 1288 - DNA, 1386 bp, Ruminococcus callidus
tcaagtgaaaagagaggagtattttatcatatgcaatcaaaaactacacaagtcaaaagcggatttggatccaagctgggatttattttagcagctgcgggctctgcggttggattgggaaatatttggcgtttcccttatcttgctgcgaaatatggcggcggtatgttccttctggtctatttgatctttgcggttacgtttggttttgccctgatggccacagagattgccattggacggcgtaccggaaaaagtgtcatacaggcatattcagatatgaactgtcatttcaaaccgcttggttggctagcaggagcgattccggtaattatccttccctactactgtgtgatcggaggttgggtgctgaaatatctggtgatatttacaactggttctggagcaagtgcggccggtgacggttcttatttctctaactttatcggtcatgccggatcaccgatgttgttttttgcaattttcattctccttaccgcagtagttgttatgctgggtgtgcaaaaaggggtagagaaagtcagcaagctaatgatgccggtattgttgattctgattgtaggaattagtatctatacgttgactttgccgggggcaattgacggattgatctactatgtcaagccggatttcaaccagttttctataaaaacagtaattgccgcagtaggacagttgttctattctatgtcattggcaatgggtattatgattacatatggttcttacatgcggaaagaagataacattgaaagttctgttcgccagattgaagtgttcgacactttggtagcttttctgtctggactgattatcgttccggcagtgtttgtcttttccggtggtgatgaaaatgctttgaatgctggtccaagtctgatgtttatcacactcccgaatgttttcaaggaaatgttgggcggacagatcgttggtgcagtatttttcttgttggtggtactggctgcaatgacatcttccatttctttgatggaaacggttgtttccattgtggaagaacgattccactggaaacggattcccagttgcctgattgttaccggcatatcgtttctgatcggtttactttctgtctttggatatagcatttggtctgatttcactattttccacatgcagttcctggacttcttcgactatattagcaataacattatgatgccgattgtcgcattgatgacttgtgtgttggttggatttgttgtaaaaacaacttttgtagaagatgaaatcgagaagaatacacgctttcgtgcaaaaggtttgtatcgtgttatgatcaaatttatctgcccgatttgcatgctgttgattttattctctgctctgttcctgaaattgtaa

SEQ ID NO: 1289 - DNA, 1809 bp, Ruminococcus callidus
atgaaattttggaaaagactcactgcctgtgcattgacagctgctatggcggctggatttgcaggctgtggcagctccggcggagatgcttcgaaaaaagaagattccgataaggaagacgcagtgattccctacgacagcgatttcaccatcggtgtggacaagatcgctgaagctatgggtgccggctggaatgtgggaaatcagctggaagccaattccggcggaaaagtcaacgaaaccgtatggggcaatccggagatcacacaggaactgatttccgcagtggctgatgctggattcacgactgttcgtgtgccggtttcctatctggatcgcattgatgatgcgaacggctatcaggtggattccgcttggctggaccgtgtggaagaagtggtgcagtattgctataatgagggactgtatgtgattatcaatatgcacggcgatggctataatagcattgacggcggctggttcctggtaaacggcgaagatcaggatatgattcgcgaaaagtatgaagcggtatggaagcagatcgcggaacgctttgcaaagtatgacgaacatctgattttcgaatccatgaacgaagaatctgacggtacatatgatggcgacccgaacaaggagtactatgcaaatctgaatcagtacaatcagatttttgtagatacggttcgtggtacgggcgaaaagaacacgcaccgctggcttttggttccgggctggaacaccaacattgagtacaccataggggactatggctttgagatgcctactgatgaaaaatgttctgctggagaaagccgcatgatggtttcggtacactactatgacccgtgggattactgtggtatagaggatctgaaaaccattctgtggggcgagtacggcgataatctgattgaagtgaacggcttcccgaagatgaataaggcaaaatggggcgacgaatcttatctggacgatctgttcagtcgcatgcaggaaaaattcgtaaagaatgatattccggttatcattggtgagtatggctgtatcgacaagtcctcggcttatgcagattttgccggacagattcagggtaaccgtgcatactgggacggctatgttgcaggtaaggctgcttcaatgggcatgattccggtatactgggataacggctttaacggcgtgtatggctttggtctgttcgaccgcaacacatatgagcagacacagccggagatcatctccaccattctgaaagcagtaaagaacaaagacccgaaggctggtctggatactgtcgtagaaaataaggtggaaaagacagacgatgcacatgcatacatcggcattcagacggaagtttacacattccggaacacctgcagcgatgccaagtacggcaaggacacggattacttcaacacactgatcaagtggggcgaggacgaccagatcattgacactggtgcgaaatttacagatgcgaccatttccgcagacggtacttataccgtttctgtggacggttacgatttctcctctgacagcagcaagctgaacatgctgtttgtcagcacagactttgcctttaacaacacgctgaaagtcagcgatgttgttgtaaagtgcgacgatcaggagatcccgattgacaaaccgctggtaatggctgatgatcagggcaatttctacatggaactggtgaacatttacaacactgatctggcagcgttggattataccatgccgaagaacagctttagcattacctttaccattgaaggtatggacagcgttctggctgcgtaa

SEQ ID NO: 1290 - DNA, 1659 bp, Ruminococcus callidus
atgcagtctttggaaaataccatgcttattacggacctggacggtacattgctgccagccagcaaagagatttctgtggcagatgcagcagcaatttcccagttccgtgcaaaaggtggcaaattcgcaattgcaactggaagaacgttgcaggcggctcaacgatatttgaaaaagctgcagcctaatatccctgtgatattgttcaacggagcagccatttatgatccggtagcagaaaagtggctttacacagaagaattgccgccagaagccgcagcgatcacccgacaagtgttagaagcatttccggacgtttcggcggagattctccgcacagacggcacctatgtttccagaatgacaccttatgaaaaggagcatctggagatctgtcaggtggaacccattctggcaatgccggaggaaattccgcatggttggctgaaagcgctgtttgcaattgcacccgagcgaatgcctgatttgattgcctattttcaagaacaaaactggacgtgtgcagattttgtacagtctgaagcacgtttttatgaaatgctgccgaaaggcgttaccaaagggagtgcccttcggcggtaccgcaccatatgcggtgcggaaagctggcatattgtggcggcaggggattttgacaacgatctggatatgcttcgcgtagcagacaccagtgcctgtccgtctaatgcacagccctgcattaaagaaattgccaatatacagttgatgcattcctgtgaagaaaacgcgattgcagaattgatttatcgtctttcgaaatcattggaggttcataacatggatgaaatgaccaagaaaaaattgcaggcaactgcctgccgtattcgtatgggtgttattgaaggcacctatcacgcaaagtccggtcacccgggcggctctctctcgatttgtgatacactgacttatctgtactttgcaaagatgcacgttgacccgaagaatccggaaatggcagaccgtgatcgtctggtgctttccaaaggacactgtgcaccggctttatattctacactggcagagcgtggatttttctcgaaagaagaactgcaatctctgcgtcatatcggtgcacttttgcaggggcacccgtgtattcatattccgggcgtagatatgtccagcggttctctgggacagggcatttccgcagcctgcggcatggcactagcaggaaaaatggacaatgctgcttataaggtttacaccattctgggtgatggcgaaatcgaagaaggacaggtttgggaagctgcaatgttcgcaaaccagtatcatctggacaatctggtagcaattgtagacaacaacggtttgcaaatcgacggcaagctttccgaagtttgctctccggagccgattccggaaaagtttgaagcgttcggctggcatgtcattcgtatggacgcacacgatttcgatgcaattgatgctgcaatgcaggaagctgaaacaatcgtaggcaagccggttgcgatcattcagaaaagtgtcaagggcaagggcgtgtcctttatggaaaatcaagttggctggcacggcaaagcaccgaatcaggtagagtatgaacaggcaatggctgaactgacagcccagctgaaggaactggagggttaa

SEQ ID NO: 1291 - DNA, 2625 bp, Ruminococcus callidus
atggcagggggagcagaaaataggagttactgcgatacgtttcaaggcaattctgtacaagcttgtgcagtactgccgcatggaaaacgcacagccaagccaatggattgtgagatttccggattcgcagaggcatggggagaacttgccgctgcacgaaatgctgatgcagaaaggaagacagaaatcatgactgaaaccattgaaaatacagaaaactatatggaagaaatcaccgcaccaaccgtacaaaaactgccgctgcttgcaatgcgtggaattgtattgtttccgaacatgatcatgcacttcgatctggctcgggaaccgtttgtcaaggcattgagagccggtgccaaatcggatcgccgcgtgtttctggtgactcagaaagaccccttggtggaagaacccaaacaagacgatctgtatacagtgggtgtgatcgcagaagtgcggcaggtgctccgttcgccggacggcgtgacacgggtactggtcgagggaaaagaacgggcagctattaccgcagcttttttggaaaacacagaaaaagaaaaggacttttacccgcaggcagaagtggaactgctgccggaagtttcggcagaggaagaccgtgaaaaggaactggccgcttctgtccgctgtataaaggacatttttcaggaatatgcagaactgatgcctcgcatgccgaaagaattggtggcaactgtgatctgcgaacaggacgctgccaagatgtttaacgagatcgtgttcaacatttcgttggattatgatgcaaagcagatgcttctggaagaaagcagcctgctgcagcggctggaaaagctgtaccggattctggcggacgaaatggacattctccagctggagcgaaagctacaggaggaaacacaagaaaatctggatcgctcgcagcgggaatactacctgcgggaacagatgcacctgattgccgaacagctgggagaatccgaagatccagctgcggaaatggaacagtataccgacatcatcgacacgcttccgctggacgaagccagccgcagaaaactggaaaaagaagcagaacgtctgtcccgtctgccggcagcttcacaggaagcctttgttattcgtagctatctggacacagttctggcactgccgtggaataaatccagccataccaagcccaatctgaagcgggcacagtctgtactggaaaaagatcattatggtttgaaaaaggtgaaagaacgaattctggaaagcattgccgttcggacactgctgccggaagcctccggacaaattctgtgttttgtcggacctcccggcgtgggcaaaacttctatcggcagatcgattgccaaggcactgggacggcactatgaacgtgtttctctcggcggtgtgcgggacgaatcggacattcgcggacatcggaaaacttacgtaggggcaatgcccggacgcatcatggatgccatgacccgtgccggcaccaacaaccccatgatcctgctggacgaagtggacaagatgagcaacgactttcggggcgatccctctgcggcactgctggaagtactggacagcgaacagaacaaggcgttccgtgatcactatattgaagtgccttttgacttgagcaaggtgctttttgtggcaacagcaaactctctggatccgattccggcacctctgctggatcgtatggaaattatcgaactgggcagctatacccgtgaggaaaaattccacattgccaaagagcatctgctgaaaaagcagctgaaaaaacacggactgaaaggcacccagtgccggattccggacgaggtgctgtatgcgatcattgatggctataccagagaagccggcgtgcgggaactggaacgcacgatcggtacgctttgccgaaaggctgccaaagaaattgtggaaggcatctgcaaaaaggtttcctttacagaagtcaacctgaaagaatatctgggaatcccgaaattccgaccggacgaacagagccatgaagatactgtcggtgtagtcaacggtctggcatggacttctgtcggcggcgtgctgatgcctatggaagtgctggtgatgtccggcaaggggacagttgagtacactggttcactgggcaacgtaatgcaggaaagtgccaaaattgcggtcagctatgctcgcagcgtggcaaagcagtacggcattccggaagatttccacaccaagtgtgacctgcatattcatgcaccggagggcgctgttcccaaggacggtccctcggcaggcgttaccatggcaaccgcgatcatttccgctctttccggcagaccggtgcggggggacatcgcgatgacgggggagatcaccctgcacggcaaggtgctgcccatcggcggactgcgggaaaaatccatggcagcttataaagccggcattcacacggtgattattccggaagaaaacctgccggatctggaggaagtagacgaaaccgtgcgggaacatgtcacatttgtgccggcaaaaacgctggacactgtgctgaatacggcactggtaccggcagaaccagccgcagaagcacagacagccgctgcggaactgtgccatgtataa

SEQ ID NO: 1292 - DNA, 1587 bp, Ruminococcus callidus
atgaaacggcatgaattgatcgtcatcggtgcaggacctgcgggtctgagtgcagcgatcgaagcaaagaaaaacggcatggatgttatcgtgttcgatgaaaaccaacgtcccggcggacagctgttcaaacagatccacaagttcttcggttccaaggagcatcatgctaagacccgtggatttatcattggtcagcagcttctgaaagaagcagaggatctgggcgttcgggtagaactggactccaccgtaatgggtatctacgaaaataaggaagtcaccgtaaagcagaacggtgaagttcatcattataaaggcgatgcgatcatcatcgccactggtgctgccgaaaatatgatcccgttcaagggctggaacattccgggtgttatcggtgccggtgcggcacagaccatgatgaacattcagggggtgcagccgggcagcaagatcctcatggtcggctccggcaacgtgggactggtcgtcagcttccagctgctgcaagccggctgtgaagtggcagccattatcgatgcggctcccagagtcggcggctatggtgtccatgcggcaaagctggcaagaaccggcgtaccgttttatctctcccacaccgttgtggaggcaaagggcacggaccgtgttaccggtgcggtgatcgcacaggtggacgagcacttccagcccattccgggaacagaaaaggaactggacgtgggtaccatttgtattgccgttggtctgacaccaatgtcccagctggcaagcaatgccacctgtgatatggaactgattccccagaagggcggtcatgtggcactgctgagcgaatacggcgaaacttccgtagaaggcatctattgtgccggtgacgttgccggtatcgaggaagcaagttccgcaatgattcagggccgaagcgtggcttctcacgtcagcatgaaagccggctaccttactgaagacgagttcgagagcaagtatcagggctatcaggaggctctgggacagctgcggcagggcatgtttgccccgaagaataagggcagaaacgacttcacggaaactgatgagggctatccgatctccaagacgctgctggcacacggttatatgactgaggaggaactttccaagtttccggcggcttcttaccagaaagccggtatccaccctgtgatcgagtgtacccagaatattccgtgtaacccgtgccaggacgcatgtcatttcggctgcatcaaggtgggcgagaatatcacacggctgccggcaatcgatgaggaaaagaagtgcaccggctgtggcttgtgtgtggcttcctgctccggtcaggcaatcttcttggtggacgaaacctatgaagaaggctttgcttccgtgacattcccctatgagttcctgcctatgccgaagatcggcgataagggcaaggctctggatcgtcagggcaagccggtctgcgatgcagagatcgttggcatcaaaaagacaccgatcatggacaagaccgcagtggtcacgatgaaggtgccgctggaatatgtgcacgctgcaagattctatcgggcagaggtttga

SEQ ID NO: 1293 - DNA, 714 bp, Ruminococcus callidus
atgtggttcttacaggaggattcaatgaacgaacaggaaatcaaagaacagctttgtgatgtctgccacaagatgtggcagctgggctgggtggctgccaatgacggaaatgtttccgtgaagctggaggacggtaccttttttgcaacacctaccggcatgagcaaaagcttcatcacaccggacaagctggttcgcatcaacgacaagggcgaagtgctggagggggctgcagggctgcggccgtcctcggaaatcaaaatgcacctctgctgctatcgggaacgtcccgatgtgggagctgtgctgcatgcacacccgcctgtggcaaccggttatgccgttgccaacaaggcactggacgagtacaccatgatcgagtcggtaattgccattggctctgtgccggtgacaccttacggcacgccctctacagacgaagtgccggaggcgatcaagccctatttgcaggagcatgacgtgatgcttctgcaaaatcatggtgccctgacggtgggagcagacctgatcactgcatactaccgcatggaaacgctggaactctttgcaaagatctccctgaatgcccacctgctgggcggtgcacaggagatctcgcgggagaacatcgaccggctttgcagcatgcgtgcacagtacggcgtaacgggaaagcatcccggctataagaagtaccccaacggtcagaactga

SEQ ID NO: 1294 - DNA, 1533 bp, Ruminococcus callidus
atgagacaccccgcttgtcggggtgttgttatttgtacaaatctgcatacaataaaagcagcactgcacaaaacacatgcagtgccgttgaagaaaaatactctccggggaattgaggaatcatctatggttttcagcacaattgcatttttgtttcagtttctgccgattttcctgctggcatattatgccacaccgcagaaataccgaaatatcacactggtgatcggcagccttgtcttttacgccattggcagcggctggtataccctgttgctgctgctgtccctgctgatcaactacgggctttcccgcatgatcagcggaacacatgccagacaccctgagtccgccaagcactatttgatcgcaggattgatttacaactttggattgttggtggtattcaagtacaccaacttcctgatcggcaacctgaattccctgctctctatttttcatacggcaattcccaaggtatcgcttgtgatgccgcttggcatcagcttcttcacctttcagatcacgtcctacctgatcgatgtctacaccggaaagacgcgtcccgcaaggagtattctggatctgggcgtgtacctctgcatgttcccgcagctgatctccggtccgatctgcatgtacagtgaaattcagccgcagctgaaaaaccgtcgggtcgatgtccgtttgctggaggagggcatggaaacctttgtgctcggactgagtgccaagacgctgctggcgaaccccatgggcggtctgtggaataatctgtccgttatcgggtatgatagtatctccaccccctatgcgtggctgggagcgtttgcctacagctttcagatctacttcgacttctccggctattccatgatggcaatcggcgtgggaaaaatgctgggcttccagcttccccagaacttcaacctcccgtacatgtccggcaccgccggcgagttctggagaagatggcacatcacgctgggacgctggttcaagaactatatctatttcccgctgggcggcagccgtgtgggcaagtggaaaaccatgcggaacatgctggcagtctgggcgtttaccggactgtggcacggtgcaagctggaactttgtgctgtggggactgatcttcttcgtgcttctgacactggaaaaaaacgtctacggcaaattcctggaacgcacccatctgctgaaacatgcctacatcatcttcatcataccgctgacatggatggttttcgccattccggatatgcaccagctgggcacctatttcacaaggctgttcccgttcctcacctctgacgaagtgcagtccaacacccgagatgcggtgcaggcgttccacaactactggaaaattctcgtgccgtgtgtgctgttcagtacgcctctgccgctgatgtactacaaaaaattccggaaaagcggattctgtctgctgttgctgttgattctgtttgtactctccattcgtgcgatgatgacacagaccaacaacccgttcctgtacttccagttctga

SEQ ID NO: 1295 - DNA, 1542 bp, Ruminococcus callidus
ttggaagaaaaggagaaatacaacatgagcaaaaaacctgttgcattgattatcatggacggctttggtcataatcccagtgattacggcaatgcaatccacgcagcaaagaagccaaatctggacaaatatatgcagggcccgaataccctgatcggtgccagcgggctggacgttggtctgccagacggtcaaatgggcaactcggaagttggtcacaccaacattggtgccggcagaatcgtttaccagatgctagtaaagattacaaaggatattgaggacggcaagttcttcgaaaatcctgcaatttccgcagcaatggacacttgcaaagaaaaaggaactgctctgcacctgatgggtctgctctctccgggcggcgtgcacagccacatttctcacctgtacggactgctggaaatggcaaagcaaaagggtctgtccaaggtatatgtacatgcatttctggatggccgtgacgaaccgccagcatctgccgctggtttcatgaaggaagcagttgccaagctgaatgaaatcggcgttggtaaaattgccaccatttctggtcgttattatgcaatggatcgtgacaatgcatgggatcgtgtagaaaaggcatatgatgcaatggttctgggcgagggtgtgcagaccactgctgatccggtgaaggcaatcgaggacagctatgctaacgatgttaccgacgaattcatgctgccgaccgttctggaaaaggacggcactgttaaggcaggggacagcatggtattcttcaatttccgtccggaccgtgcaagacagctgacacgttgcttcgtagatccggatttcaacggcttcgagagaaagaacggttattttccggtacagttcgtttgcatggctcagtatgatgcatccatgccgaacgtttccgttgcatatccgccggaagatctgcacatgacactgggtgaatacctgagtaagtgcggcaagacacagcttcgtattgcagaaacacagaagtatgcacacgttacattcttcttcaacggcggcagagaacagacctttgacggagaagaccgcattctggtcaagagccctgacgttccgactttcgatctgaaaccggaaatgagtgcatacgaagtaacggataaggttgttgaagcaatcaacagcgataagtatgatgtcatcattctgaattatgcaaactgcgatatggttggtcataccggtgtctttgatgccgcagtcaaggctgtagaagcagtagacacttgtgttggtcgcatggttgatgcaatcatgaaaaaggacggtatcgcattcatcaccgctgatcacggcaatgctgacaagatgctggaagcagacggcacaccgttcactgcacacactaccaatccggtaccgtttatcgtagttggcaaggattgcaagcttcgcgaaggcggcgttttggcagatattgctccgacaatgctagaggcaatggaactgccgcagccagaagaaatgactggcaagagcctgttcgcgtaa

SEQ ID NO: 1296 - DNA, 1542 bp, Ruminococcus callidus
atggataacaaagacttcaaccgcgatcaattgctgaatgagatcctgcgggaaacggcagctcccaggagccagccggctcctcagcccgcaccggcacgggatccggaaccgccaaaaccggcttccgctgctccggcagcccggccggcaccggcagaaccggtacgtcctgcggcagcaccgcagacacagcagcagccggctgcggaaacaccggcaccggaacccgacaaccgcactgttcttttcaacagtgcccagtggaatacggatcaggtgttcaccgcccggcagccggtattggaaaatgacccgctgtatgaagatctggaaggggagagccagccgtttcgtccggaatcggtacatagcaccactgccaacaccaccaagcgtccccgcaaaaagcggaaacagcatcgtgtcatcagtgcactggtaatgatcattatcatcattggcgtgtccattctgctgtccagtgccctgatcgtctacgggcgtgatcttctgggcatcaacagcgacagttccaccaagatcgttaccattccgcagggtgctaccatgaaagagatcgcagggactttgcaggattcggggatcattaccaagccggacttttttgtctttattgtgggcatgagcgacaaggataaggagatcaagcccggcgaccacgagttgcggccggacatggcgtatgaaaccattctgagcgagttgatcagtgatcccatggacagttcgctgtcggtatctgtgacatttccggagggaatgcgtctggtagatgccgcagatctgctggaagaaaacaacgtctgcgatgccgacgaatttctggattactttaaccacagtgcgaagttcggctatgcctatgaggactatctgcccagcttccaggacgaaaagttctatcagatggagggttatctgttccccgatacctatacattctatcaggaaatggacgtagaactggtctgccagaagattctggggaacttcaacgacaagatcaccaaggacatgtatgaccgcatggatgctctgcatatttcgctggatcagaccattacgctggcatcgatgatccaggcagaggcagggaacaccgagcagatggcgacgatctcttccgtattctggaatcgtctgaacaatgccaccgagtatccgctgctccagtccgaccccaccaccaagtatgtggaagaagtcatcaagcctcacagcgagtcctataatcaggatctgtatacctcttacgatacctatcagtgcaccggtctgccggctggcccgatctgcaatccgggcagcgaagccattcacgcggcactctatccggacaacaccaactactatttcttctactccaacattgacaccaaggaaacctactttgcggaaaccttgcaggagcacgaagccaaccagcagaaagtgcaggaacagcaggaagcagccgcagctgcggaaagcagcgaggaggaaagcagcgaggaggaaagcaatgacacagaagaataa

SEQ ID NO: 1297 - DNA, 1251 bp, Ruminococcus callidus
atggctgcaccggaagcagctgctccggcacccgagccgacccctgcaccgacccctgcaccgacccctgcaccgacccctgcaccggcaccggagccaaccgcagctcccgccgacagcggaatccccaatgcagcggcaaatccgtttgagatgccgcagggacagggtgccaatgtgccgccctatgatcccactgtgaatccggtgccgccggtaggtcagccgcccaaaaagaagaagaaaaccggtctgatcgttgccctgatcctgatcccgatcctgctgatcctgatcgttgtgggcgtgatcgtcggaatcggtgtcaatctgggcaccaaggcagccaagaacaatgctgcctattggaatgcccacatcaactgtgacggcgaggcattggcagaactctgtccggacagcttctgggattatatttccgatacctacgacctgtccgaggaagatgctgtggcagcgatgaaccagtacatgcaggattattccgacaccctcggcggcgacctgtcctacaaaatggaacagaacggcgtaactgccggcatgggcagctctgcacagctggatccggtgcgggaagataccgacaagttcggtctgaaagtttccaccggcgtgtgcattgatgcaacctgtaccgtcaccggtgcagacgattccgacagcgatgactattctctgtggacggtaaagatcgacggcaagtggtgcagcctgtctgcaatggacgatttcgatcagctgtgcggttctgactatgccgcttctgccaagtatatcgcagaattcggcgatatggtacagacctactggaacgccgttgtaaatgcagatgcagctaccatgtccacactggtgccggaaagctggtgggaactgatcgatgccgaatacggtgtcagccagagcgatgcagaaagctatctgaccagcatgctggaagaaatggtttccggcagcttcggcgaggacggcacaccggaactctctgtagatgtgaccggcggcacagacgttgccgatgaagaactgtcagaactgaatgacggtctggaaacctatggcattgccggcgatgctgccgtagatgtcagcatgaccgtgaagatgaacgatgaaagcaacgacacctatcttaccatgacccagatcgacggacagtggtatgtgtacgatgcaatgtatagttatgcaactgcctgctataatgcaagccagagtgtaggttaa

SEQ ID NO: 1298 - DNA, 1305 bp, Ruminococcus callidus
atggcacataagatcacacgatttctcactctttttctgctggtttccctcggcggctgcacggtacagtccgaacaccacgtaccggaaaacgccgccttttgcgacgacctgaccaagcatgtccagcaggtacaacaactgcacgtggcaagcggcaccacaccctgccccacggaaacgccggacaccgcagcagtctgcaactaccagaccacctacggcatgtggtttccctatctggactacgccgacactcttgcgggaaaaacggcagaacaatttcgggagagtatgcatcagcgattccagcaggcggcagatatgggcatcaacacggtatacctgcatctccgtgccttcggcgatgcctattactgctcccagttatttcccccagcggcagcagtgggagatttcgacccgcttcccattttgctggaggaggcacaccggctgcacctgtctgtccacggctggatcaatcccctgcggctgcaaaatgatgccggcatggctgccctctctgaccgttaccagatcgggcagtggtaccgcgacagccagaaaagcggcacctatctctgcaaggtcggcgattactggtggctgaatccggcttatccggaagtacggcagctgatcgccgacggggtggcggaaatcgtacagcaatacgaggtggacgggattcatctggacgactacttctatcccactacagaaaccgcctttgatgccgccgcctttgcagatgccagggcggacaacctgaaccagttccggctctcccaggtcaacgaaatgatacagcaaatttacagcactgtcaaggcaaaatcaccgaagctgctgctgagcatcagtccgcagggcaccatggacggcaactataccaagcagtatgccgatgtccgccgctggggcagtgaagccggctactgtgacgttttgatcccgcaggtatacttcggcttcgaaaacgaagtcgctcccttttccgaaactgtcacagaatgggtgcagactgtcacctgtgacagcgtttcgctggtgatcggcatcggcactcacaaatatggaaaagttgaccaatgggcaggctccggcagcatggaatggacgactcagtgggacttgcctgtccggcaggcaacgcaggtgctggaaaccgacggcacagacgggctggcggtttacgactatgccaccacatttctgccggaatccaacgccgaccgtatggcacagcaggtggaacagctgggggcattgctgcggggaatgcctgccgatcccttataa

SEQ ID NO: 1299 - DNA, 1359 bp, Ruminococcus callidus
atgaaaagcattcaaagtatccgacgcggagaacggctgaccattctgattttgattgtgtttttcctaggcatgggtgttttggtttggaaagtagtaaaagaatcttccttttatatgtcccattctgatgatgtgacgctgggaatggtctatgaccgaaataatcagattttatttgatccaaatgcttctacagaaacctatgacgaaaattacttcttagatgtgggaaatgtgattggcgatgacagcggtcagatgacaaatacgctggtttccgaaaacattgaaaaactgcaaaactatagtttgatttttggtgcaacgcctcacggaaaaacggcaatttactccacattggatcataaagccaaccaaacggtatacaatgcttttggcagcaaaaacggaacggcaatcgcttacaactatcagacaggagagattctggtgtgcgtcagcaaacccagtgtcaatattctggataattacagcaatatcagcgaattgccggacggcagtttgatttgcaaagcgttttatgaaaccactcccggctccacacaaaaaatagcaaccactgctgcggctctggaaacattcggttatgatggattgatgtccaaaacatatacttgcaacggcatctataccacaaaatacaatcagcagatcaaatgtcatgaccttaacggacatggcacacagaacattgtgcaggggtttgaaaacagctgtaatccgttttttgcacagctggtacaggatatgccgttggataacattattcaaacatacacacgtatgggcattgcggtaaacgatacaaaaatgcagaaaatccaatttgacgggttatcttcttttagtgcttctacaaagctgacagataccagtgacttcgacaccatgtggagttgcatgggacagagcgaagcacttgcaagcccactgcaaatgatgctgtgggagagtgccattgccaatgccagcggaaaagtaacagagccctatctcattgaccatactactaacgtgactgggagcacaaaatatgaagcaaaaaccacctatggagagaacaacatcttttccgcagaagtagccagtcagataaaacagatcatgcgacaaaatggacaggaacgctacagttctattggctatcccgttggtgtaaaaagcggtacagcacaggtacagaacggggcatcggaaaattctttgttggttggattcaatgatgatcccaatttaccgattgcattttgcgtagtaattgaagatcgtgtttctggtgagatctctacttcggatattgtttcaacaatgctgaatgcactgaatcaaaactaa

SEQ ID NO: 1300 - DNA, 1038 bp, Ruminococcus callidus
gcagaaactgccggtttccatataataaaaacacatgccgcatcaagcggcagaaagggaaggaattttatgtatcaggatctgaaactggaaaagggcatgtatcacatcactggcaagagcttttcagaggtactggagggcatggacccgtctggcgcgtatgccgaaacaccccttgccggactggacgcgtatgagcgtcagctgaagcgttttgacattcacgtcagcggttcccactgtgaccgcgtggagaagttcttctccaccacagacagtgcggtgctgtttccggagtttatccgccgtgccattcgcagcggcatggaacagtctgtgctgtctgatctggtggcagtgcacaccatttctcccgccggagagtatcagccggcagtgctgacggacactaccgcctataccaccaagaccacacagggcaatgccctgcccactgcctcctatctggaagcagcaaacaccgtgcgactggacaagtacggccgttccattcacgcttcctatgaggcagtccgccgccagcgtctggacgcattcagtgcgatcctccgtgccgtgggcgtgcgtctgtccaacgggctgctgggacagagcattttgtgcatgaaggaaaccaatggttccctgatcgacgttgtcacagacggcaagctgacttatgctgatctggcgaagctgtacggcgaattccgcaacttcgacatgaccaaggtgctggcggctccggcggtggctgcggaaatcatggcaatggagcagatgcaggatatggcttctgcacagcccaacaccattttgctgccctttggtgcccagctgcaaaagtgtgccggcatgtccgcagattacatcgtgggactggacaaccgctttgctctggagatgatcaccacagacgatgtgctgctggaaacagacaagctgattgacagccagctggacgtgatcacggtttcgattcgtgcggcgttccgcgtgatgctgagtgaagcagtacatgtgctgagcctgtaa

SEQ ID NO: 1301 - DNA, 495 bp, Eubacterium sp. CAG:251
ttggcaggaaaaggaaatactgtatcaagggtaactgaaattattaccccttacgcacatcagctcggtcttgaaatttgggacgttcgatttgccaaggagggtacagattggtatcttcgcatatttatagataaggacggcggaatttcaattgacgattgtgttgatttaacccatgcaattacaaagccgctcgacgaggctgatccgatttctcaaagctatactcttgaggtcagctctcccggtgttgaaagggagcttaccaccgatgctcactttgaaaaatatattggctcaaatgttatgttaaggcttattcgccctattaataacgtcagggattttgccggaaagcttaaggcttattctgacggtgaaattacgcttgaacttaaggacggcgaagaacttaaagtaaacaaaaaagagacatcattcgttaagcttgatgactttgatataaaagattttgaaaaagaaatgaattaa

SEQ ID NO: 1302 - DNA, 681 bp, Eubacterium sp. CAG:251
atgattttatctgttgactcttcggctgttacggcatctgttgccttgactgacggaaaaaaggttattaaaagtgaatttattaatgcaggtcttactcacagtgaaacgcttttacctatgattaaaagggtaatgggggattataaaatatctgaccttgacgcaattgcagttacggcaggtcccggctcttttaccggtgtaagaatcggcgtggcaacggttaaagggcttgcgtttaatgataatattccttgtgtcagcgtttcaacgttagaagcgattgcgtgtaattttcttgatgaggattgcattgtttgctcggttatggacgcaaggcgtatgcagttttataatgcactttttgaaataaaaaacggcaaagcggtaagactttgcgaggatagggcaatttctattgacgatttgaaaaatgaccttaaaaagtatgaaaaagtaattatcgcaggcgacggcgcacgcctttgctatgataatttaggtattgacaatataattttagcgcctgaggataaaagatatcaatgcggtcagggtgtcgctcttgctgcagaaaataaagaaaaaatttcagccgccgctcttatgcctgtttatttaaggctaagtcaggcagaacgggagcttaagctaaaaaagaaagacaaggagaattaa

SEQ ID NO: 1303 - DNA, 426 bp, Eubacterium sp. CAG:251
aaatatatgaataaatcagcaattgtttattggagcggcacaggtaataccgaagcgcttgcagataaaatttttgaaagcgcaaaggcaaacggaaaggacgttctgctttttacggcaagtgagttttcagccgacaaggttgatgaatttgacactatcgcctttggctgcccgtcaatgggatgtgaacagcttgaggatatggaatttgagcctatgtttgaaaactgcaaaccaaagctcaaaggcaaaaatatcgctcttttcggctcttacggctggggcggcggagaatggatgaacacttgggaggatgattgcaaatccttaggtgcaaatcttatttttgacagcataatatgcaatgatgcacctgatgatgaagcgcttgcaaagtgcgaagaattgggcaaagcattataa

SEQ ID NO: 1304 - DNA, 723 bp, Eubacterium sp. CAG:251
atgattaaattaattgataatcccgacgaatttgatacttttaataaggacgatatattttttatccgcattatgtccttgttgaaagcatattcaactgaatataactttgcgcttttttacaagcaaattgatgaaagcgaaaatataacggcaataatttctcgccttgataatgattataccgtttgccataatgataacttcaatcaaaaagaacttgacgattttttcaaaacgcttggatttaattcaatcctatgcgatgaagatttaaagttgtctttttcctatgattacggaataacaatggcaacaaataaaaagattgaaaaaactataaattatgccgagattgatgaatacccaaaacttatggatttatttaatttggaggattattcgtcagctgattttgaaagttggtatgttgacgtaagccacagaatcaggcacggtgcggcaaaggccgtaacactgaatattaatggcgaaataatttcaagtggcatattttcgtcgatttataataatgacgcaatattgactgctgtgtccactcaatctgaatttagacgaatggggtatgcaagtgctcttgtcagcgcaatggtttgcgatataaagggcaaggtatatttgatgcgtgacaagaataaaaacgaagagttttacaaaaaactcggatttgaaaatatcggctattggagaatgtataaatga

SEQ ID NO: 1305 - DNA, 408 bp, Eubacterium sp. CAG:251
atggtagagcttagagcgtttaaggttaataaacttgaggttgaaaatacggttgcacccggcactcagcttaaacttcaaaatcaggttaaatataatgtgaactatatggacggcgacaaaaagtgcatcggcattttagaactcagagtggcagatgcggatttgcaaccgtttgaaatcaaaattgaagcagttgcagaatttgcctacggtgatgaggatgcaaagccggatattcatacttcgtcttttgaccagcttttcccgtttgtaagagagattattcataacgtgacgggatatacgggaatgtcggggcttcttatcccgattatccgtcttaataaggacaccgtcaaggtcggcggccctaatgacgacaaggaaacttcaccgctgaattga

SEQ ID NO: 1306 - DNA, 894 bp, Eubacterium sp. CAG:251
atgaaaaaaactaataatactgccaagggtataatgtgtatacttttttccgcattgagcttcagcggaatgagtatttttatcaatatgtcaggtgatgttcctgttatgcaaaaggtctttttcagaaaccttgttgcacttgctattgccactgttactcttgcaaaaagtaagcaaccatttaagccgcataagggttgtattaaatatcacattttacgctcatcgctcggtctttccggtatgataggcaatttctatgcaacaactaagatgtcatcaacctccgatgcggctatgcttaataaaatgagcccatttttcacgctcgttttttcatatatatttcttaaagaaaaattcaagcctaagcaggcgcttgctattgcgattgcatttgcaggatcgctttttgtaattaaacctactctttcaaatgtcgagcttttaccgagtgtcgccggatttttgggcggcgtcggtgcaggtgcggcttatacttgtgtaaggcacatggcaaataagggcgagaacggaacgtttactgtatttttcttttcgcttttctccgtgatttgcacggcgccgtttttgattttcaaatttactcccatgacggcaaagcagtggatatgcttaattcttgtgggtgtgtgcgcagcaggaggacagtttggcatcacctccgcttatacttttgctccaagcagtaaaatcagcgtttatgattattcaaatgttatctttacggcaataggcggctattttttgctcgaccatcagcttcctgacttgtggtcgattttgggctatataattatttgctcaatggcgatttggatgttcttatacaataaaaaggaagatgagttaaaaaacgctaaccattaa

SEQ ID NO: 1307 - DNA, 732 bp, Eubacterium sp. CAG:251
atgatggaaaagtttatacctgatgaggcaagaatacagtcggtgcaggataattataaaaaggttttgtctgatgttaaggaaaccgcaatcaaagccggcagaaatcccgatgatgtaagacttatggctgttaccaaaacagttgaaagtttttatattaataaggttctcgacttgggtgcagaccttataggcgaaaacagagttcaagaatttttaggtaaaaaggacgaacttcatttgaacggggttgaaaagcaccttatcggtcatttgcaaactaataaggttaagcagattgtcggcgaggttgatatgattgaatctgttgacagcgttcatcttgcaaaggaaatcagcaaaatttcttcaaagaaggaaattacaacaaatattttgcttgaagtaaacgtcggcaaagaagagtcaaaaagcggaattttccttgaagggcttaacgatttaatagccgaggtttccgaaatggagaatattaagataaaaggtctcatgactattccgccgatatgtgacagtgaggcagaggtttcaaagtattttgagtcaatgtatcaaactttcattgacattaagaataaaaagattaataatgtagatatggatattttatcaatgggtatgagccacgattatgaagctgccgttaaaaacggttctaatattgtaagagtaggctctgccattttcggcgcaagaaaatatttttaa

SEQ ID NO: 1308 - DNA, 537 bp, Eubacterium sp. CAG:251
atggacagaagaattaaaaggacacgaacagctgtttttaatgccgttcttgaccttatggttgaaaaggatacaagcaagattaccgttttggagctttgcaagcgtgcggatattaataaaagcacattttatttgcattacaaaagtatggacgattgcctgcaaaactgttttcaaatcattatgaacggtattatcgacatttcaaagaagattaattataatgaaattaagcataatccccaacctgcggttgacaggcttcttgacgaggtggagaaaaatattgaatacctttcaaaattcaagtcaagcagtatttgtgcaccggcaataaaaatgcttaaggaaaatcttgttgcatcaatttctcaaagcaacggtttcactattgaagataattatttcgaggtttcaacaattacgttcggcgttgccggctgtattgatgctcttattgagccgctccctgtttttaacaaggaagaactcggcaaagtaatcgttgcgatgctccaatcgtcaaaagaataa

SEQ ID NO: 1309 - DNA, 711 bp, Eubacterium sp. CAG:251
atggatttacagcaaattattgacgaatgtaataaaatagtatttttcggcggagccggtgtatcgacggaaagcggaatacccgatttcagaagtgttgacgggctttataatcaaaaatacgactatcctcccgaggagatactttcgcacacgtttttctacagccacactattgattttttcaaattttacagggataaaatgctgattgaaaacgtcaagccgaacaaggcgcatctaaagcttgccgagcttgaaaaagcaggaaaactaagtgcagttgtgactcaaaatattgacggcttgcaccaagcggcaggaagcaaaaaagtatatgagcttcacggctcaacgcttagaaattattgcacaaaatgcagaaaattctttgatgcaaactatatcaaaaacaacacccctattccctattgcgacgaatgcggcggcttggtaaaacccgacgttgtactttatgaagaagggcttgatggcgataccgtaaacggtgcgcttgaagcaataagcgatgccgactgcctgattattgccggaacaagcctgacggtttatcctgcggcaagctttgtaaggtatttcaggggcaaatacttagtgcttataaaccgtgacgaaacaccgatggataaaaatgcagaccttgttattcacgacaaggttggtgaggttttatcaaaaataaaggcataa

SEQ ID NO: 1310 - DNA, 579 bp, Eubacterium sp. CAG:251
atggctaagcttaaaatatgcggtttaaaaagagttgaggatattgattatgtcaacgaactgaaagtcgattatatcgggtttatcctaagtgccggttataagcgaagcattgattttaaaacggcgcaatcgcttaaaaatcgcttgtcaaatgatatcaaggcaatcggagtttttgttgacgaagataaaaaatatattgattattatataaaaaacaatataatagatatagttcagcttcacggcaacgaagagcctgaattttgcaaaggctttgacgtgccggttataaagtgttttaatcctgatactttcagcaaagttgatgaatatgacacggattatttccttttcgattccggtgcgggaacgggtaaggagtttgattggagcattttgcctgaatgtgaaaagccgtttttccttgcaggcggaataaataaggataatttaagacgtgcgcttgacgaggtaaagccttttggcattgatttatcctcggctgtggaaacgcacggtgttaaagattataacaaaataaaagaaattgcggagattatgaaaaatgagtaa

SEQ ID NO: 1311 - DNA, 381 bp, Eubacterium sp. CAG:251
ttgaagtatgtaaagcaatttttaatcattcttttgatttcgtttataggcgaagggcttaattatctgattcccgctcctgttccggcaagtatttacggaatggtgattttatttgtttgcctttgcacaaaggtcgttaagcttgacgatgttaaagatacgggaatgtttcttattgaaattatgccgcttatgtttattcctgcaggtgtaggtcttatgaaaagttggggagttttaaaaccgcttgtagttcctgtgcttgccataacagttgtttctctaatcgcagttatggctgtcagcggtcgtgtttctcaaaaaattattgtaaaaaatgataaaaaaggagaaagcgagggcgctttaaatgaataa

SEQ ID NO: 1312 - DNA, 402 bp, Eubacterium sp. CAG:251
gaggtatttttgatgaaactattacttgatgaaaagacgcttcgctttgtttggggtggaagcggtgaatattggtattctagagttgattctcaggttcactcaagcgttgaacttgaatgtgacgataccgaggatttaatgactaacggctttattcctttcttgacaatctctaatgaagaggttatcagagcctatatcaaatttcttgataataaaaaggtcagcgctgttttggaaaagcttacaggtaatgaatatattgacactttttggaaatattttaatgcctattcttccataagcgagggctttgacgaatttgaaaataaattcgttcttgaaaaggctgaggaatggtgtaagtctaattctattgaatattcagttgaaaaataa

SEQ ID NO: 1313 - DNA, 1011 bp, Eubacterium sp. CAG:251
atgaaaaaaacaattaaaaaaattgcagctgttttatttgcagttgtaattgcagtcgcttgctttgcaggctgttcaaaatcgggcggcgagcacgacaaggtaaacgattcaaaaaaggctaagttcggcattgtggtacaaacaggtgctaacggcgctttcgttgatatgaaagacggaatcattgaggaaatgaagaaaaacggttatgaaaacgctgagtttgactacaaggatgcgcaaggcgattcaacaactcttacgacaattatcaacgctatggacgacggaagttatgacgcaatctttacaatcggcactgcatgcacgcaaactcttgttaatttagcatctgacacaccttgtttcttctgtgcagtatctgcccctgttgaggctcaggttattacagatatgaacacacctgacaaaaatgcaacaggcacatcaaatgcaatccctgtatcagacattattgatatgggatacaaaatcactcctgatgttaaaaagtggggctttatttattcaacatcacaaattaacgctgtaaatactgttgaatcagcgcaaaaatatcttgacaaaaaaggtgttaaatacgaaagcgcaactgttgaaacatcggcagacgttaaatcttcaacagaaacacttattaaaaaaggctgtgatgttatcttcgtacctaacgacgcaattgttcaagatggtgtaagtgcgcttgctcaggtttgcaacgaagcaaaaattcctacctactgctcatctgcaacaacagtaaacagcggttgccttgctactcttgctattgacgataagggcatcggcgctaaaaccgcagacaaatgcattgagtatatgaagggtacaaaaattgagaaaattccggcagaggttgtaggaattgactattgcacattcaattccggcacagcagatatgctcggcgtaaaagctccggataagaacactatcggctacgaaattcaggtagtaaataaataa

SEQ ID NO: 1314 - DNA, 666 bp, Eubacterium sp. CAG:251
atgtactcgcattgtatccgccggcaaaataacttgccaaagcttgagcgtttgtgtgttttgcgcaagggcttaggaacagtagcagaaaggaaattaaatatgaaaacaaacacaagaaagattgccggagtaggacttctcacggcagtagtagttgtgcttcagctactcggtagttttatccactttggtccattctcaatttcgcttgtacttatccctatcgttgtaggcgcttcgctttacggcgtattatcgggtgcgtggctcggtcttgcatttggaattactgttttaatttcaggcaacgctgcggcttttttagccgttaatccgggcggaactgtagttacggtccttctaaaaggtgcgcttgcaggtcttttggcaggtgcagtatacaaagcaattgaaaagaaaaacaaggttgttgcaacaatcgttgccgcaatcatttgccctgtagtaaatacaggtatatttttaatcggttgtcgcctattcttctttgacacaatcaaaacctgggcggcgggaacaaacgtattcgtttatatgattacaggacttgtaggcttcaacttcttatttgaacttggtttaaacataattctttcacctactattgttaagcttacaaaacttggcagaaaggaaaaataa

SEQ ID NO: 1315 - DNA, 417 bp, Eubacterium sp. CAG:251
atggatacaactgaaagcttaggctatcttaaaggtttaatcgaaggtcttgaccttggcgacaacaaaaaggaaacaaaggttttctctgcaatcgttgacgttctttcaaatcttgttgaggatattgacgatatgacagacggcgttgaaatgcttgcagaccaggttgacgctgttgacgaggatttagcagaccttgaggaatatgtatacgacgacgattacgacgacgagtgcgattgcgacgattgctgcgacgacgatgaggaagaatttgaggttgaatgtcctctttgcaacactcctttcacagtagacgccgaaacagcacttaacggtactgttccttgcccaaattgcggcgaaatgcttgaatttgaggttgaagaagcagacgacgaggacgctgaataa

SEQ ID NO: 1316 - DNA, 345 bp, Eubacterium sp. CAG:251
gagggtgtaattatgtgtttgttttgtgaaataattgacggcaaaattccttcaacaaaggtgtatgaggacgatatgattcttgcattcaaagatattaatcctgttgctcctgttcatatcgtaattgttcctaaggttcatattgattgtgcaaacggtgttaatgaggaaaatagcaaatatgttgctcatatttttgaaaaaatacctgaaatcgtaaaaagccaaggaattgactcttatagaattatcaacaattgcggtgaagatgcaggtcaaagcgttatgcatctccacttccaccttataggcggtattaagttaggagaaaaaattatatga

SEQ ID NO: 1317 - DNA, 831 bp, Eubacterium sp. CAG:251
atgtatttttcattccttgccgtaagtatcactgcgcttgcggcttgctttcttcgcttttttcaattaatcagatttactgacagtaagacaggctttgttatcggaaatgagctaattacctatattctttacggagtgctcattttgtcagtcgtatttgccgtgatttattctttaattgcaagaaataaaataagaaaaataagttttatcggcaataaaggcatttacatatcgcttatagctttgtgtattgcatacttttttgattttgttcatcaagtaaataattgttacagctatattcaaacggcaacaagacagtcgtatgttgaatataattacttgttgcctatgggatttcaggcaatttttgcacttctaagttgttattatttaattgtttgtgccaagtctgtcagagaaacgaaaatcgattttaaaaatttcaagctgtttcaccttgtccctcttgcgtggggcttttgcagattgcttgtcattatgacggaaatttttgatgtcgaaagcgtagaaagctttttggaatttatatttataatattttattgcggtttcaccttgtgctgtgcttcgagcattgataatgaaaagaagcttatcaaaccgtcgtttagtttttttgccctcggtcttttttctttaagcttttcattttcatttgcaagaattttaatgattatatccggcgagtatgaaaagctgagcaaggtttcgttctcagctgttacatatttatttatcggaatttttgctttaattagtgaactttcagtttatataataaaaaataaaggtgataattaa

SEQ ID NO: 1318 - DNA, 324 bp, Eubacterium sp. CAG:251
gaaatttgtaaaataatggatatcagatatcatcatcttttatgccttccgagatttgaaggcaaaggatacagcgctgatttttgcaagaatatggcaaatgttaaaaagcgatataataatgaaaaaataacgcttgttgaacattgcgatgaaatttgctcgcactgcccaaacaacaaaggcggaaaatgcaaagaagaagagaaagtaaaaagctacgacaaaaaggttaaaaagcttatttccctcggcataaaaccgacgccaaatgacgtttgcagcgactgcaaatggtattatatatgtaaaaatcttcattaa

SEQ ID NO: 1319 - DNA, 726 bp, Eubacterium sp. CAG:251
atgagcggagtattgatttacagcgaaaaggaagcaaagcgcaacacctttgcgataaataaatttaaagaagaacttggcgtaacgcttgcaattaacgattatgacggcacggctgattttataatcaacaggacgaataactataaaattgcagaaaaatttgagaaaaaagggatacgtgtttttaacccctcctccctctcaaaacttgcaaacaacaagcaactttgctacgaatttatggagaaaaacggcattgaaattttgccgataaactacaaggaagtgcctgcggttaaaaagccgattgacggccacggcggtcaaggtgttgtgatgataaatgagaaagaaagctttgaaagcggatttgtttatcaaaagccttgtgccactctcggcaaggacttgcgtgtttgggcaataggaaatgatataattacgtcaattttgagggaaagtgataccgattttcgctcaaatttctgcctcggcggcagggcaacaccttataaaatgaacgaaaaagaaaaaagccttgtaaaaagaattttcagccttgttgaaagcgattatatcggaattgattttctttttgacggcggtcatttaatatttaacgaaattgaggacaccgtcggcgcaagaatggtatatgataaaaccgatattgacataataaaactttattgcgattatattaaaaaacaaagagtaaaataa

SEQ ID NO: 1320 - DNA, 360 bp, Eubacterium sp. CAG:251
atgggagttgttaactgcaattgtaatataactgatgaagaacttattaatgatattaactcttcaatgctaagttcttctcaaatagacagaatatcaactctgttcaaggtgctcggtgactctacaagggcaaagattgtgcttgctcttgacaacagagaggtttgtgtgtgtaccttagcaaatgccctcggtatgacaaaatcggcagtttcacatcagctcgccatccttaaggctaataatattgtaaagtcacgacgtgacggtaaacaggtttattacagctttgatgacgaacatataactgatattatagaaattgctcaggcacatataaaacatcagcatgattaa

SEQ ID NO: 1321 - DNA, 711 bp, Eubacterium sp. CAG:251
ttattaatgaattttgaaaagaaatttgaagtgttttggaaattctttattgacaacggcggctacaatgttgttattgaaggcttaagaaacactcttataattgctatactcggccttgtaataggtatcattataggtacacttattgcaacagtaagagtagtaccgaaaacaagcggcgtcacaaaggtgcttgatgtgcttgcaaagttttatgtaagtttcttcaggggtacgcctatcgtagttcagcttcttttgttctattatgtgcttatgccgcttctttcaattaatttaaagagcgtgccggttgccgttattgtttttggcttaaactccggcgcttatatttcagaaattatgagagcaggtattctctctgttgaccccggtcaaatggagggcggccgtgctgtaggcttaagttacggcacaacaatgatgaaaattgttattccacaggctgttaaaaatattcttcctacccttggcaacgaatttatttctcttattaaggaaacctcggttgtcagcttcgtaggcgcaacagacctttatcttgcattccagcgtatcggttctaacacatacgactttatggttccttatcttgtaatggctgttatttacattgtaatggtgtttataatttctactcttatcaaaattatggaaaggagtttgagaaaaagtgattaccgttaa

SEQ ID NO: 1322 - DNA, 1257 bp, Eubacterium sp. CAG:251
gtcttggaggtgttgaagatgaataaggtaacaagacttaaatattatattgaatcgctttgcatttacgattttgaggatgatgacgttttctctgctttatatgatttgctttgcgacgatgaagaggacacggtagcacttcaaagttacttttttaaggagcttgcaaaaagcgaatcgcttaaaaggcatatttcacgattaattttgactaatgacaatattttcactaaagcggcatgtgcaggaaaggtaaatcaactttcaatcgcagtcataaatgcggttaaaagcgaccttgcaaaacttgaagaaatcgcttctcttaccgcacaggatattttggcagatattgatgatgaggatattaaggaaatccttttgactttaccgggctgggaggtaggcaagccgcttgctccgttagattctcattgggacaggcaacttgatgaacttattaagtatcacagagaaaacggctacggtatttatgccaaaaatattgcatttacttggagagatgaggaaatcactccggttaattccattgatcctatccgtcttacagatttgaaaaattacgaacttcaaagaaataaggttattgataataccgaaagctttatcgcaggtcatccggctaataacgttttgctttacggtgacaggggaacgggcaaaagctcaacagttcacgcaattttgaatgagtattggcaaaagggacttcgtatgattgaaattcctaagagtgctgttgccgacctttcgcttattcgtgagcaaattgccgattcaccaatgaaatttattatttatattgatgatttaagttttgactctaacgatacctcgtttagcgaacttaaggcagctcttgaaggttcgctttcgggcaaacagccgaatactattatatatgcaacgtctaacagacgtcatttgattaaggaaaatttctctgacagggaaaatgatgttaataagggagatactatgcaagaacagctttccctttccgaccgcttcggtcttacaatcacatttcttaatcccgataaaaaggaatatcttgatattgttgaaaaacttgcttgcgacaggcattttgaagagcacggcgttgacgttgataaacttcttttcaaagctgaccagtgggcaacaaggagaggcggacgttcgccgagaggagcaaagcagtttatcgaccatgttgagggttgtataaagcgtggaaaagaatggtaa

SEQ ID NO: 1323 - DNA, 699 bp, Eubacterium sp. CAG:251
agaagatttatgcaatacgaaattaaaggaactccattccctgctgttatttgccatttgcaagacggtgagcagatgattacagagggcggcggaatgagttggatgacgcctaatatggttatggaaaccacaacaaacggcggcctcggaaaagcttttggcaggctcttttcaggcgacaaaatgttccaaaacaggtacacctgccgtggcggagaaggtatgatttcatttacaagctgttgccccggcaacattcgtgccgttgaaattcatccgggtcagtctgtcatttgccaaaaaagtgcatttttagcatctacacctggcgttaatatgtcaatttatttcaaaaaagcccttggtgcaggccttttcggtggtgaaggctttattatgcagaaatttgaaggcgagggagtcctctttgttgagcttgacggctctaccgttgaatatgatcttcaagccggcgaacaacttgttcttgacacaggccatctcgcaattatggacggcacttgcagtatggatattcaaaccgttaagggtgctaaaaacattttcttcggcggcgaaggacttttcaacacagttgtaacgggaccaggcaaggttgttattcaaacgctccctgtcaataagcttgcgcttgagctttaccgttatatgccacaatcaggcggcaacggataa

SEQ ID NO: 1324 - DNA, 324 bp, Eubacterium sp. CAG:251
atggattatatcagaaacgattatgaaactatccttgaaagaaaagaagcacagcaggagggtagttatacctgctatctttttgaaaaaggacttgataaaatactcaaaaaagtgggcgaagagtcaacggaaatggttatcgccgccaaaaacggagtaaaggacgaaacagtcggagaaatttgcgaccttatttaccatacccttgttatgatggcaaatgagggaataactcccgacgacgttgacgaggaacttagaaagcgtgccgaaaaggcaggcaatttgaaaaaatttcacgtggtagataaaaattcataa

SEQ ID NO: 1325 - DNA, 912 bp, Eubacterium sp. CAG:251
atattaaataaacataaaaataatagactcttttatcattttgtgtatgttgactttgagagcattagcgttataatacatatattagataattggaatatactatttggaaaaatagtatatacaaaaaggaatgatacgatgcttattaaatttattgtttgccttgtggcaggtataggcgcaggattgggtacgggttttgcaggtatgagtgctgctgccgttatcagtcctatgcttattacctttcttgatatggacccttatatggctgtcggtattgctcttgcaagtgatgttttggcgagtgccgcttcggcttatacttatggaaaaaataaaaatattgacatcaaaaacggcattgttatgatgatatttgttttgctgtttactcttgtcggaagttttgtttcaagtaaggtaccaagcacaaccatgggcggattttcgtttgtaatgaccttgtttttaggtattaagtttattgttaaacctgttacagagcctaaggcacgacttacgcaggcaactccaaagcaaaaaataatccgttcagctttatgcggcgcaatggttggctttatttgcggtttcattggagcaggcggcggaatgatgatgcttcttgtgcttacatccgttctcggatatgaacttaaaaccgcagtcggaacaagcgtttttgttatggcgtttactgcatttaccggctcaatcagtcattttgcaatcggcggcgctcccgattggtggacactggctttttgtatgttatcaactcttgtgtttgctcaaattgcagcatttcttgcaaataaagcaaaaccggaaacacttaacagagtaaccggcgttatccttgtaattctcggaatagttatgataattgttaataaaatcaaataa

SEQ ID NO: 1326 - DNA, 609 bp, Eubacterium sp. CAG:251
atgattttaactcatcaaaaaggcagaggaactaaggttcatctgtttcttgacggggaatatgccgccactactgatgaaaactgttggcttgataattatatttcaaatggagcagatattgatgatgagcagtggcaggctcttcttgttaaaataaattacaaaaaagcgttaaataaatgtgccgactatttatcaaggcgtgattattccgttaaagagcttaaaacaaagcttttaaaatccgttgatgaggtaagtgctcaaaaagcagttgacagatatatcgaagcagggtatcttgatgacgaaaagtattgccaaaggcttattgaatatttacttgaggtaaaaaagttttcaacagctaatattaagcaagagtgctttaagcgtggtatcaacagggagattgttgacgaaaaactgtcaattattgaaattgataacgtttcaacaattatcaaacttattaaatcaaagtatgccacaaagcttaatcaggaaaacgggaaagaaaaggtaatcgccgcacttcaaagaaaaggtttttactattcggatattaaatcggcattttacaggatagaagaatatgacgaataa

SEQ ID NO: 1327 - DNA, 654 bp, Eubacterium sp. CAG:251
tattacggcataaaagccgaatatatgaaaggaaataatataattatgagctgtaacaacagaaatctcagaaatttagatacgaatatttattcttcttcaaacggttgctgtgacaccgattatgaagttaaaatggtagagcgcttgataccctgctatgtttatcctccacgtcctatgccgccgtttgagccaataccgcagcctcctcatccacctgttcctccatttttgacaccgactgctgcttatgctctgttttataacaattcggcaacaggcgcaacctacgctgccggagaaaacattgcttatcagtcaactctttataatactgccacggcagatattgtcaataacaacggacttatcacactttcaggcggcacaacaggcaaagcatatcttgtaaattatcaggtaacaggcgaaacggctaatgatgcaacattggcgcttgcaattaacggcacagttgattcaaacagcgaaattgttccaaacagtgcaacaggaacctcaaacggcagttatattgtaaacgttcctgcaaactcaacctctacatttgctttaagggttgtatcaggcacgtttactaccgcctcacctactgtcggttcgtatttatctgtaataagaatagcttaa

SEQ ID NO: 1328 - DNA, 780 bp, Eubacterium sp. CAG:251
atggagatacaaaatatgccaaaggaagaaaaagattacagaacaaacgataatttgataataggcagaaacgctgttatagaacttctcaaaagcggcagagaggttgaaaatgtgcttgttgcaaagggtgagagggaaggctcaattaaccgtattattgcaatgtgcagggaaaataaaatagttgttaagacagtggacaggaaaaagcttgattttatgtgtgccggcggcaatcatcagggggttgcggctaatgttccggctcacagctattcaagcgttgatgatattttggaatatgcaaaaagcaaaggcgaagcgccttttattataatttgcgatgaaattgaggacagccataatctcggcgcaattatcagaactgccgaagcttgcggcgctcacggaattattattccgaaaagaagaaatgttgggcttaattttatcgttgcaaaaacctcgtgcggcgcacttgaatatgttaaagttgcaagggtaggcaatttagtttctgttattgaagaacttaaaaagcagaatgtttgggtttactgtgccgatatggatggtcagccttggtgcaaaacagacttttccagtggctgtgcacttgttgtcggcaatgagggaagcggtgtcggcaggctcattaaggaaaaatgcgatgtaactgtttcgcttcctatgtgcggaaaggttaattcgcttaacgcttctgttgcggcaggtattattatgtatgaggtcgcaaggcaaaggctcggtctttaa

SEQ ID NO: 1329 - DNA, 1158 bp, Eubacterium sp. CAG:251
ttgttgcaggcgcagttaaaggataatttaaaggagttttttttagtggcgtcaattaccttaaatcatatagtaaaaacctttgatgacggtgtaaccgttatccctgacttaaatcttgaaattaaagacaaggaatttgttatatttgtaggtccgtccggctgcggcaaatcgacaacacttcgtatgatagccgggcttgaggatatttcttcgggtgaacttattataggcggtaaaacggtaaataatattccgccgaaagacagggatattgcgatggtttttcaaagctatgcactgtatcctcatatgactgtttataaaaatatggcatttgcgcttaagcttcgcaaagaacctaaggatgttatagataaaaaggtcaggcaggcggcaaaaattctcgaacttgagccgtatttaaatcgtaagccaaaggcactttccggtggtcaaaggcaaagagtcgcactcggcagggcaatggtaagaaatccttgcgcatttctgcttgatgaaccgctttctaatcttgacgcaaagcttcgcacccaaatgcgctctcaaattgcactgcttcataaaaggcttgaaacaacatttatttatgtaacccatgaccaaacggaagctatgactatggcagacagaatagttgtaatgaaagacggcgtcgttcaacaatttgatactccgtcaaatctgtataatcacccttgcaatatgttcgtagcaggttttataggtacgcctcaaatgaattttatcgacgcaacaataattacatgttcgggagagctttgcgcacttgttgacgatattaccgtccctcttcctttgcgaatgcaggaaaacgagaatgtaaaaaaatatgtcggcaagcctattgtttacggtataagatgtgaggatatgcatataaattcaagttatgcacttgaaaacaagcaaaatgaaattacactcaaagccgacttggcggaaatgatgggcagtgaggtctatatctattcatcaattaacgataaagaaataattgccaaggtcagaagtgatacaaatatttcctcaggcgacagcgttaaactttatatcgacacggaaaaagttcatttattcgaccctgaaagcgaacttctgatttgtgactga

SEQ ID NO: 1330 - DNA, 573 bp, Eubacterium sp. CAG:251
atgaaacaaattaataactcgcaaattatatatacagacgaaacaataacagtagaaaacaaaaacacatttaaagaaaatataactgaattcgttaataaacacgcagaaatttggaaatttataaaatttacatttacaggcgcttcaacctcggttttggagcttgcggtcttttggcttttgcaatatgtgatttttaaatcgcttaacgaagttccggtaacagataatcaagttctttcgttcttaggcattgagtataagggctatatgtattcctatttcatttctgcggtaatcggctatgccgccgcttatgttatgaacagaaagcttacctttaaggctgacgctaaccctgttctttcaacaattctttatataataatggttgtttgcacaattgcctttaacacttggtttggctcatttcttggcactcttattaaaaacagcggtcacgacagcgtatttattgttcttttaacaaagcttattgttatgacggttcctactctttggacgtatcctttaaatcgttttgtaattcacagaaagaaaaaggcttga

SEQ ID NO: 1331 - DNA, 1410 bp, Eubacterium sp. CAG:251
gtgatatatgaaaggaaagcgatttttttgcaggaagatacagcaaaaattaaaaaagacaaaactactcttttgatgactgatggaaatatttggaagcttcttattgtattttctattcctcttattttgggaaatctccttcagcaaatgtataacacagccgattcaattatagtaggcaactttgtaggcagtaacggtcttgccgcagtaggtgcgggtactgctcttataaatttgattattgcttttgcgcagggtgctgctgtcggtgcaggtgttgttgtgtcgcaatatctcggcgcaaataggaagcaacagattaaaatatctgttcatacatcaatgtgtatagcaattattttaggcataatattaactcttctcggtgtatttttaagtccgtcacttcttgttttgatgaaaaccccgaaagaggttttaaaatcatcgtcactttatcttcaaatttattgcggcggtcttatttttaacgtaatttataatatggctacaggtatattgaatgcggcaggcaactcaagaaaaccgcttgtttatcttgcggttgcgtcggtaacaaatattattcttgacttacttttgattaaggtgtttaaacttggtgttatgggtgcggctattgcaacggatatcagtcaggctctttcatgcgttcttgcactcggttatctgtttagagttaaatctgattataagctttgcataaaagaacttaagataaataaagatatcgcctttaaaattataaaaataggtttgccgactgctattcaaaatatggttatatctttttcaaatgtacttgttcagtcgagcgtaaatacatatggcgcaactgctatggcaggctatgcggcttatttaaaaatcgacggctttaatattcttccggtattaagtataagtatggcaggaacaacgtttacaggtcaaaacgtcggagcacataagcttgacagagttaagaaaggtatgtactcggcgcttgcaatggtactgatttatactgtatttatcggtacagttcttcttttaagttctcatcaggttttaggtttattcactcataatgaagaagtaatcaaatacggtcagcttgctatgaagtatttttgcccattctatttcctcttgggtattttgaatacccttgccggaacggtaagaggtgcaggaaagggcgttccaccgatgcttattttgcttttctcaatgtgtgttttccgtattctttggattaagtttgcattgccgttttattcaaccattgacggtgtatttattctttatcctatttcttgggctgtcggcgctgttcttatggcactttataccaaattcggcaagtggctaccgcatgaacaaatgaatttgaaaaaataa

SEQ ID NO: 1332 - DNA, 453 bp, Eubacterium sp. CAG:251
atgaaagcagtaattcaaagagtaaaacattcctctgtcaccgttgacggaaaactaataagcaaaatagataacggttttatgattttactcggcgttatggacggtgacaccaaggaggatgctgataagcttattaaaaaaatccctgttttaaggatttttgaagatgaaaacggcaaaatgaatttatcacttcttgatgtgtttggcgaaattcttcttgtatctcagtttaccctttgcgcagattgctcgcatggaaggcggccgagttttataaaatccgcaccgcctgatgaggcaaattcgctttatgaatacgtcgctgatgaacttgaaaaatcaggtgtaaaatccgttaaaaaaggaattttcggcgctgatatgaaggtcgacttattaaacgacggcccggttaccataattttagacagtaaggaattaaaataa

SEQ ID NO: 1333 - DNA, 948 bp, Eubacterium sp. CAG:251
ataaaaatgaaacgaatattcattgacggtaaagacggaacaacaggtcttaaaatttatcaaagatttgaaagcagaaatgatatcgaacttttacttattgaccccgaaaagagaaaagatgcaaaagagcgagcaaaaatgataaacgaaagtgatattactttcctttgccttcccgatgcggcttcaattgaggcggttgagcttgttgaaaacgacaaagtaaaaatcattgacacctcaacggcacacagaacactttttgattgggcttacggctttgcggaactttctgaggagtttagaaataagattgaaacaagcaatcgaattgctgttccgggctgctatgcaagcggatttaattctatagtttatccacttgtaaaaagcggatttatttcaaacgactatgacattgtttgctttgcaatgagtggctacacaggcgcaggcaaaaagggcattgcgcaatatgaggacaaaaacagagataaggaacttgactcgccgagaatttatgcgcttacgcaacagcacaagcatcttaaggaaatgaaggcaatttcaaatctttcaaaagagcctattttcacaccgattatttgtgactatccgcaaggtatgcttgtaaacattcctctttatacggacaagatgagtaaaaaatatactaaagaggatatttatgaaatgtttgccgaacatttcgacggcagtgacattgtcaaggtcagacctctcggctacagcgagaatatgattggttcaaataattttgcaaaccgtgacgatatggaaattgaaattaacggaaacgatgacagaattatcatcacatcccgatttgacaatttgggcaaaggcgcttcgggcgcagccattcaatgccttaacattgcaatggggattgacgaaaaaacaggtcttaatataggagaatga

SEQ ID NO: 1334 - DNA, 1263 bp, Eubacterium sp. CAG:251
atgaacgaattttttaaaattgataaaagaataacggatgcttctgataatgcgttaaaactttgcaaaaaacaatttgaatatattgacgaaataacagaatataatcagcaaaaggtgcaaaaggcctttatcgataacagaatttcagaaagccatttttgtacaagtacaggctatggctacggcgatatcggtcgagaagctctcgataaggtatgggcacaggttttaggtgctgagtcagctttagttcgccacaacttcacttgcggcacacacactttagcaactgcacttttcggtgtcctcagaccgggagacacaatgctttgcgtttcaggcacaccgtatgacactattcacaatgttatcggaatcagcggtgaaggaatgggttcgcttaaggatttcggaattaaatatcaagaagtggcacttaaaaacgaacgccttgactatgaggcaatagaacacgcagttaacgaaaacaccacaatggtttatattcaaagaagcagaggctatgaactcagaccaagcctttctgttgacgagattggtaaggtctgcgaaattgccaagaaaagaaatcctaatgtaattgtaatggttgataactgctatggtgaatttgtagaaaaaagtgaaccgacacaggttggcgctgatttaatcgcaggttctatgattaaaaatgcaggcggaggaattgcaactacaggcggatatatcgccggcaggaaagaccttgttgaaaaatgtgcttacaggctcacaacaccgggacttggcagtgaggttggcgcaacaatcggtatgaacaggcaactttatatgggtttgttttttgcccctcatacagtcggtgaggcacttaagagcgcagtttacatatcggcattatatgaaagcttcggatatgatgtaactcctcgctataatgaaatcaggcacgatattgttcaatccttggggcttgaaaacgctgaaagccttgttgctttttgccaggggattcaaagcggcagccctattgacagttatcttttacctgagccttgggatatgccgggatatgacagcaaggtggttatggcggcaggcgcatttactcttggttcatcaattgaactttctgcagatgcaccaatcagagaaccgtattatgcatggattcaaggtggcttaaattttcacagtgccaagctttgcgcactcttagccgcacaacaaatggaagataaaggacttttaaaatga

SEQ ID NO: 1335 - DNA, 1053 bp, Eubacterium sp. CAG:251
gtgattgttttgttaaagaaaattgcattatttctttttactttattatttgcatttcctaatgttgcttttggctcaactttttcggcatcaagtttatgcgttatggatatgaccactcggcagattctttatgaaagtaacatatatgagcacagaagtgtggcgtcaactacaaaaattatgacttgccttattgcttgcaaaagtaataagcttaatgatattgtaactgttacctctcaaatgcttgccggtactgagggctcgcttatatatctaaaggcgggggataaaatatcgctttacgatttgtgcttaggtatgatgctttcttccggtaatgatgccgcaaatgccgtagctgtatacctaaaaggaactattgaaaattttgcagagtatatgaacgatacggctaagagtatcggtatgaataatacgcacttttccacaccgtcggggcttgataaggggcaaccctattcttgcgcacacgatatggctttgcttgcttcttgcgctatggaaaataagatgttttcaaagattgtatctttgcaaagtgccgatataaaaattaatgatgacgttaaaacgatttataatcataataaacttttgtcatataatcttaaagacggcaaattcattggtgtaaaaacgggttttacagaaaaagcaggaagatgcttggtaagtgcaaaaaaatatgaaaataatacaatcatttgcgtaacacttaattgccctgatgattgggacgctcatacctattatactgaaatttgcgagaaaaaatataattatattactatttcaaatgaaatcaaaattgatttagtcggcggcaataagaattatgttaagtgcagatataataaaaaacgctgccttttaggcaacgttaaagttatggaatattactatccctttgcttacgctccgataaaaaagggggataagctcggcgaagcgatagtttattataatgataaaatattggaaagactgccgattgaggcagacgaggatgttaaagaaaatgggtaa

SEQ ID NO: 1336 - DNA, 819 bp, Eubacterium sp. CAG:251
atgagcctttatgacaaagcaaagcaaacggctgattttattaaatcaaaaatcaataatattcccaaaacagcaatagttctcggaagcggactcggaccttttgcaaaagagattgaagaagaggttgagtttgactataaagatatccctaatttccctgtatctaccgtacccggtcacgcaggaaagctgattttcggcaaaatcgcaggcaaaagcatagtcgcaatgcagggcagatttcatctttatgaaggttacagcgcagaggaagttacgcttcccgttcgtgtatttcagcttttgggaattgaaaattatatagtaaccaatgctgccggcgcagtaaaccttgactataagccgggcgatttaatgattataaaagaccatataggtttgttttgcgaaagtgtattgtttggcaaaaatgatgacaggctcggcacccgttttccgtcaatgagcgaagcttacagcaaagaacttattaaaaaagcagaaaaggcggctgaaaaatgcagtcttaatattcgcaagggtgtatattgctactgcaagggtcctatgtttgagacaccggcggaaataagatttttaagagtagcaggagcagacgcagtcggaatgtcaaccgttcccgaagttgttgccgcagtgcacgccggaatgaaagttttgggcgtttcgtgtatgacgaatatggcagcaggcatactcgatcaacctctcacccatattgaagttatggaaacaggcaaaaaggttgaaaaggaattttccgcttttatgaaagaaatcataaaagaaatataa

SEQ ID NO: 1337 - DNA, 678 bp, Eubacterium sp. CAG:251
ttattggaggaaatatgtatggacacatcgttttgggcgataacgcttgagctttttaagggcttttggataaactttaagcttttcggtatcactcttctttgcgctttgcctttggggcttattttgagctttggctctatgtcgaaatttaagcctcttaaatatcttgttaaggtgctcgtttggattattcgaggtactccgcttatgcttcaaattattgtcgttttttacggtccggggcttcttttcggaatgcaggtcggaaatgattatcgttttaaagcggcattaattgcgtttattattaactattcttgctatttttcggaaatttatcgtggcggtattgaaagtataccgaagggtcagcaggaggcaggtcttgtactcggtatgactaaatcgcaaattttctttaaggttacgcttttgcaggtggttaaaaatattgttccgcctatgagtaatgaaattattactcttgttaaggatacctctcttgcaagaactattgcaattattgaggttattcgtgtaggtgaggattatattacaggtgcgggccttttctggccgctcttctacacaggcgcattttaccttgtattctgtggaattcttactcttcttttcggtcaaattgaaaagaaactcagttattttaattcttaa

SEQ ID NO: 1338 - DNA, 780 bp, Eubacterium sp. CAG:251
tcctcaccggcagtaaagtctgcgaaccgccaaggcggccgaaacggtgcaattccgttaccgacggttaaagtccggatgagagaaatgtttaggcaaattgtaataataattttgccaagttcaagcattgcgccccaacatatttgttggggcttctcttttgcccaaaaggagaaaattatggaaaaaaagcaaacaaacaaaatcagacttattacaggcacggcaatgctgacggcggttgcggtagggcttcaatatgttgaaatagccataccgattatgccgagtttcatcaagcttgacttttcagatttgcccgaacttatcggcgcattcgcttacggtccgcttgcaggtgtgattattgcacttttaaaaaacttaattcacatggctgttagccagagcggctttgtcggtgagctttcaaacttcttgctcggcgcaagctttgcacttgtggcaggcttgatttataagcataaaaaaacaaaaggcgaagcgctcgtggcaggaattgcggcatcacttgttatggcagtaatcagcgtgccgattaactactttattatatatcctctttattataatgttttgggctttcctgaggcggcagtgcttcaaatgtatcaagtgattttgccgaaaacaaagagcattttgcaggcattgttaattttcaatctgccgtttacattcgttaaaggcttaatctgtgcaggaataacaatgcttatttataagccgctttccactgttttaaagggaaaataa

SEQ ID NO: 1339 - DNA, 864 bp, Eubacterium sp. CAG:251
atggaaaaaacttttgaaaattggcttgtggtatcggatatcgacggtactcttaataataaaatccgcaagctgccaaaaagaaattatgatgcaattaaaaaattcactgatttaggcggtaatttcactctcgcttcaggtaggcttcagtcaagccttgaaaggaattataacagaataacgcctaatcagcctgccgttgttttaaacggtgcagggctttatgattataaggaaaagaaaatgctttggcgaagcacaatcggagaaaaaggacgtgactttgtaaagcttgttgaaaaagaatataacaagttttttaaaagcgttgatataggaatttattttgacgattatgtttatattgttaaaaacggactttttgcaagtgcaacaatgcattttgacaaggctcattttgaagtggttaaatctattgacgatgtaccgaaagacggctggatgaaggttattttttggtccaatccaattacaattaagtcgcttcaaaaatttattgacaaaaacgaaaaccccgacgctaactttatgtcctcatctgtttgcacgattgaaatgcttcaaaaaggcactcataagggtgtcggcattatgaaacttgcagatatgctcggcatagataaaagccatgttgcggcaatcggtgattattataatgactgggatatgctcaaaacagtcgggcttcccgcctgtgcaggtcaagctcccgcacctatacacaatatttgtaaatttgaggcttgccattgcaacaagggctgtgttgccgatttgcttgaatacattatgtccggcaaggctgaagaagatattaagaaagaaaataataaaaagtag

SEQ ID NO: 1340 - DNA, 804 bp, Eubacterium sp. CAG:251
atgggaaaaaccgtatctatatttaaccaaaaaggcggagtaggaaaaactaccacttgcgtaaactttgctgccgccctaggtttaaaaggaaagaaaacacttcttgttgaccttgaccctcagggtaacacaacaagcggtgtcggaatagataaaacagaaatagaaaaatctacgtatgatatccttattaatgacgaagctgctaaagatatagttattaagacagagtttaaaaatctttcagtcctccctgccaatatgaaccttgcaggtgcagaacttgagcttgcagaggaagaaaacagatttaaagcgcttaaaaaagcacttgctccactcgtaatggaatatgattatattattattgattgcccgccaagcttagggcttctttcacttaatgcattaaccgcttcggatacacttattgtgccgttgcaatgtgaatattatgcgttggagggattgagccagcttttgggaacagtaagaacagttaaacagcattacaatgagcatttggagcttgaaggtgtgctttatacaatgtatgacacacgtcttaagcttaattcgcaggttattgatgaagttaatcaatattttccgaataaagcttataaaacaacaattccacgaagtgttaagcttgccgaagcaccgagttttggtaaacctattttttattatgaaaaatattcaaaacccgcttttgcatataaaaaatttgcagatgagttcttaaagaacaataaatttgtggaaaatcctgttgaagatgtggaaaacttcagataa

SEQ ID NO: 1341 - DNA, 1038 bp, Eubacterium sp. CAG:251
tttatgcaggaaaccgaaatggattttgaaagcagaatagttacttctgattttactcctgaggataacgatatagaaaattcattaagacctaaggtacttgacgattatatcggtcaggataaggttaaggaaaatcttgccgtttatattcaggcagcaaggggaagaggggaagcgctcgaccatgttcttttgtatggtcctcccggtctcggcaaaactactcttgcaggtgttattgcaaatgagatgggtgttaatcttcgtgtgacaagcggtccggctattgaaaagcagggcgatttggcggctcttcttacaaatttgcaggagggtgacgttttatttattgacgaaattcaccgccttaacaggcaggttgaggaagtcctttatccggcaatggaggacggagcacttgatattattatcggcaagggtccttcggcaaggtcaataaggcttgatttaccgcatttcacccttatcggcgcaaccacccgtgcaggtcagctttccgcacctcttcgtgacaggttcggcgtgattttcaggcttgaaatgtatacgaacgagcagctttcgtcaatagttaaaagaagcgcagatattcttaatatccctgttgatgaaaaaggcgctatggaaattgcttctcgttcaaggggaacacctcgtattgctaacagacttcttaaaagaagccgtgactttgctcaggttaagtatgacggtgtaatcagtaaggaagcggcagttgacgctcttgaaagaatggaaatagataatctcggtcttgataatatagacagagttttattaacaactatgattaaaaattataacggcggtcctgtagggcttgatacgattgcggcggctataggcgaagaatcggttactattgaggacgtttatgagccttatcttatgcaaataggtttcctttcaagaacgccgagaggcagatgtgtcactcctcttgcgtatcagcatttgggaattgaacaacccggtcaacaatcacttttataa

SEQ ID NO: 1342 - DNA, 981 bp, Eubacterium sp. CAG:251
ttgaataacattttttatcgcccgtctgcaagacaactgttaaggcaaaagcttgatgaaataagtgttaagattgaagataatcttgatattgatttcagccacgtaagtaaaagaattgataatattgaggattttaatactatcattcttgacccgtttttatccggcgaaaagctgttttatcgtggtgagcgcattaatgacccaaaccgtcgcctgcttccgactttttacagagagcaaaaatttgcacttgaaaattcagaccttggtattaagcatattaattcggactttgtttttgattattataaatctcttggcgattttgtttatgtatttaacaagacaatgggtaatgcaagtactgaacacttgtatgagatttctgcttttgcgcagcattattatcatttgtcgccgcttatcgatttcactaagagtttatatccttcgctgtcatttgcattaaaagacagaactcattttgacgaggatatcgttttatatgtcttaaaacttcgagatatggacgattatacaagtgatattcaggttgctgataaatggcttaatgaacttaatgtttacgtaagctattttgacgaaacaagtgtaaaaaaatctattaaggaacttattgaaaacaagaaggtgtcaatctcttcagactttagaaagcatcttgattctattgcgtcaaatgctgctccgaaagctaagcttattgatgttccgactaacacacgaatgaaatttcaacaaggcgtatttatgcttttgactgattttcaacttttcaacgatacatattttacgaaaaatattcgtgactcgtttgaaattaataagtatattatagataaggaaatttgtccttttttagttaatatggttaaaagtgaagcaccttggtatacttacgaaaatcttatggatatcgaatcagcttttaaaagtaccgtttataaaaaataa

SEQ ID NO: 1343 - DNA, 1053 bp, Eubacterium sp. CAG:251
atgaaaaaaattagttcaatattagtagctgttttgtttgtgtttgttagccttttttctttttcttccaatgccttggcaaatacaatgaaaacggcaatcggcataagtttaggtcaaactgttaatgaaaaagttgacagcagttcatctcaaacaaaatatttatggctgaaatttgattgcctttcatcaaattattatgattttaccgtgtcaggtgtagaattaccgttaagtgacgtctttctcacagtttatgactcagaaaataatgttattaattctaatgtaaatacagaaaatgaatattcttttgtgtctacaacttatttagaagccggaaagccgtactattttagacttgaatgtttaaaaggaacatattccttttccgcttcgctaaatattcataatcattgctatacaaactttttcgtaaaagctgttgcggacgatgataaagaaaatagattaaacggcttctcaaaacttttgtgtaaatcttgttcaaatgaatatattgttcaaaatatttatgcgccttctaccgttaagctttcagcaactaaaattgcctttaatccttacggttcgtatccgagtgtaactgtttatgacagtgtaggtaatttgatttcaccgagtgaatatgttgtcacatacgatgataacttcaagacgggaaaagcgtgggtatacgtcaattttgtcggaaataattataagggcgaacttacttcaagttttatgattattcctgccaaaccgactcctacttcccttaaatccaaaaagtcaaagcagattacttattcttggaacaaggattctaacgcttcgggttatcaaattcaatacagcacatcatcttctttttctaagaaaaaaacgaagtcttatataatttctaaaaattcaactaagtcaaaaactttctcatctcttaaaaagaagaaaaagtattatgtaagaatgcgttgctataaaacgattgacggaaaacgtcagttttcctcttggtccaaaaagatgagcgttaaaacaaaataa

SEQ ID NO: 1344 - DNA, 1221 bp, Eubacterium sp. CAG:251
atgggagtttatgaagaattacaagaaagaggacttatagctcaaattactaatgaggacgaagtaagagaacttattaataacggtaaggctgtattttatatcggctttgacccgactgcggacagcttgcacgttggtcactttatggcactttgccttatgaaaaggcttcaaatggctggcaataagccgattgcccttatcggcggcggtaccggtatgattggtgacccaagcggtaagacagatatgcgtaaaatgcttacacctgaaattattcagcataactgcgactgctttaaaaagcaaatgtctaagtttattgacttttcagacggcaaggcaatgatggttaataatgccgattggcttcttgaccttaactatatcaacgttcttcgtgaggttggtgcgtgcttcagtgtaaacagaatgttaagctttgaatgttataagcagagaatggaaagaggtctttcgttccttgaatttaactatatgattatgcaaagctatgacttctatactctttataagaaatacggctgtaaccttcagttcggcggtgatgaccagtggtcaaatatgattggcggtatggagcttatcagaaggaaacttcagggtaatgcaaatgctatgacaattactcttcttaccaactcagagggtaagaaaatgggtaagactgaaaagggtgctgtttggcttgacgctgaaaaaacctcaccttatgagttctatcagtattggagaaatgtcggcgatgatgacgtaatcaagtgtatgaagcttcttacatttattcctatggagcagattaatgagtatgcaaagcttgagggtgccgagcttaacaaggttaaggaaattcttgctttcgaacttactaagatgattcatggcgaggaagaagctactaaggctcaaaacgccgcaaaagcgctttttgcaggcggtgctgataattcacatatgcctgaaaccgtactcaccgatgatgatttcacagacggttcaattatgcttcttgatatgatggttaaagccggcattattaagtcaaagggagagggcagacgtcttatcactcagggcggtgtaagcgttaatgacgaaaaggcaaccgaccctaatatgtcatttacaaccgatgatttttcaaacgaaatcattgttaaaaagggtaaaaaagtattccataagtttagtaaataa

SEQ ID NO: 1345 - DNA, 390 bp, Eubacterium sp. CAG:251
atgaaaagaagtgaaatgagagagcaagcgttccttttaacatttgaggggcttttttcaagcggtcaagatattgatgaggtaattgaactttacagcgaaaatgttgaagcggtgagcaaatatgcaaaggatgtttttgtcggcgtaaaaggctcaataaatgagcttgatgagataattaataagtattcaaaaagttggaaagcagcaaggcttcctaaggttacgcttgctattctttacgttgcgctttatgagatgaaaaacgttgaggacgttgccgacagtattgcaattaatgaagctgttgagcttgcaaaaaaatacgcttcaagcaatgacgcatcatatatcaacggcgttctcggcgctgtttcaaggggttaa

SEQ ID NO: 1346 - DNA, 966 bp, Eubacterium sp. CAG:251
atgaaaatagtaaatttagatgcttatacaacaaatccgggtgatttatcctgggagggtataaaaaagctcggtgattttacccaatatgacagaacggctccagagcaaataattgaaagggctaagggtgcaaatgctcttattattaataaaacaattttaacaagagaaattcttgaaaaacttaaacctgagcttgaatatataggtttacagtcaacaggatataacgttgttgattgcgacgcagcaaaggaacttggaataactgtttgcaatattccgtcttattcgacaaatgcagttgcacagcttgtttttgcatttattttgcaaattacaaataaaattaatcttcattcgcaggctgtttttaacggtgaatggtgctcctgtcctgatttttgcttttggaaagcgccgcttagtgaactcgcaggtaaaacaatcggcataatcggtttcggtgcaatcggtcaaaaggttgcaaaaattgcagaagcttttgatatgaatgttcttgcctatgctccaagaccgaaggataagggtgaacttaaaacagttaaatttgtttcacttgacgagcttctttcaaatagcgatattgtcacctgccattgcccgttaacaccggaaaccgaaggcttgattaataaagatactatttctaagatgaaaaataacgtaatatttattaatacttctcgtggtcctgttgttgacgaaacggctcttgccgacgcacttaataatgataaaattcaagcagcaggacttgatgttttaagcgtagagcctgctaaggaggataaccctcttttaaaagcaaagaattgttttattactcctcatattgcttgggcagctaaggaaacaagagcaagacttttaagcatattggaggacaacttgaaagcatatattaacggtcatcctcaaaatgttgtaaataatttttaa

SEQ ID NO: 1347 - DNA, 693 bp, Eubacterium sp. CAG:251
atgagtgatttttttgaaagctccgctttttggggagttgccgtcagccttttgtcatatgctctcggctcgtttttaaagaaaaagtttaaaaccggcatttttaacccattgcttatttctattgtaattacaatagtttttcttttgacttgcaatattgattatgaaacgtataatgacggcgcaaaatatttgagctggcttttaaccccggcgacagtttgccttgcaattccgctttatcagcaaattgaacttttgaagaaaaatcataaggctgtgcttgtcggtattctgtcaggcgttttaacaagccttacaacaattatgattttggcatttatttttaaactttcgcacaaagaatatgtaacgatgcttcctaaatctatcactaccgctataggaataggagtcagtgaagaacttggaggatatgttacaattactgttgcggtcattattttaaccggagttctcggcaatattttagcagaaggaatttgtaagctgtttaaaatcaatcatccaatcgcaaagggcattgcaataggcactgcttcccacgcaataggaacggctaaggctatggaactcggcgagattgagggcgctatgagcagtctttcaatcgcagtatcaggtatacttacggtagtcggttcaataggctttgcaaaaatcatataa

SEQ ID NO: 1348 - DNA, 864 bp, Eubacterium sp. CAG:251
attatattaataatcaagagattaggtgattttttgaaaaagtgtgccgtaattaatgatttatcaggcttcggcaagtgctctttgactgccgctattcctattatgtcggcaatgggggttgaagttcatcctcttttgactgctgttttgtcaaatcaaacagcttatgaaagctttaaatcgttgtcacttacagatacaatgaaaccttttattgaggaatggaaaaagctgggggcaaaatttgacggaatacttacgggttttgtaacagacaaggctcagcttgaaattatatcagattttattgatgagtttaaggatgaaaatactcttgtggttgccgacccgattatggctgataacggttcactttatgacggttatgatatgcaaatgtgcgatgtgataagagaattttgctttaaagccgatgttattactcctaacacaaccgagcttgcaattcttgcacataagggtaatcccgatgtgttaaatgaaaaatgggttaatgattattcaaatattgaaaaaagccttaatatgctttataaaaaaggattaagtaaaattgtcgtgaccggttataaggaaaacggcgcaatatcaaacattatttttgataacggcgaaatttccaaagtcaccaacgaaaaggtcggcggatatttcagcggcacaggagatgtgttttcagcggttttaaccggttcgcttttaaacggcaaatctcttgcagaagcttgcaaatgtgcaggggagtttattacaaatacaattaaagttaccgatgtttctgacggaaatgacggtattgcttttgaaaaaacgattggggagttgatttcttatgaataa

SEQ ID NO: 1349 - DNA, 831 bp, Eubacterium sp. CAG:251
atggaaaattgtaccgatttggctgttgaatcgtatgaaaacggcggaaaaaccgttttggacggagtaaaggttgaggaaaacggaaaaatcacaaccgtaaccgtttttaacaaaaaaggggcacaggcactcggcaaggcagtggggaaatatataacctattgcagcgatgcggcgattgacgattcacaaatttttgacggcagactcgacgagctttctgaaattctgacctcgcttttaccccaaaatattaaaagcgtgcttgttgcagggcttggaaatacagatataactgccgacgcactcggaccaaaggttgtaaattatgttcttgccacacgccatattattaatgattataataatgataataaatatttttctgacttttttaatgtttcgtcaatttcaacgggcgtgctcggtgatacgggtatagaatctgccgaaatcataaaaggggtagtcaaccaaattaatcctgattgtgtgattgcggttgatgctcttgccgcttcgtctgcttctcgattgggcaacacggttcagctttgcaatgccggtatttctcccggttcgggtgtcggcaaccataggtatgaaatatccgaaaacactcttggtattcctgttatttcaatcggtattcccaccgttgtttccacctctgttatcaaagggaaaaacggcggcgacggtatgtttgtcactccaagggaaattgacagaattattgagcacggtgcaaagcttattgcaatgaccgtaaacgtctgccttcaaaaaaatattgacgcaaaagatttattttctttggtcgggtga

SEQ ID NO: 1350 - DNA, 837 bp, Eubacterium sp. CAG:251
atgactaaggttgttggtgttcgtttcagcgacacaggcaaaacatattattttgaccctaagggtcttgatataaaaaacggagatgaaattatcgttgaaactgcaaacggtcttgaattcggcaaggcatcttgcggtgtgaaagaggttgaggatgatgaagttgtcagcccgttgaagcctgtaatacgtattgcaaatgataatgaccgtgaaaaagttaatgaaaataaaattaaagagaaagaagcttttgagatttgctctaaaaaaatagaaaagcatcagcttgaaatgaatttgacaaatgccgagtattcgtttgactgttcaaaggttattttctatttcactgccgatggtagaatagattttagagaacttgttaaggacttggctgcaacgcttcatacaagaattgaacttcgacaaatcggtgtcagagacgaaagcaaaatgcttggcggtctcggtatttgcggcagaccgttttgctgctcaacctttcttgacggtttccattccgttactattaaaatggctaaggaccaagggctttcattggctcccggcaaaatcagcggcacttgcggcaggcttatgtgttgcttaaagtatgagcaaaattcttatgaatatttacataagattactcctaaaatcggtacgttagtcgattgcaggtacggaagaggtacggttgttgataccgcaattttaaccggtcagctcaaggttaggcttgatgatactcccgacggattacctgttacggtcagccgtgacgaagtgagaatagttagagaaaacaaaccaaaaatgaacaaaaattaa

SEQ ID NO: 1351 - DNA, 2745 bp, Hungatella hathewayi 2
atgaatgtacggatacgaaaagggagcattcaaagggataaaaggaggaaggatgaagtgggatatcagtttgtgaatcaggaaggcgatttcgtgttggcggaaccggagcagagtaccggtctctatctgccgttggtaaatccggccggagtcatgggggccattaccccaaccggccatggggacagcaagttatcacaggatcagttcctgctggaaccggctggtgcagaagatctgcacagccaggcgccggccaggaacttctggtgtctgacagaagggcacggcccctggtccgtgttcggtcagtctgcggaacaggaggcgcggcgtttcagcggacacaaagacctcagcgaactggaggcaggcgctttctggcagaaagtgaaacgaaaatgccaggacagcgggctggcggcggaagtactttctttctgtcctgtagatgattctgaagcagccggtgcccgggcagaggtgatgaaggtcacactgaaaaatgaaggaagcagggaactcacggttcgtccggtggcggcggtcagcctctacgggcgcggagccgaccatatcagagatcaccgccatgtgacctctctgttaaatcgtatgacggtcacggctgacgggattgtgctgaagccatccatggcttttgatgagcgggggcatcatcaaaatgagatgagctacggcgtgttcggaaggcgggaggatggagcacggcctgacggctttatccccgtgtcagcggatttcatgggcgaaggcggaagccttttatggccccgtgcgcttgctgatgaaaagatgtccgatcatgaggtctggaagaaaccgggttacagtacggagggatacgaatgcgcaggcgttatacggtttgaagagatgacgctgaagccgggggcgtcatgcagcttttatctggtgctcagctatatggaagagggaaaggagtacctggagaaggaaaaggcggaagccgcgtttgagtcgatgaagcggtattggaatatgcagaaaatcgcagggtgcagtacggggaatcagacttttgaccggtggatgcagtgggtatccctgcagcctgaattaagaagaatctacggctgttctttcctgcctcatcacgattacggaaggggcgggagaggctggagggatctgtggcaggactgcctcgccctgatccttaagaatcccgccgccgtgagggaagatatggcggcatttttcgccggaatcagaccggatggcagcaatgccaccatcatcggaagcggcagggggactttcaaggccgaccgaaacgcaattgtgagaatgtggatggaccatggctactggccttaccggacggtgcgcctctatctggacgcgacgggggatgtcgagttcctgtttgagaagaatacctattttgtggacggagtcagaaccagagcaggaggccgggagaaggggagtgcgggagaggaaggcagagaagcgtatcggggaacgcttctggaacacttgctggttcagcatctgacccagttttatgacgtgggactccacggccatatgcggctgcgaggcgcagactggaacgacgcccttgacatggcgggggaaaatggggaaagtgtggccttcacagcggcctacagcggtaatttaagagaattggcggaactgatcacctggctcagagaggaaaaaggcgtagctgcggtggaagtggcggaagaactggggacactgctttgcgcggacagggaactgtatgacaggccgcatggaaagcaggaattgctgggagcctactgtgaacgctgtcttcatggcttctgcggcagaaccgtgacggtcgatacgggacggctgtccgggattctcgatgccatgggagcgtggatccagcagcacatccgtctcacggagaccataaaggacggggaagataacctctggtttaacgggtactacgacaatcacggtatgcaggcggagggcgtatttgaagaaaacgtgagaatgatgctgaccagtcaggtcttttccatactctcgggaaccgcaaccgatgagcaggtggagcggatcgtcggtgcggcggaccgctatctgtatgaaaaaagcgcgggcggctaccggctgaataccgattttaaggaagtaaagctggatctgggacgaatgttcggtttcgcctatggccataaggaaaatggagccgtcttctgccatatggcggtgatgtacgcctatgccctgtaccggaggagatttgccagggaggggtatcgggttatcgaaagcctgtacgggcaatgcatggattttgagacctccaggctctatcccggtatcccggagtattttaacgagaggggcaggggcatgtacccctggcttacgggggcggggagctggctcatcctgacccttctgacccagatcttcggcgcggaaggggagtacgggagtctgacgctccatccgcagcttctggcggaacagtttgaccgggagggaaatgcccggattgcattttcctttgcaggcaggaagatgaatctgatttaccagaatccgaaacacctggaggtgggcgactacgaggtggtggagatctgcctggacggcaggccgctgccatttgataaaaagaacccggtggtttcccgggaaacactgctgcggcttcctggtgaccccgtacatactctgcgagtcacgctggaatga

SEQ ID NO: 1352 - DNA, 2145 bp, Hungatella hathewayi 2
atgccaaacattacgctactggatcaaaataccataaataagattgcagcgggcgaggtgatcgagaggccggcctctgttgtgaaggagcttttagagaacgccatcgacgccagggctacggctgtgacggttgaaataaaggaggggggcaccaccttcatccgcgtgaccgacaacggctgcggaattccgagggaagaggttccgctggcgtttctgcgccactccaccagcaagatcaagtccgtggaagatctctttacgatctcatctctgggctttcgcggtgaggccctcgcaagtatcgcttccgtctgccaggtggagctgatcacgaagaccagcgaagccctgacgggaagccgctacagcatcgaaggcggcattgaacggccgctggaggagatcggcgccccggagggcaccacatttatcgccagaaacttattctttaacacgccggccagaaggaaatttttaaagactcccatgacagagggctcccatgtggccgagctggtggaaaagatcgcgctctcccatccggagatttcgatccgttttatccagaataaccagaacaagctgcatacctccggcaaccacaacttaaaggacatcatctatacggtcttcggcagggagattgcggcgaatctgctggcagttgaggcgaagaagcaggatatcgccatcagcggctttatcgggaagcctgtgatcgccaggggcaacagaaactacgaaaattatttcatcaatgggcggtatatcagaagcagcatcatatcgaaggccatagaagaggcctacaagccgtttatgatgcagcacaagtatccgtttaccatgctccatttcaccattgagccggagcttctggatgtcaacgtccatcccaccaagatggagcttcgcttccgcgacggggagatggtgtaccgtatggtctacgacgccgtatcgggggcactcgctcacaaggagctgattccggaggtggaactgaataaggaaaaggcggagcaggaggcaaaagaggcgaggaagcacgagccgtcaccggagccctttgagcttcgcaggctggaggccatgagccggcagcaggccgcctgcgcgcctggctccaaacggcttaagccggcagaaccgtctctcatgagagatcctgattttctggctgaaaactggctgaagaagccggctggcgcagactttttacacgggttaccggaatcggctgcgaaaaatgaagaaacggtacaaaatcaggcagatggtgcaagggaacatggacaattaaacggaatgacggaccgtggagtgcagcccggagagggagaggcagcagcgagagatgcggcagcggaagaggcagcagcgagagatgcagcagtggaagaggcagcagcgagagatgcggcagcggaagaggcagcagcgagagatgcagcagcaagagaggctgcagcgggtgaagctcaggcaggtgcagccgcattttccgggaagccggaacagctggatctctttgacggaaagctgctggaaccgaaatcaaggctgatgcataagctgatcggccaggtgttcgacacctactggctggtggagtttaacgaacagctttacattattgaccagcatgcggcccatgaaaaggttttatatgagaaaactatggcaacacttaaaaacagggaatactcatcgcagatgcttaatccgccgatcattctgaccctgaacatgaacgaggaggtgctgttaaaagagcacatgaagtatttctcggacatgggcttcgagatcgaaccgtttggcggcagggagtatgcggtgagaggcgtaccggctaacttgctgtctatcgccaagaaggatttgctgatcgagatgatcgacgggctttccgacgatgtttcgactcataatccggatatcatctatgagcgggtagcgaccatgtcctgcaaggctgcggtcaaaggcggcagccggctgtcgacggaagaggccaacgaactgatagaccagctcctgaatctggagaatccgtatgcgtgtccccatggacggccgacgatcatctccatgagcaggtacgagctggagaaaaaattcaagaggatagtatga

SEQ ID NO: 1353 - DNA, 1677 bp, Hungatella hathewayi 2
atggaacaacagaaaaaaacgggatctgaggtaaaaagacgggataacagcagaatatggctggtgctgatcctgctgttgttttttattacactgataacctccagtctggtgggatacatattaggcagcaatgccggaccgtcttctatgggacagctgatcgatacgatcttactgacgccggagagtacggacagccgtacaatgattcatctctccggtattgtggcatacacggatggcacaccggcagcagggcggcgtctcgaactgcacagtgatccgattacaaccgtatcagactcaaaaggcggttttttatttcccaatgtaccgcagggagagcataccatatccattctcaccgatgagggagaagtacaggtacagagaaagatcaatatccagtatgacagcaggaaagagaaagacgtgtccatccaattgacggaaaatggagcatatgcgattgaactatccattgatgtacgagtgctggaagtagtaattgagctggatcaggagagtatgaggattgattcagaaagctttaccttctccactcgtgacggagacgttgtcacacccacgggaagcgcaaatgtcagagatggtgtgatcgtgactccgggaggcaacgtgcatctgcccgatgggaacgtagtatttccgggaggtaagacggatgacaccgcctatattatactctcagatgacactgtgatagaaaaacagccgatagcgtccggtgatattaaggtggacgccgatggagcggtaagtctgcctgacggaacagtgattgagcctggaggaaagattataaatccggatggaactgcagagcttccgggtgcatcgggcgtcgttgttggagacggaattgtcagtcctatcggcagcggaacttcgaagcagccggaaacggaaagtgaggctggaagtgatacgtctgccccatcctccgaagaaattgggagaccgggagcgtcagaccgttttccggaaatttcagaatctccggaagaatcttcttcgaaaaatagcgctggtcagtcagatacggaagaacaggagaatccaacaggacccactttcccggcagaccaggtaatgccatcaaagccatccggttccgggaactcatctgattcggatcgtgattctgtaaaacctgagaagccggaagaaccgacgcagcctgatggaggagttcttgatgtttccgggcagacaacagatggatcttatgcgcagtggacgcagaactgtaccattgatttattttccaaccgcaccggcggagagcagaacaaaattgcaccgggatcttccggatactacttattccggctgcagaacacgcggcgtacttcgctgaacgcaacggtaaccatgtcagaaggagatggacttcatcttccgctttccttcacgctgaccccactggataacgctggaaataagcagacgaagcggtcggtttccggtactctgcaaaggaacggcacagatctgaggttaaacacggaaatatacgctgaatcgagtgaactataccggttggactggatctggccgccggaaggaaatgacagcgaggatacccgtatcggcagcggtacggaacatacctatatactgaatatgaaaattcatgcggaggaaagctga

SEQ ID NO: 1354 - DNA, 1956 bp, Hungatella hathewayi 2
atgaagaaaagaagattgactgcggcactgctctgtgctgttcttgctgcttcgaccgtgctcagcggatgcggcggtaaaaagacgacagaaggcggaagtaccgcccaggctggtaaggaagcagggaaaaatgagaatgggaaggacggagacaatggaaaaccagtcgtatataaggaactgtattcgggggaggtcgcgactttaaattatttagtttcgtcttcagacaacgatatcagaacagcggcatactgtattgatactctgatcgagtatgacagctctggtcagatcaggccgggacaggcgacggaatgggaatatgacgaggcgtctaagacgtggacctttcacttaagagaagctaaatgggtggataacacaggaacgcctgtagccgatgtgacggcacaggattatgtggacgccatcaaataccagttgacaccggaatacgagagcgggattgtgcagaatctgttcggtgtgattgcaaatgccagggcgtattacaacggccttgtttataacggcggagctgatgatgagggggtggtatggaatgccattgatttctctgaggtcggtgtaaaggctgtggatgatcatacgcttacgtatacgctggagacggaagtgccgtatttcatatcttctttggcttatattgtttatatgccggcttatggacctcaactggaggagttggggaaggagtttgcaacaggcgcggataagatgtattacaatggctcttactatatgtcggagttttctcctcaggagcgccgggtgtataaaaagaatacgttaaactacgacgcggatattgtctatattgacgagatacagaaaatttacaatgcggaagcgtttaccatcggaccggagatggtaaagcgcggtgagatcgatcatgtagaaatcacggctgacattctggatgactggctgagccatgaggatacaaagaatctgatcagccgtgagaggccgagaaacagctattcctatttctactgtttcaactttgatccgcagttcgacgcagagtatgagccggataactggagaaaggccgtgaacaatgagaacttccgtaaggccctttcttccgctctgaataagactaaggaagtagctgtgctggagccgaacgttccggaagattacgtgatcaataccatcactccggcgaagtttaccttcaacgcggatggaaccgattttacagagatcggcgatatggcggctctgggagatacctttaatgaggcgaaggccgtggagtaccgtgatctggcaaagagtgagctggcggccgaaggcgtgaccttcccggtgaaggtgcttctgccgtacaatcctaccgaggtcaactgggataaggagtgtcaggttgtggaacagcagatggaatcgctgctgggaactgatttcatcgatattatcgtgcagacaggtccaaccgacggattcctgactgagatccgccgtaacggaaagtacgcaatgttaaagtgtaactggggcgctgattatgcggacccggagacatggaccgatccattctaccaggcgaaaggcgagagcggctacgatctgggctataagtatgcaaaccttgcgaaagccattgaggatggaaccccttctgccgacgctgtattagagtattttacaacgattgaggaagccaaggacatcaaggtggatatcaatgcccgttacgaggcatttgccaaagcggaggccactctgattaatcatgcgcttgtcgtgcctttcagtatcagcgtaagcaaatatcttgcgacaaagctcaatgtgtttgaaggccagtatgcgccgtttggtgtgtccaacttaaagtataagggccagcatttgcaggatcattacatctccatggaagaatttgaagcgaataaggagaaggcaggccagtag

SEQ ID NO: 1355 - DNA, 2058 bp, Hungatella hathewayi 2
atgaaagtatccaattacatctcccaaaaacttgtggattttggtatcacacaggtatttaccgtgaccggaggcggagcgatgcacttaaatgatgcactggggcatcaggagggacttacctgcctttataatcatcacgagcaggcatgcgccatcgcggcagagtgttatgcgcgggttcagggacgcatagcagctgtctgtgttacgacaggcccggggggcaccaatgccatcaccggggttgtagggggatggctggactccatacccatgctggtattatccggacaggttcgatacgacacgacggcaaggtggtcgggagtgggaatcagagccatgggagaccaggagtttgacatcacgaaggcgatcgactgtatgacaaagtacagcgagatggtcatcgaccccatgagaattcgctactgcctggagaaggccatctatctggcctattccggccgcccgggtccggcgtggcttgacattccgctgaacgttcagggcgcttatattgagacagaggaactgatcggtttctcaccggaagattatgaagcgggaggcgatggctgggccgtgccttccgattgtcacggtgattcgtgcggtgagcgtgtgagcgattgtccaaagatagaggccgacaatgcggggcagggcgagaagcgtcaggtgcttccgccatccgtaacgcgggaaacggcaagagaaattattaaaaagattaaaaactccgaacggcctgttatcaacgcaggaaatggaatccgaatcggacatgcctttgatgtcttttccagagtcgtggaaaagcttggcgttcctgtcgtgaccggctgggacagcgaggactgtatgcctgatgatcacccgctctacacgggccgcggcggcggtatgggagaccgcgcgggcaattttgccatacagaacagtgacctggttttatctctcggaagccgcttaagcatccgccaggtgggatataattacagtacatgggcgagagctgcctataccattgtcaacgacattgatccggaagagctgaagaagccatccgttcacatcgacatggcggtccatgcggatgtgaaggatttgctggaacagctggagctggttctggatgaagagtacggagccggacagcctgtgtttaccggcggcaccggacttaaagacagaacatggacggagacctgccgcatgtggaaggagaaatatccggttgtccttccgaagcattttgaccacggggaagacgaagacgccaatgtctatgcgttcatgaaggaaatgagcaaccgtctgaatgaagaacaggtgatcgttgtaggcaacggttccgcctgcgttgtcggcgggcatgcgtgtatcataaagaaggggcagcggtttatctcgaactcagccatcgcctccatgggatacgatttgccggcggccatcggggcctgtatggccgtgcaggaaggctatgtgcaggaaaacggtgcgcaggaaggccgtatgcaggaacgggatgcgcaggaaggccacatgcagcaccccgtatcgcagctcaccggcagcgatattatcctggtcaccggcgacggcagcattcagatgaatcttcaggagcttcagacgatcattcatcaccggatgccgatcaagatctttttgatcaacaatggcggctaccattcgatccggcagacgcagaaaaatttcttcggcgagccgttggtgggaatcggtgtggacagccacgacttaagcttcccggatatggagaagctggcgggcgcctacggttatccttactgcagggcatgccataacggagaactggtgccggccattgagacagccctccggacggacggtcctgtgatctgtgagatctttgtgagccgcgatcagaattttgaaccgaaatcagccgcgaaacgccttcccgacggaaccatggtgtctccgccgctggaagatttgtctccattccttccggatgaggagatggatgagaatatgatgattccgcggatcagggaatga

SEQ ID NO: 1356 - DNA, 2352 bp, Hungatella hathewayi 2
atgacaaatggaatcaaagatcatataaaagttctggtaaaatccatgactctggaagaaaaggcgcttctgtgctccggaaagaatttctggcagctggaaggtattgaacgtctggatattccctccatcatggtaaccgacggccctcacggtctgcgcaagcaggccggtgaggcggatcacctggggctgaaccagagcgtaaaggccacctgttttccgcctgcggttacctcggccagcagctgggatgaagctgctctgtatgaaatggggcaggccatcggagaggagtgtgttcaggaggaggttgcggttattttaggaccgggaaccaacatcaagcgttctccgctctgcggccgtaattttgagtatttcagcgaagacccgtatctggccggcgagatggcagctgcctggattaacggtgttcagagccagggaatcggaacgtctctcaagcattttgcagccaacaatcaggaaaaggccaggcttgtcagcaattcggtggtggacgagcgggcgctcagagaaatctatctggccccgtttgaaaaggcggtaaaacaggcgcagccgtggaccgtgatgtgttcctataaccggattaacgatgtgtactcctgtgaaaatgagtggctgctgacggaggttcttcggaaagagtggggctttgaggggctggtcatgactgactggggcgccatgaatgacagggtgaaagcactgaaagccggccttgagcttgaaatgccaggaccggatccccataatgataagaaaattgccgatgcagtgagaaatggagagctggatgaagcggtattagaccgcgcggcagagcgtctccttaccatgatcaggaaagcctgtgaggtccgcaaaaaagagtacgacgcggcggcacaccataagcttgcaaggcggattgcggcagaatccgcagtactgctcaaaaatgacggaatgcttccgctcaagaaagacggttcctatgcggtgatcggcgcatttgccgaagcgcccagatatcagggcgccggaagctcaaagatcaatccccatcaggtcgattgtgtgctggattctctccgcgaaaatggcattgcatttgaatatgcacctggttatgagctggaacatgataccatcaatcagacgctgatggaagaggcagccgcctgtgccaaggggcgggatggtgtcatcgtatttgccggactgccggattcctatgagagtgagggctttgaccggacgcatttgaatatgccggagtcccatacagcgctgatcgaggcggtagctgcggtaaatccccatgtaacggtcgttctcctctgcggctccgtcgtcctaatgccatggagagagcgggtggagagtattttactcgcctgtctgggcggagaggcggcgggaagcgcctgcgcagatgtgctgaccggagcggtgaatccttccggccgcctggcggagacgtttccgctttcactggaagataccccgtgttatgagcatttcgcaggagaaggaaaggacgtggaataccgcgaaagtatttttgtcggctaccgttactacgactgggctgaaaaaccggtagcctatccatttggatacggactgtcgtatacgaccttctcttacgataccatggaccttatatgggatgaagaggcagagatgggcgaggccagaattacagtgaccaatacgggtaaaaccgccggcggtgaagtggttcagctctatatcggcaaaaaacagtcggctgtgatgcgagctgtcagagaactgaagggctttaaaaaagtgttcctgcagccgggagaatcgcaggaagtggtaatcggcctggacaagagaagtttttccatttacgatacggacctcttcggctgggcagttgaagcgggcacgtatcagatctatgcggcgtcctcctgccgtgagttaagactcagcaaggagctgaaccttcaggggatgcagctttccggcatacccggatatgatgtcagcgaagtcgtaaaggacggccgtttctcggcagacagagagcagtttaagcgcctgtttaagggagaactccccttaacgccggccgccagcagaattacactgaatacaaccgtaaaagaagctttggcaagcgaaaaaggaaaagccctgctgggcggtcttgtcgagggatactcggcccagtatgcaggcgaagacgacatcagccgcatgatgctgtccatgctttttgacatgcctctgcggagcctggcgatgtttggggcggtaaagattgagacgctggaagagattgtggaggagattgagagagggtaa

SEQ ID NO: 1357 - DNA, 1782 bp, Hungatella hathewayi 2
atgaaatttgtgaagaataaaatcatgaatctgtctatccgaaacaagatgattttatcctacattttaattgcactcatccctttctgtattttcgggatcgtggtcatcagcatttttgccggacaggcggaaaatgatatctcggagcacacgggccagatgatcagccaggtgagaacctccatcgatgtctatatcagcagtattgaaaaaatctccaactatgtgatcgaagagctgagaagcgtggatttcaatgagatgtatacggaagacgacatattctggatgcaggagagctcaaaggcagtcgccaggctgaagcatgtggccaatacccatccggaggtggcaggaattctgtttgccacggagaatgacctgtatatcagcacggggatgacccgtatctccagggattccttcgtgaatgaggagtggtacaggctggcggtcagcaatccggacaccgtctgtctgatcagcgacacgtcgggccgcaatattgtgaccaatgaaagctacagcattgacaatgtattttccatggtgaaggcaatctataaggaaggaaccacggaggtcatgggcgtgctgctcatggatatcaagcacgatatcatttcccagtccatcgacaatattacgatcggacagaaggggtttgtattcgtgatcgattcggaggaccgtgtggtctacaccccggccaatcccattacctaccgggtgaatcccgactggatccggaaggaaaatgctcctgtgaccgccagaatacggggagaaaagtaccagatccgcagcgaacgttcggattacacgggctggcgtgtggtcggggtattctccatcgacgagattatggggcacatgaatacgctgattttcgcgcttacctgcggattgcttctgcttctggtgtttgtctttgtgattacggtgaagatatcccagacgatcacgaatccggtggtggagctggagcagctgatgaaaaaggcggagtccggggatctggccgtccgctttcagggagattaccatgatgaggtcagcgagctggggcgtgattttaaccatatgcttgtgcggatcgaggacctgatccagcaggtatacatcgagcagaagaacaagcggatggcggagctgaaggtactccaggaacagatcaagcctcatttcctgtacaataccctggacaccataagctggatggccagggattacggggccggggatgtggtgcggctggtggatgcgctgaccaatatgttccggatcgggctgagccgcggcagggactatatcagcgtggagcaggagctttcctatgtggccaactatctgtatatccagaagatccgctacggcggcaagctgaattaccagatcgtcaaggatgaggaaatcttaaatgaggaggttcccaagctgatgctccagccgctggtggagaatggaatctaccatgggatcaagaccaggaggggggaagggcatctcaccatccgggccgtgaaaactgcggatgggctgctggagttctccgtggaggacgacggatcaggcatgagcgcacagcaggcggaggaactgaaccatctgttaaatgaaccctgcgagctggaggagcggcagagcttcggactgttctatatcaaggaacggctgcggatcaagtacggagacggatttaaaatccgggtcaacagcatcgagaatgtgggaacaaaggttgtgatccatattccgatccaggaagacggtgtatag

SEQ ID NO: 1358 - DNA, 2838 bp, Hungatella hathewayi 2
acaggtgtaaacagtatggatttcaacgaaagaaagaaacaaagcaattcctgttcgccgcagacggcaggcggaacatgtccagaaaggaaatatccagcagggaaatgtccagaaggaatggatttcatgaaagtcagcgttatttgctgtttgatggatgaccctctcacattcttatggggaaactccagctttttccgccttacaggttatacaatggaagaatttttgagtctcttcccgagcctgcaggaatactatattcagtttcctgatgattttgcagcgatccgtcgtgaggcggagcaggcagtgaaagccggaagatctgatatcgatatgaccatccggctgccccggcagacagatggttattcctgggtgcgccttctggggtcagtaatcgctgatccggcggcagagggaccggtactccaaatggaattagccgatatcagtgctctggctgccgaaaaagaagaacaggcccggttgtgtgaacagaagcagcactgctttcgatcggtgctggatacctacgaaggcaatgcttatgtcagtgatatcgacacctatgagcttctttatctgaaccagacctcctgcgaggtgcttggcatgccggcctcaaaagtgttgggccaaaagtgctatgagatcattcagggccggacctccccctgtcccttctgtaccaacgacaaactatgcagggaagaattctatcaatgggaattctataatcccactttaggccggacatttatgatcagaaatctggaaattaactgggagggacgccgggcacgcctcgagctctcccatgacaccttcagcgcggaatacaagctggcaaagaaggatcaggagcgggacgcgctgattaacagtgttcacggcggatttgcgcgggtagacgccagagacaggaggacaatcctctggtatggcggcgggttcctcgacctgatcggctatacgaagacagaatttgaacaggagctgcattcccaatgtacctatgtacatccggaggatattgaacagatctccgatatcatggagcagtcacggttcaccggcaggcccacggcggcagaaggacgtatcgtcacctttcatggggttcttaagatattggcgctgtccttcagctttgtcagtgccgaggacagctgggatggcatcccgtcctactacagtgtgggactcgatgtgaccagggaacgcatggagcaggcgcggcagagacaggtgctggaggatgcctgcaagacagcccagattgccaacgaggccaagactaacttcctctcctccatgtctcatgatatccgtacgccgatgaatgccatcataggcatgtccgtcatcgcccaggcaaacttatactctccggaaaagacacaggattgccttacaaaaatcaacacagccagccgccatcttctgaatctgattaatgaggtgctggatatgtctaaaattgaaagcgggaagatcgatctgtcatcggaggaagtctcgctgccaaaattgattgaagatgtgatggatgtattccgtcccctggtcggggaaaaacatcagacgcttcaggtaaatgccaatcgtgtccgccatgaaaaggtggtgacagacggcggccgcctgcagcaggtgcttgtcaatcttctgtccaatgccatcaaatatacgccggaaggcggaaccatcggactgcgaatccaggaaacgccctcttttgcaaagggaaagggacagtattccttcgtcgtaaccgactcgggaatcggtatgaatgaagactttatcccgcatctctttgagcccttcacccgggcggacgacgccagcattcacaatatccagggcaccggcctcggcatggcaattacccagaacatcgtccgcatgatgaatggcaccattgaggtaaaaagtactccggggaaaggcagccagtttatcgttgccgttacctttgatttatgcggagagccagagacagatgatgcagaactggccgggctgccggttttggtcgtggatgatgatcagatcctgtgcgaaagtgtttccgaaattctgaacgatctgggtatgcagtgcagctgggtgctgtccggaagggaagccgtcgaccgtgtcgccgcggctcatgaagcggcggcggatttctttgctgtaatcctggactggatcatgcccgatatcgacggtctggagaccttaaaacgaatacgaaaaaaggttggcatcgacatgccgattatcatcgtatccgcctatgacttctctgaaatcgaggataaattccgtctggcgggcgcagatgccttcatcacaaagccgctgtttaaatcaaaaatggtacataccttccataaattttgcagaattgaccgttccgacgcccggagcgccctgcgtgagaggtcagatgccgccttggacggtaagaagctcctgctggcagaggataatgaactcaatcgtgaaatcgcagtcgaactgctggaaacacacggcctcctgatcgatacggcggaaaatggttccatcgcagtcaacaaatttgaagcctccgctcccggagagtatgccggtattctgatggatatacaaatgccagtgatggatggatacaaggcaacgaaaatgatccggtcactggaacgggaggatgcccgcaccattccaattcttgccctgacggccaatgcattcgcctccgacatcggaaaggctcacagcgcgggaatgaacgaccatattgccaagcccatcgatatcgaaattcttatggaaattctgcggcggtggattggttag

SEQ ID NO: 1359 - DNA, 1944 bp, Hungatella hathewayi 2
atgaaatccattcaaacgaataagaataaacttctcaggacaaacctgctgatcagcataatcctgattgccggatttgttactacggctgttttcagctaccgggcaaactatcaggtgtctttgaacaacatcgaacaggtctcttcactatccacggaggggatctactatcagttatcctccctgttttccaagccggttaatatatcactgacgatggctcacgacagcttgctggtcgagcatttaatgaaagagccgtctcatctggatgacaaggcctatgaggagacaacaaaagagtacttaaagacctatcgggaaaaatacggttttgattcagtctttctggtttcgactgtttccggaaggtattataactttaatggggttgaccgtgtaatggaacgggataatccggaaaatacctggtattttgatatgctggacagcaataaggagtattcgctgaatgtggacaatgacgaagtgagcggtgcggacaataagatcacgacatttgtaaactgcaggatacaggacacaaacggcgcggtaatcggcatcgtcggcgttggaatccggatggactatattaaggaactgcttcagaattacgaagatacttacaacgtcaaagccaatctgatcaatgaaaacggcgagatagagatttccacctcctataccgggtacgaggcggccgactggtttgagatttacggtcaggagggcatccgggatcaggttcttagctggtatgaggatacaaaaaacctggaactctggacagacaccggtacagaggaaaaagaaaagagctttgtggtaagccggtatataccggaactgtcgtggatgctgattgtggaacaggataccggaaggattatacatgagatgtatatgcagctctataagacgtgtttcgttcttgcgctggttgtcattgccatcctggtcattatcacgtctgttatccgcaaattcaacctgcagattacaaagctggtggaggaacggcaggcaatgtttaaggaggcgacagaacagctttatgaaagcatctacgaactgaatcttaccaaaaactgctatgtgggaaaaacaacagaagattacttttcgaatcttggcgcaggcggtgtcccgtttgaccagggcctgcgaatcatcgctgaaaagcagattaaagaggaataccgaaaaggttacatagagatgttttccccgaaaaatgcgatcagggaatacgaggccgggaacaatcatttaagctatgattttctgtttacactggatggatccgattaccattggatgcgtgtggagacctatctgttttattccgaggaagaccgcagtgtgcatatgttttcctaccggaaaaatatcgaccaggaaaagaaaaaagagctgatggcacagacagacgaaatgactggatttcttaccaagacggccacggagcgtctgatcgagaaacagctgatagaaaagaaggaggagaaatacgcattttttatctgtgatatcgataatttcaagcaggtgaacgaccagttcggccatgccttcggggattactgcatctgcagttttaccaaagccatacgggaacattttcgaaaggatgatattctcggcagaatcggcggcgatgaatttgttgtcttcattccatactcgagtgtaagctggctggaagagaaagcagctgaattatcgaaagcgctggagatggtttgtacgaaagagcagtcaagctgccaggtgtcggccagcatcgggatttcgatatcttcacaggcggggagccggtttgatcagctttatcaaagtgcagatgccgcactgtatcagacgaagaagaatgggaaaaacggatttaccatcatggagcttacaggagagaaagtagcggacagtacagacctgtga

SEQ ID NO: 1360 - DNA, 1500 bp, Hungatella hathewayi 2
atggcagcgcttatgaggaaaaatttccgtttatggggatatggaaaggcgctggctctttttgccggctgcctgcttttttccatcggcggacgattaaatgaagggatttattatgaacagcatattttatcagcagtatctgaccactactatttgacatactttatgcttccgattctgctgctttgcagtttttcttttttggaagatgatgaagaaactgtgattttacgttttcagagctatcattcttattttttaaaaaaatggctgggagcagggctgagtgcttttttactggctgctgttcaaagtgcagcgattctcttatccggcataggacttccgatgggaaattggtgggagttatcttcaggatcaaccgtgacagagttgtttttagtgctgcagcagtatttttcaactccgttacaggcattttgggtcttctcactctatcagttttgcggaacctggattatatttgggatctgtatgtggattggacacttttgcggacggaaatggtcaatccggctgattcttgctctttatatgttttcggctttgtggatgaaacttccggttattcagatactgccgcttactggatttaatcatttgctgatcctgcatcataatttaggttcacactgccgtttgacagttacaggtattactttattaataattgccataatcataactgccacggttcggtttgggcggcagggatatagattcttccagaggcggcagatttccggcattgttacctactatatccgtgaattggcgacgaggcagaatgtccggatcctttgcggcgttgtttttataattaccctttacaaagagacaggacagctccagggaaaatccgggcaggagtggatctattccttatttgccgggcatggtacaggcggtttccgggtttttgcgttttttgaaatgatgatcacgattggtgcgccgctttatcttctggcggtttttgtggaaaagacagtaagcggtcaatccctttttatttctgtccgcacgaaaagccgtaggacattgatgaggggtatcctgtcgactggtataatatttctcgctgcctatatgcttctgtggtttacagcgggactttctggaacacttttctttagggaaggaacggggatgccagtatggaaaatgctgctgtatgctgtttttttaagattccttgatataatggttcaatattttattatgatgtgtatatatgtattttcaaaacagattacaatcggttttcttgcattgactgcaggaaatctgctctgcattctaccgcagccatgggtatcttatctgccgtttggattatccagcctgacacggattgcggaattaaattccggtattggaatctctgccgcagcggctctgggagtggagactgcctttgcagtgctgctgcttgtatggctcttgatatttggaagcagaaaaatactggattag

SEQ ID NO: 1361 - DNA, 3552 bp, Hungatella hathewayi 2
atgattaaaataacaaaccaggccaatttaaagtttcaaatgatgtcagataacctccaggtagggatactgaaatgcagagttgacgaatatctttccatcgaagagatgaacgacggttttgttcagttgtcagggtacacggcagaggatatggaacattgttttaagaaccgtctgtcgtcgtgtatttacgaagaggatctatcggtatttcaatccctgcaggcggggatcgcgcagggaaaaatatatgctacggcagaatttcgtattcctggaaaagacggggcagcccgctggtaccgtctgcttgtcctcacacaatttgatgatacgggaaagtcttccagcgccatcgggattatcttcaacatagatgatgaaatgcaggcgatggacaggctgcgttctcaggcacagcaggattctctgaccgggttatacaaccgcaaagaaaccgaaaagcggataaaacagtttctggacagtaagccggagcttcccagcgccctgtttatggttgacatggataacttcaaactgataaacgatacaaaggggcatatggtaggggatgtggtcctgacagaagcggcctgcgccatgaaatctctgatgcgcgcaaccgatatcgtgggccggattggcggcgacgaatttattgtttttatgaaaaacatcccctccggagaggccgccgaaaagaaggcagaacgcctggcagacctgttccgccacatgtttgaacatgaaaaatactcggttcagatatcctgcagcatcggtgtggctgtctatccggaaggcggacgtgattttaaaacactgtacaggcatgccgatcaggccctgtaccacgctaagaccaacggaaaaaataaatatgtcatatataacgataagcagaactatcagcagggaaagccaggagactcttccatcggcgcacgcattgattccgaaacgagaacggctcagggactcggggactttctgactgatatttttaagattctttaccgcatggaaaatccagaccaggcgattaatctgatactggaaatcgtcggcaaaaaatttgatgtgagcagggcttacatatttgaatccaccgaagacggcaaatacacctccaatacttacgaatggtgccatgacggcatttctccgcagatcgatcttctgcagaatttaagttacagccagtttggggattaccacaccttattcgaggatcagtcgatcttctactgccgtgatatcacggcgctgcacccggcacagagagagttattggaagaacaggggatctgttccacactgcagtgcgccttctggaaaggggaagcgcttgcaggcttcattggttttgacgaatgtacaggcctgcgcctctggacggaggaggaagtggatattctgtcgctgatcgctcagatgatgactgtttttctgcagaaacgaagggcgatggactggtacagcgatatggagcatcagctgcatacgattctcgattcggacgattcctgcatttacgtcatcgatcaggattcctttgagttactgtacttaagtcaaaaagccaagaaattaaagcccaacgtacagctgggagaatcctgctatcaggcaatctttgggaaagacaacatctgtgatttctgcccgcttctaaatggaggatcgggattactgaagctccctgaatgcggcacgcaggcagtcttacacgcgtctgccatgaaatggcttggtaatgacgcgtacctcttatccctgcgcacagattccgacgcaataactgctccggaagggaacacctccgccattttgactgaaaaaaacctggcagactgcctccaatggctgacctcctccgtatatcaggaggatgccatagaatacgttctgcgtatcgttcagaattattaccagtctgaccgtgtgtacttaattgaggtagatgtaaaacacaataccgcaaacaatacctatgaaatctgcgcggaaggcgtagccccgcagaaagacatccttcaggatcttccgcttgaaacgatgtccttctggatggaacagtttgcagtcagaggctatatcaaaatcgataatgttgaagaactgggaaaagaccgccatttggaatacgacattctgaaaaagcaggggatcaacagccttatggcgatcccgctgtccggacagggaggcttctgcggattcctgggtgtggatgaccccaaacagaataaaaagaatttccattatctgagagggctatcctattttctcgagagcgaactcgctaaaaatgcgctgaagaaaagcatggagttcatgatttatcaggattccatgacggggctcgaaaaccgtaacagtttcatggaatactgcggtgacttctcaaaacgtatgccggctcccacaggagtcctatacatggatatcaatggcctcaagcggctcaatgatacaaaaggccatctgtatggagacatgctgatcacccgggtatccgatcagatgaaacagaattttcccaatgcccggaaattccggctcagcggggatgaatttctgattgtatccgagggactgacctatgaagcatttatgatgcagatgaaccggctggaagaatccttatcagataatggcttctgtatcatctcaatcggcaccacctggaatgatatctataccgacttatacgaatcgttacataaggcagaccggctgatgtatctgcgaaaacaggagtattacaggaaattcctgacgattgcgcccgaaaaaatgcctatgctgctggatttgacaaacgcaattctgaataaagagtacctgatttatattcagcctaagattaacttaaagtcaggacggatcgacagcgccgaagtattggtgcgttacagagaaacggatggttccatcatgccaccctatcagtttatccccatgcttgagagcgaggggctgatatcaaatattgatttctttgtcctggaagaggtatgcaggcttctgaccagctggaaaggaacggcgttctcagacatcaggctggcgatcaatttctcaaggattaccctgtttgacaatcactttttcgataaattccgggatatctttcagcgttacgagatcaaaccggaacagctggagatcgaaattacagagacgcaggagacgctcaacaaaaagcagatggccctgctcctcgatcagctgaagagccacggattcggcatcgttcttgatgatttcggtgtcgaatactcctcctatgaatttttaatgatgacggactttgatctcctgaaaatagacaaaagtatcgtacagcggtacggaacagccggcaaatgtgagattttagtcaaacatatcgtggaaatgtgccatgagctgggcatcgaatgctgtgcggagggagtcgagacggaagaacaataccgtttctttaaggatattggctgtgattatatccagggatatctcatcggaaaacctgttccgccggaacaatttaagcggtaa

SEQ ID NO: 1362 - DNA, 816 bp, Hungatella hathewayi 2
ttgaagcacgggcagtatttcgatatactgaaaaaaaagaaaggaaagagatatatgtttgagttgataagaattgagtgtaaaaaagtgtttttgccagtgctcctcacaaccgtgggtctgaccattaccatgtgtgtgctgaccagaatactctatctaagctatttactgcattatgatttggaggcgtgggaggtaggaacaggagtattttccgtgctttatcccctgctcgttgtgatgcctctttgttggaatctatattatgagcgtaaaaataacttccttttatatatcgcgccgcgtgtaccaatcagaaaatatctgactgcgaaatggaccgcctatacactgggagcattttgtattatggcggttccctatgcgctggctgcggtatacgcaatttatataaaagcgcccgtgattcctcctgaatccaacaccttttcgcatgtttttcaaacggtatttgttgagaaacccttgctttatgcggtcattctttcctgttggagaggagtgattggtattttagttatgacccttggctttacacttgccctgtattgtaaaaatatatttgtaatattaaccgggccatttatgtattccatactcgaaaattatataatgtcaattctgaatctgtcggcataccggctagttgttgcttttgacccaacgagtatgagcaacagtgtggtgacatatttttcgtttattgtggggccagttttgctgctctgtgttatcggtctgacggcgttctttcttgcaaaaatcaggaaaaatgccgtggtgtccgtatag

SEQ ID NO: 1363 - DNA, 3435 bp, Hungatella hathewayi 2
atgatacaaccgggcgaggctggcagaacggtccgttctttttttgatgcgtatctgatccggcggaatgtgaaggacacgctggattgtgtgacagataccgtgcattgggtgggaactggaaagtctgaactgtcaaagggacgggaccagacggaacaggcgctgcttacggaattttctcaggcgccggaaccgatgaaaatagagtatgacagcttcgacgagacggttgtttccgaccggtgtgccgtcgtgcttctcacggctgatgtatatccgccggggagtgaagaacccgggatttggtttcgggtgagcgccgcctgtgtcaaggaagaggatgggatatgcagaatcgcatcgattcacgcatcgacacccgaaaggcagcaggaagaaggcgggtattttccgaaatccatgctggaccggtatgaactggagcgggagcggcaggtgaaccagtatgaccatctttttcagtccgtgctttgcggcattgtgcagtaccgtttgaccggtatgggcgttgaatttaaaaatgccaaccgggaggcgatccgcatattcggctatgaaccggaggagttctggcaaaaagaggattgggatctgccgatgctgatcatggaggaagaccgggagaccgtattaaaagagatcgatacgctgcatgagaccggtgataagtccgattttgagtaccgactgcttcagaaggatggaatcccatgctggatcatcggcagcgcggaagtccttcaggacagcgacggagagcagtttatccagagcgtatttatcgatatcaacgcccggaagagggcggaactgaatgaactgcgtctgaccagacaggtagaggcgagcaatgagatcatacatctggctcttgagcataccacgacctgtgaattttattactatccgcagacctgtgagtgtcaggttccggagcggacttgcgaggcataccactgtcggagccggtatgaaaatatgccgtacagttttgcagaggaacaggtggatgaagcgtattatccagccttctatgcgatgtacgatcagattcaccgcggagaacggacggctacctgcgaattccgcggaaaggacagccgttattggagccgcgagaccatgtctgtgatactcagcgatgaagaaggaaatccgcagtttgtcattgggattgtggaggacattacccgtgagaaggagatggagacggcgctgaaagaagccagatcccgcgacagcctgaccggactctgcaataaggagagcgggatccgtctgattcaggagtacctggcctcaggaagagagccgggggaacatggcgttatgatgcttctggatatggatgattttgaggatattaatcagaaggagggcaatatcttcgcggatgcggttctgcaggaggtggcggatgttctgcggcaggtgacggataaggagagcattaaggtccgcctgggcggagatgagtttatgcttttcctgaaagactgcaacaaacaggaggccgggatcatcgggccgcgcatcgctgccatgatacggaatatcatcctcaatacggaaaaggacattcggattgcggccagcatcggtatgtgcagcaccgaagtgacggacgaatataacgcgctgtactgctgtgccgagagcacattgaaatacgtcaaggatcacggcaggggtaacgccgcctgttatctggatacctccagggaggtgggcgtgctgcttacacagctgtatccggatgagttccaggtaaacacggttgaccgggagattctgcacccggagaaggatctcgtttccttcgcgctggaactgctggggcggtcgaagaatatcaacgacgccgtgtttctgctgctatcccgtatcggaaagaactaccatttcgaccgggtatcgattattgaggcggataaagcctttttatcctaccatttttcctaccagtgggcgcgccaccactcggatctgcagctggggcaggatttctatgcctcggaggaggattttgaaatctgcgccaacatgtatgacgaggatggcctggccgatcacaatgtgagagacggaatctcccatatcgcatcctgccttcatgccgcgatctggaactatggggagtacgtggggtccatgagctttgaggtcgatcaggaaaactatcagtggacccgggaacagaggaagcttttaaaagagctggtgaaaattattccctcttttatcatgaaatccaaagccgacgcggtgagccaggcaaaaacagatttcctgtcccgtatgtcccacgaaatccgcactccgatgaatgctatcagtggcatgacgattatcgccaagagtgtgctggatgaccgtgagaaagcactggactgtttagagaagatcgagtcggccaacacctatctgctggggctgattaatgatattctcgatatgtcgcggatcgagagcggtaagatggagctaagctatgaatccatagatttggaacagcagctctccaatctggaatccttattccgcgcccaggccgaggagaagcatctggagctgacctttgaaaatgactacaggaaaaaacggctgctccgggcagacagcctgcggcttaaccagattctggtcaatattattggaaatgccataaaatttacggagcttggcagcgttgcggtccgggtcaaggtgctggaggaagagcccagagcgctgattcgtttttctgtcacggatacgggaatcggcatcgaaccggctgccatgagaagaatcttcaatgccttcgagcaggcggctgcgcttaccgcctcccgccacggaggaacgggactgggactgtccatatccagccgcctggtgcagatgatgggcggtactctggaagtacgcagcgaaccgggaacgggatcggagttcttctttaccctgagcctggaatatgcctgtgaagatgcggaggagatccctgtgcaggaacagaacgtggacattcctgatttccatggcagtcgtgttcttctggccgaggacaatgatctgaaccgggagatagcgcagacgattctggagatgaacggcttcaccgtggcctgtgcggccgatggtcaggaagcgttggatctctactgcggcgaagaacccggctggtttgacgtgattctgatggatatccgtatgccggtcatggatggactggagtcagccaggcgtatccgaacctcgggacgcccggatgcccgcagaattcccattatcgccctgacggccaacgcattcgacgaggatacgagaaaatcgctggccagcggcatgaacggccatctctcaaagccgatccaggtggatcagatgctggagattctgggaaaatgcatgggattgaagaaatag

SEQ ID NO: 1364 - DNA, 3834 bp, Hungatella hathewayi 2
atgacaaaagatacatcgatctccatggaccagctagaggcgatcctggacaattcaccaacgacagtgatcatcagtgctctggataaccgggagcttctttatgccaataaggccgcgcgttccggaattgctccggaatgcctgggacggaagctgacctgttatcaggcgttcggccatgacagcccctgtccgacctgtccggccgggacgctcgggcaggaggacagcgcactccgcgagctctttaatccggggaacggccatacctaccggtatgtcggaaaggatattgactggtccggccgcccggcacatattgaatatatttccgatatcagcaaacaaaaactgctggaacaggaattagaacaccttgtaaactccattcccggagggattgcaagctatgagataagagagggccgttttatccctgtctactattccgacggcgtgatggaaatctccggccacaccagggaagagtacaatgagatggtgaaaaacgatgcattgggcgccatctatgaagcggaccgggaacgggtcctgtcggcggctgcaaaagcactggaaggcggggaggttctggacgtatcttaccggatgcgccataaaaacggccgtctcatctggattcacttaaatggacggcagatcaaaacctcctccgaagcagccatgttctacgcagtcttcacgggaatgtcgtcggaaagccgcttatatcagaatattaccaacgagacggcggacagcatctatgtcatcgccagggatacctttgagctgctctatgtcaatgaaaccggcggcatcttttcccccggacctgactgtcttggggaaaaatgttacgctgcgctgcataacaaaaaagcagcctgcgaattctgcggcattatggcgggcaggctggacggcgaagagtatgagataaaagaggacggaaccgagcggattacgtatacacgttcccgtgagacggactggaacggcattcctgcttacgtaaaatacgtaagggatgtcacggaagcggttcagatccggagggaaaaagagcgtctcgatctctacttccggagcatcgtagaacaattccccggcggtatttccatgatgacgtatcatccggatggaacgatgaggacggagttcatctcaccgggccttgctgcgatgacacagcggaccgtggaggaggccggacacttgtatgatgcggatatctttgcggggatgcatccggaggacgctgaaaagaatcggcagaagtttcaggaatttttgaagcgcggaacaggaacctgtgagctgacggggcgtatgcagcgaaaggacgggagctatctctggacgtgcagtacgctgtccatgctgccttccccggatgagatccgccggatatatattgtgtataccgatattaccaagacgatcgaggagcaggaacagctgcggcgccggtacgaggagcagcttctggagcattatcataagaacggggccaatgaactgattctcgggcacagcagcatttcccgggaccgggtggtggaaatgcgggactccacagattccgcacttgtggaacggtttgggaggcgcagggacgcattttttcagggtctcgcggggctgattacagacagggaagatcaaaaggcatttttgaaaatatttatgaatgaatccatgctggacgcatatgcccagaataaaacggaacaggcgatgagctgctttatccgtcttcccgaggaaaaatacggccgctttgtccagttcaaggtcaatctcctgacaggtccggaagcaggtgagatcattggaatccttacggttactgacattacggaggaaacgatctctgaacggattttccatcagctgtcggtcacgagccatgactttgtggtcgatgtggaccttcttcatgattcctatgcgatactggcctgcaatgagaatgcgtcctacatccctgctctccatggctgtcattcgagacagacggcagagatggctgattccatcgtactgccaaaggacagcagacagttccgccatgcgctggaagcggatgagatacgcagaagcttaaaaaagggcccctatacgtttaccttttccacggaaaatcatggagatatccgcataaaaaatatgacgattgcctccattgaacctcttttagaacgctactgtatggtgtgtacggatatcacggattcggtgcgggagcagcaggggctgctgcatatgatggcatatacgtttgaacttatggggcttttagatgtcggcagcgggagcgtcaccgtgtatacccggaatatggtactggaaaatctgccgccggataccacagaagattatgcggaggctgtcagaacgtttaccgatcacgatattgcgtctgaatccgctgagaatgtgcaaaatcaattcaggctggaaacgattcttcagcggctggagcaagaaccttcaggctatgattttgttgctgcctgtgtggggacggaggggattcggtataagcagttcagcatgctttggggaaaccggaaccacgataccgtctgtgtggtccgggctgatgtcacggacatgatagcggcagagcgcgaggtaaagaaggaactggagcatgcgctggcggatgcggaggcggccaacgaggcaaagagtaatttcttatccgccatgagccatgatatccgcactccgatgaacgcaattgtgggcatgacaaccctggctttcgcccatatcgatgaccgggtccggctggaagactgtctgcagaagattaccgtatccagcaggcatttattgagtctggtgaatgatgtgctggatatgagccggattgagcagtcgaaaatatcgttcaatcacataaggctccagcttcccgacctcgtggaccagctgacagccatcctggttccccaggccagggagcagggcgtgcagctgtccatatgcgcagaacaggttacccgtactgctttttacggtgatttcctgagaatcaaccagattctgattaatctgctgggaaatgcagttaagtttacacctgcaggcggcagagtggattttcgggtggaagagattgtaacggaacatacaccgtcaactgtccggtaccgttttaccgtgcaggatacgggaattggaatgagtgaagagtttctgaagcatatatttgaacctttcaccagagaacaggcggcagaacgtatcgaaggaaccggtttgggattgagcattgccaaaaggctggttgatttgatgggagggaccatctccgtagaaagcggaatcaatcagggaaccaggtttattgtagaactggagtttgaagaggcagaacaaaccttggctgcgcataaggacagcggggaagaggccgatccgaaaatggcaggtatctttcatggacgccattttttagttgccgaggataatgaaatcaacgcggaaatcctctgtgagctcctccatatggaaggggcgtcctccgatctgcgggaagatggggccaggatggtggaggcatttacgtccgcggaaccggggacttatgatgtcatactcatggatatccagatgcctggtatgaatggatatgaagcagcccgcgttatccgcagcctggaccgcgcagatgcgaaggaaattccgatcatagccatgacggccaatgcatttgcagaagatgtccaggcggcattggaggccgggatgaacgcacatgtggcaaagccgattgatatgaatatgctgcgggccgcgttagggcgggttttgtga

SEQ ID NO: 1365 - DNA, 702 bp, Hungatella hathewayi 2
gtggaggacaatcgaattgcagtaaaaaagattgtcgaatatatcagcagaatatccgcgaaattcaatgtggtttctttcccggaggctggaggcgctctgcggtacgcaaaggagaacgaaatttctctttttgttcttgatattcagttagaggattataagggaactcatttggcaaagcaaattcgtgagctgccagaatataaatatacgccgatcatatttgaaacggcgctggcaggagaagagctttccgcctaccgtgatgtgaagtgttacagctttcttataaaaccatttagtgagaaagaatttaccgaggtatttactgaagcaattgggttgtctgagcggattaaccggcagggtaaaacaatccaaattgagcaaaaacaatttattttggagtatacgacggcggacattgtgtatatagaagcttttggcaagaggctggtcattcacaccaataaccatatgtccggtatgaaagaagataccatttccggatatacgttagcaggaatgctggcgctgctggagggcgcttctttcgtgcagtgccataagagttatcttgtgaataccactcatattgacagaattgacaagactgggcgaaaaattttcttaaaaggatttccggatgccatcccagtcggtaataaatatcagtctgtgttatgggggaagccatga

SEQ ID NO: 1366 - DNA, 2253 bp, Hungatella hathewayi 2
gtgtccggcggaaaggggtatttaatgagaaagaacagaataaaaagggtgctgctgcagatgacccttattttagcggcagcagccagtctgtatgggtgcagcagagacgggaaggtcatatctgatccggaaggagccgcggcaggaacgcagaagaatcaggctttgggaaggtatgcggagagcgaagtccctttgccggagggagtcacatatgattccggactcggttttttagaaggaccggatgggagaccggtcctgtttgccaggaaagaaaagaatggaacggcagaatttaccgcatacctgctgtccgaggatctgacctgggaggaaaaggagtgtggatggttaaatcagcttggtcttaagtatgagaacagcagcattggtattacctttggagaagaccacaacatgtatgcggtctattcggaaggggatgaccaggaggttatcagcagacaccatgttgtagcggccggggattgggaacatggacaggaactcaatctccctgttctgcttgagactggcgagtatgggtataagtattacccgcggtccattaccgtattggaaaatgggaacctgttattctcatccggaaataacatttacctttatgacgcggccggacaacagaagctcgcagagctgccaggcagcgacagctgttactttgccaggggcagccagttttatgccattgacgaggcttccgaaagtctgatattatatgacggagaagacggcaaagaaaagaccagatatccgctgaacttaaatcaatactttggagtcccgggcattgtcggagagaatggtgatataagtctgttgtcagtggagggaattcaggtcttgaaaaatggttccggaatctgggagcagattatagagggaaagagcaataccatgggttccccgaaatattatgcctcaggattcgcggcgggcagtcaggaggattactttgtctattacaattccatggatgaaaccaataagctctcccattacgtttattacccggatatgccggtagagccggaaaaagagcttaccatattctcactgagcgacaacaataccatacgtcaggcggtcagtgagtatcagattgagaatcccaacgtgaaagttgattttcagcctctcctggaggaagggtcagccgcagtcgctgacgattatatccgaaccttaaatgccgaactgcttgctggagaaggaccggatattctgatcttagacggattgtcagaggaatcttacatcgaaaaaggcgttttggctgatattacagatgaaatagagcgtttgactgcgtccggtgattttctggccaatattgcagaggagtgccgggtggatggacggatttactctgtgccggtcagaatcgggcttccgatgacattcggcaggaaagaggcgcttaaggaagcggggcagttatcttcccttgctgattatgttcaggcccatgagaccgggcaggtattcgggacggttgacagggaggcgttactttctttttacgcagatgcatttttaaatgatatcgtaaaggaaggcgatgtggtcgaggaaacggaattaacggaatttcttaccgatatgaagcggatcatagatggaagcgaggtctcagacggcacgagggaaaaacggccttccagcatatgggggctcctggaaaagggcacacatctgtattcaaatgtgatcaacggtttttttgaatccgggcagggagcttccattgtcgagcaggcccagggaaaactggaagcggacgttatcctgatcaatgagacgtatgtgccgtatggcaccataggaatcacgaaagccagtaagaatcaggatctggcaattggatttctgcagacagttctgtcggaagacgtacagtgttccgacttttacgatggatttgcagtaaatcagaatgcgctggagtttttatgtacggtggagagaacgtcagcggatgcatacggaggaactatccccggtgcggatggaagaacatacgatatgaaaattggctggccctccgagccgcttcgccgcaggatgacagagttctgcaaaaccgtgaagcattccgccggcaggaactggaaagagaaacagatcctgttggaatactcaaaagactactttgacggaaccgcctccctggaggacgcagcaaagaaactgatgacgaagataaccttataccttcaggaataa

SEQ ID NO: 1367 - DNA, 7038 bp, Hungatella hathewayi 2
atgctgactaatttgagttttgagtctatacttgcctatgcaacagagggcagaacagtaaaattccatgtgggtgagagtgtgaccgctgaattggaagacggtgttctgacattaaagggtaccggtgatacaaacgattttaccaaggaaaatgcaccatttctggagtatgcaaaagagattcacactctgatgatagaagatggcattacctatatcggttcctgtttgttttatgatctgggcggtctgaaaggagaattgaggcttccggagagtctcatggggattggtgattatgcgttctcaggcagagacgcagaacacgctccccgattttctgttgtgatcaatgaatttgatggcggggaaattgtcagccgtgattgggaatttctagataaagaacagaaggcgacaccttccaatgctgcgaaaaaatcaagtccgagcaatgcatatagtgagaatacgccaccggctttgaatgcagggattataccccatatccaggcgctgttgtgcgaaggtgcggtaacggcagggacaaatgacgatgattccaggacggaaagtggtattggaacgaaaacggaatctggagcggaaagtagtatcagagcggaaatagaatctgaagcaggaaatggtaccggaagaaaactggaaacgggagcagaagatggtatcggaacgtccccggaaacgagagcagaaaatggaaccggaacaccccaggaaacgggagcagaaaatagaaccggaaccccctcggaaacgggagcagaaaatggaaccggaacacccccggaaacggaagcagaaaatggagccggaacaccccgagaaaccaaaccagaaaatggaaccgtaaaaccccgagaaaccaaaccagaaaatggaaccgtaacacccccagaaaccaaaccagaaaatggtactggaacacccccagataccaaaccagaaaatggaaccgtaacacccccagaaaccaaaccaaaaagtgctgccggaacacccccagaaaccggaacagaaagtgatacagaaacacccccgaaaaccgaagcagaaaatagtacagcaacgaataccgaagccggagcagaaaacagtaccgaaacagacaccgaagcggagactggaaccgctgtggaaacagagaccggtgcagaaacagtgccaggagtagaaaatggaggagccgcagcaacggattccgccacagacaggggtagaaagaagatcaaaaatcccttggaggatgaagcggaatacgcgatagagtacataatggaacaacagatcgaaaacccggaaaccatattttatgaggatcagagaggttttgtgatttgttctcaggataatcagactttcatcgatgcggcggaatatgccggatacgaagtggcggacgggcttgttacggctgctttggatgataaggcagagatggaactgccggtccgggatgaacagattcttctgccggaatgtccggaagagatcagtctgctccatgaggataacgaattttaccaggagacgtttaaaggctggactttagaaggggaggaacctggcctggtgagaactcccggggagaccatttcttcggtggagggcgagtatctgagcttgtactcggtatgggaaaaggccgaaaactatcatttccgcgtggaagcgaaacgggaagggaacacggcagtgtataccgtgatcgataacagcaccggggagataccggaaaatccggatgaatttatgtaccggtaccagtggcaggttactgatcgtgccggggatatagaacagcaggaaggaaagaagatcacaatcatgcacgctgcccattcggctaccccatcggaagccgttggcagtgacatggagacggaaagcggctggacggagcttcagggggccgatactccaagatatgagagagagcttgaagaaaatcgtgttgatttatattaccggtgtgtgatcactcctgtgaaactgacacgttcgcgttccgcttctgaggcggttgtactgtattctgacgcagtggctgcggtagaggatatcaatataatttatgtagatcagttaaatggtaatgacatcaattccggaaaatccagcgatcaggccgttcagacgttggaaatggcggcgtcacggctaaataagagggaagccggaggaacagctgaaagtaaccagattatattgacacaaaattatacctataaaggaaatagttcggtgtctgagcaaaataaatggaagtggcattttttatcagataatgcagtcccagtcacaattaaaggtatcaatgataaaatagaattatcgaatcacgcaaacagtgcaaacaatgatttttaccagtacgaggaaattatctttgattctgttaaactgttgaacctggatcatatgtactgtaacggacacaatattcggattaacagcagtgttacaactggttcaaatctctatttgtatggatccggacagaatgacatcactgaaaatgtgggaacaatcagtgtatacgccggaaaaattacaagaattgtaggttatataagaagtaagccctctgtcgatgttaagcagaagaaagccgttattacggtagggggaagtgcagatgtagcgactattattgcaggcagcgccagtggagaaataaaaaatgcagatgtggaaatcaacatagaagggggaaatgtagataaactggtcggtggctgtcagggatacagtgaggccaaatctccgtattccggaactacggtccttaatatttcaggcggaacggtcaaaagcatctatggggcaggatcgggcaggaataaaagcattccgacattttccggtgagctggatatcaatataacggggggcagcgtgggtaatgtatacggctccggttctgcagcctatgttaccagcagcgggagtgaaatatcaaaagtaagaattactgcttccggaggcgtcgtaggaaatatctttgcagcaggtattggcggggaagccagtgtttctgcagaaaatgaggccaatcagacgttagctaaagattttggaagcttgacaggtgacgtaacaattacaattaaagacaatgcagagataacaggagatgtttatacgagcggaagcggacatgacacaacggggacgcccggatatgatatcacccagaatgcatatttgaaaggaaacgtgaccttgaatatctccgggggagcgattcagggaaatgtctacggaggcggtaaaggaatcagccggtctggattcgatgactgtgcccgaattgaagaaggctctacggtcaattttcagataagtggcggcagcataaagggaaatgtctacggaggcggaaaaaatgcgaaggtcaaaggaagaaccatcatatccatttccggcggaacgattcagggaaacgtctatggcggaggagaaaaggctgagataagcggctccacgtcaataactataaccaatgggatcatcgtgagtaatctctatggaggaggaagtgaaggtctggttcggggagatgcctccgtatccatcactggcggaacgattcagggaaacgtctatggcggcggcagtgaagggctggttcagggaaaaaccaacattaaaatagaagatggaaccattaacggttctgtttatggtggcgcgcttggcaaggctggcgagcgctatgtcttaggcggctccaccgtcaacctgacgggcggctggatacgcggcaatttatacggcggcagtgaattcagcaatgacgggccggaagaaggcgaccctgaagatttgattttccttaattttgtcggaggcaaggtcagcggcaaggtattcggcggcggctaccaggggattacgaatggatcgactcatgtgcatataggggtggaggcgataggagcatgccagcactataaggataatccgggtgaaaagcctgatttgaaggcctccgatctgtctgtggaaagctctgtatatgccggcggtgattttggcggagatactccggattacacaaccataactgtaaagggcttttcacatatttatatagacggagaggggtatgacttcggcggagatcagggcggcagtaaaatgagtatatcaggcggagtatttggcagcggagcctcctgtgacgccggttccgtcagactggtgaccgtggctaattatggcagaaagcttacggacgctgacgggaatctggacagtgtcagcagcactcttacatcgatccagagggcagaccaggttcgcctcatcaattctcatgtccatttatccggacagtcggatgcggccaatagtaatcagacggcattgtattctttaaaccggattggagatctggaaaagccggaggaagatcagaagaagctgggcgtattgggaaacagtctggtgctggcagacggaagtacgctggttctggattccgcttccatcgaactggctaattataagagtgttcagattacggaggcgggaataaaggaagtgaagtacgaggagctttccagtgtttccaatacaattatgctgacaaccggtaccgtattccttgtctctcataaatcagcggccgattccacgacggaaacgtatggggcggttaatgggtattcctacctgcttgcagaggagaccgcgaaagcctatgcctacgcccggattaagaacgatgatgctaatccggacgacggaggttttgccgtacccaatcaggccggagaactggggtatacaaatgtcattgaccagggcttccgcttctggcaggtggctggggccaatgccagcgctgtgcgggaaaccgtactgaccgcgcaaaagctggaagatgggccggcggatgggttctctgttgcatcaggcacggtcgaactgcctcctgcggagcatgaatcagtctataaaatcagcagtatcacgataccagccgcagttaagcttgcagataccgcaaaggataaggagggaaattggattaagtctgacgagtctattgacggtgacactgagaaaaataagattaaggcagacccgctgaacagttttggtctgagcataggcacagacatcggacttatttcagctgcggatcatatcatttcacccaatacggccagttcgggttcatcctatacgattatcggaaaaagctcagactctgtcagtcagggaaaggtacctaagattacgctgtacctgacctatgataacgacggaatcaccaagagccaggacttggggactgtgactgccgagatcgaacgttacgagggaaatgtaaaaaaagagacgaccaccctgaatatagaaatagtcacgaaggcggctgcgctgtccgatcagagtgtggaactctacgcgacacagagcggcaattacacggggaagctggtgataccggccggaatgagcagaacgttggatttaacaggtgtgaagaccgactttaagggaacaaccacattatgcagctatcattctgaaacgaagcttacagggtacaacatcgcagtcgccatgcagcctgtccagagtcagggatggcacagcgcggacctgatggcagaaagttatgatctgagcggttatatggaagcggattccgtgagaattggatcaaccgacagccggtatgaagcggccatagaatttaccctttacaacgcgcccggatttacggcaaagaacgatattgatgtggtggctttaagtctgcaggatggaagcggcgtgacggttaccattgaactgaatgtccgctgggaagaatcagcggtttccgaaataaagacagccggtggaaaacagtataatggtttcgaggcagcagaaaatattatgatctctcctaaaagttcgttgacggcatcgtttatactcagaaagccatacaatgctgcggatctgtggctcgaactgcagaagtcgggaaaaaggatcccgatcccggcgggaacgaaattgactctgacagaacagggaaaaccattttttatataccgtgtgacgggaaatgagcaggacgaaaagattaagctggatgatttcgagaagatgtgggccggcagtaaactgactggtgagacaggcagcaatccggttactgttatcatggaatttgactcatcggacgggataaccgcagatgagtacagccttcgtctccgcaatgaagagagcgcagattccataggagccggttttacggtgaataattcgtccgtgtctttagccgtaagcgggggcgatggtctttcccgcggtgagcatacgtttcagctggaggtggcgcttagaaacgatacccgtatgctggatggggcggctgtggtaatgcagcctgaggacggaaccgttttcccggacgggacggtattcaccgtcggagaaaagaattactatccggttggcggcagggtttatctgcccatcagcctgagcgatctggagaagggaagctttccggttaccatgaacaccacagataccgttggattacctccgggcgaaaaccgcgtatcggtacagcttttttcaacaggagtgaactccggcggagcggcaatcacctctgccgtaaccgattatacggtagaagaaaatccagaatatggattgaagatttttacccatgaggggaagcggctattttctcctggatcagaagtgatagtttatgcagattatattattaaaaatgcagcagaaggaattgcggtacaggttgagttttacaaaaaggagaatggctcttacgtgaaaatggacgactggaatgtaagcagcagcggactgcctgtcggcggacttccgcaatatacaggcacccagacattccatatcaatgtgcctgacgcagatcaaatgactccgggtacttaccgtctggtctttatccttggagacaggagcgttccgtataatatcattgtccggcagagcgggcagtaa

SEQ ID NO: 1368 - DNA, 1911 bp, Hungatella hathewayi 2
atggttaatatagacaaaaaaagaaagatgaaagtggaaaagatggacataattatgaactcgagaaatgatatggttcagctgtttctggattttataaggccgctgaaagcattttacagtccgaagagggcatttcttcatgtggggaatacaggggcccattacggtgaaaagtcggccaggatggaaggatgggccagggtgctctggggattggggccgctctggtcagcggataactccgggctttccgcagaacagcaggaggagataagggagtggcttgtactctatcggaccggtatcatccatggaacggatcccggggacagcgagtactgggccgacatatttgattatgatcagaagatggtggaggtggcggcgctcgtattttcgataacggtcaaccgcggggaactgtgggacacgctgactgacggccagaaggacaacctgtaccggtggctgagacagatgaatgactacgacatgccgaagaataactggaggtatttcagaattctcacgaatatgacctttcggctgctggggctggagtggcgggaagatagaatggaggaggactttgcgctgatcgaaggctcctataccggcgatggctggtattacgacggcaatccgggccaggtcgattattatgtggcattcgcgatccactattacggactgatctacgcacaacatatggaggcgctggagccagagagatgccggatcctaaaggaacgcagtacgaagttctttgatgattttgtctactggtttgcgaataacggggaagagattccttttggaaggagcctgacctaccgttttgcacacagcggcctgttcggagcgatggcctacgccagactcgatgtggattacggcgtgctgaagaatctggttttaaggaatatcgaggtgtggatgcggcgccccattttcgacaacacggggattttgagcattgggtacggttatccgaatcttttgatgagtgagagttacaatggatgcggttccccctactggtgcaataaggcgtttatcgtgctcggactaaatgaggaccatccattctggacggctgagcccaaggtgtacccttatgaaccggtgaaatatttaaagcacccgcacatgattgttacccatgatgacaacgatcacgtgctggcttacgtgacggggcagcatttggggctggatcacggcaggggcgcggaaaaatatgagaaattcgtatactccaaccagtttggcttcagtgtttcgagagggaccagcctggaacagggggcgtttgacaatactctggcattttccgtaaagggagagaaccgttactgcatgagatacggccagacagacttttcttcggatgaggagaagctttctgcaaaatacagcccgttgaccggtgtggaggtaataagcacagtggttccctgctccccctggcatgtgcggattcaccagattaccaactgcgtaccggttacggcagcagacggcggtttttccattgctcgggagcggtgctttgaagtgacggagggagccgggacgggcagactggaagcggagaatatcgaaatcacggaagcttctgcatttgtaagggctccatggggagtaagcggaattgtgaccgaaactgaggggacgacaaagcttgtgacgccgtttccgaataccaatttattctataatctcacggttattccgaccgtgacagcggaactggaaccgggcagccatttactgattaccagtgtgttcgcagaccgctccgccagtgccggggaaatggccgggcagaagcctttcgtgagtgtggaagagggaagcgttacaattgcatacagaggcaggacagtgactgtcccccttttatga

SEQ ID NO: 1369 - DNA, 13746 bp, Hungatella hathewayi 2
atgagaaaaggaatgtggaaggaaaccgcaaaaaggctgtcatctattttgctggccggtatgattttgacaacgacagtggcgccgccggtttttgcggttcatacttattactggcccgatgccatttctgcggatgcaatggaaataaaaaattggacctggaaggcagaaggagaggcggcagcattggctccatcggtcgggctaattcccaccggattatcacagcaggaaaccgcactgatgggaggctatacaagtaagttttggtttcaggacgaaaaggccaaaacaataacaattcccggtacatcggcagaactcgatttttcaaaatttcatcaccgttactttgcctgtgcagacagtcataacaccggtttctttgcacctgtaggcgcacaaatcgccttccaaaagatgtattatcccaccaataacctgggtgactatccggatttcttaaaaaatgcccctatggatatgaagacaaaaaagtttgccctccttcttgtcgcattgataagcgccgcttatgagactccatctacagcggatttgagggattctgatcggatgtccatgtattattatctcctgtgggcttctatctggagtaacgataagtatgtggatcagggcatgttcacaggagagtcgccggagggtgactgggattttatccagtattttgtacggacaatgctgaactccaggctaaatccagatccatatggaagtacggcaatttacgatgcgtttcgagatgaaggtcctgcacagaagtatttttttaactgctggaaagcagcaaagtttctgtcgtcgtttgattattctgtcgatatggggagcgtactgccggtttcagagcctgcattggacggggatggcatgtatcatatgacgttccgctatggggatctcagtgattatgagaaagaggtatacagacgaatgacagcggaaaacctggcgccgggctgggcgtattccaatgatggaagtaccattgattttaagtcagcagatggtgtgtcagatggaaacgcaatagcaactctgaaacttcaggaaaattcggaagaagatcgtttttataattgtggtttcggcgttggcggcctggccggattccgcggttgtgcgaaaagaggtaaaaacggcgattttggctggggtaatacgcaggtgtatttttccgcagtatctgaaccgttagagcttcttgtgggcggtcgggttcctttaaaaccgagcggggattgggaaatagatgttcaccgatatgagcatacggagacctgggaagcgcattataatattcaacttcgaaaatatgattctgagacaggacaaccgcttgccggttctaagtgggatattcttgaagcattcgatgatacccagcttgacgatacatcactggaaacctctgataactgggcaaacaggggcgggagtcagttcctgaagtgggatggttgggattacggagaagggaatccggacggagacgctgcaaataatccgtgttcctgggatatcaatgtaacaaatgaggacggcattctcatgctgggggataatgaggaaaatgcttctgaacagagggcgcataccgataccaaggtttatacctatacgaaggggtactgcggcggtcatccggaaccggaaatagaagaaagtggtgatccggatattgacgctgaaaatgaagctgctgcgaaggaggcatggcaaaaagaagtggactactgcgagactcttgcagaacagggcggcttttttcattcccttgatgcaggagaagcgaaagagcagctggaagctgaccgggataagttctataatcagtttatttccctgaaatacgaatactcagcagtagaattgactccacggccgggatatacaaatcatggaagccatacagacgatattccaattgagatcaaaacggttacgtcctcagagtataaggacggtgtgtataataaggaattaagtttacataagacaaaagacgaaccgcaagggactgagtcatcagatgcatttgcgccagagaaaaataacaattttgtggaaaaggaagcattggacaaaatagctacaccttctgacgccacatcatctgacgccacatcatctgacgccaccccttctaacgccacaccatccaataccgcagcttccaatgccaccgcctccaatgcaaagaaaaggaccggccttttgactaaactgaaggcactattcgaagtgccaagaactctgattgagcgaaacataaataatagatctttactcattgacgatgaggaagtcatgaaacgcgtaaattttgaaccctccgaggtggagacgcatgtaccgggcgataaagggattacagaccatacatttattgtctatgatcaccggactgaaggtgagatacatatcaacaaacgtgatctttatttgcaggctggggaaaacaaagattattatgcatatggtgattcgatgggagatggtaccctggagggcgcggtatacggcctgtatgcccttaaagatattaatcaccctgatggctgcaccggtaccgtataccaaaaagatgatttagttgcagtggcgtcgacagaccgaaatggtgatgcttcctttatggctttcacagaagctccggggatgatatggaattataaatctgggaagattgaaaaaaggccggaagcattcccggggcctcagaacctctgtcggaaccgagcagatgcggataaggtcaaagatattgaaaattatgttggttttgattcaaaaggcaattttatacatctgacagattccgtggcaggtgatggatcgggatactggaaattctcttccaatcagtccggtattgaaggcttgaaaggaagctatgctgcatacccggtatcggataatgataagaataatggaaactgctggatagggcggcctttaattgtggaagagaatggaaccacatactatgtaaaggaactggccagatcagaaggatatgagctctccgtcaatggaaaaacaaatagtattacaaatggcagagataactatgaaggagagtatcaagaggctgacgttgctattggaaaaatcactctcgatatggtgggaaatggaaactattttgatgtgactgcttatcaggcggatcatgatattacgctgcacgggattaaatttccggaaggagcggtgttcgaactatccaccagtgagaaagtgccggaaaaaattacggtgcctgtttacaggactgtattaaaaccggttatggcggcggcaggtacctttgtctaccagtcgggacagaaagtggctgccgtccggggagatgttgtaacctttcctgaagggcagagttaccgtgttaatgccgtgtcagctcgggaagaaaagacaattggtgttaaaccgatgaattatcatactatgggaacacctgcagtgacagaactcttttcaggaggatctccgaaagactttcaagcactctataatatggaactcgacaaccttggatataaagaaccggaggcagatgctccatgggtgcgcgtaaaattaagcggaactacggatacagaatggatcctctctattacggaagctatgaaagcgcatagcctgcagtattttaacagtctgaggatctctgatatggagcagacaggtggagagctctatgctattatgcgttatgaatggaagatttacgatgacagccgggatgatgctgtttataatccggagaaagactgtctttatgtaaaaaaagacagtggcaatggatattttgtatatgttccgtacgatgaaccggcctccaatccggcagtactgtcctatcgtatgaagaatggttttttggagcgggcgacattaaaagagcaaaatattgatggactgaatgtgtcttacccgtcaaaactccctgaatcatttgccatggtgaccgcccggacaccatcatactggatatatgcgccaggtgagcagcagatcgatgacgcgggaaattttaaatactccgaagagactatcgtggattatgtggagcaggagggctttaagacggttgaaaagaagatcaggcttacttctacatatgataccgcaaaagaaatctatgtggttacgcttccatccgatgcttttaaagagacggatactgtcaggcttaaagtatctgatgacgggagtgggaagtattcgatcaagcaggcgtacatcgaccagagcttctttgcctgccagcccttgcagcgggaggcggattcctatattcaaaatgtaacacttacaccgccgaccatcgatcagccgtggcaggatggaaatacaagaacagaacctgccgatgtgatggaacgtcctattatgcagaagataaaggttgtgaaagatattcttgttgaagaaggagccaggtatgaggacaatacatttgctgattccggccatgaggactattttacacagaacgggggtgggacgaaggataacgtatcgttcaggcctaatttccgtttcaagatctatttaagatccaatctggagcaattgtatcgaacggaagatggagagattgaatggcttgatcgaaacgggaatactgttgatgctgctgcgtatcgggcggcatatccggcaagagtacaaaaaatctatacgaaggtactgcatcgtacggatttacattccagaagatccaatagagacgcaatcgccaaccaggaactttatggttttacggatggtttgatcaatgaaaatcaggagacgggatatactgcaatactggagaccactctgtctcatgaaacggatgccaatggaaatgagaaggagaccagaagacttaattatgagaagttttttgatgcggtaagggttgcaaatcaggataagtgggacaaagcaaaacaggagcgtacttcttttaagcccttcgcattcatcagacgccttctgtttggaactgccggttcagagtgtatttatccggcagagcataataatacggaaatccaaaataaagccaatacttctgtaattgcaaaagaaaacagtgaccgatctgattcagttaggcaatttgctattcaatggtatctggacagagaagtagaaaaactggtgagagaaaacttcacaggtgaaacggaaattgcagccggccatgaaggctatcaggatgaggtatatgatactgctctgaaagcggctgtaataaaggccgaaaattatttaaaaccattctttcattatgacctggatgagatttatgctattgagtgggacagtgaatcagatggaggcagggataaagacaaaacaaccctgagtgcggataaggaggaggccgctttcggatactgttatggcatatcggaataccttccttacggaacctatgtaacagtggaacagcagcccatggataaggaactgggagatttcctcaacaaacattatgcaattgatgcgccaaaggaaattgagttaccggctgtctatgaagacgaaaaaacaggggatggcataactccggaaagactgagccgttactataattacaacacgaatctgtctgcggcagacctgacagcgaaatattttatccgttttaatgaggagtggccgggagaaattgatgaaaacgtaaaggattatgtaatcaaggctcatggatatctgggggattatgagatttataagtatggacttgatctcaataaaatagcaggaactgcattgggagatccttacaaaacaccgcattttgagattactcagagtgaatatgatccgctgaaagattactatcatacaattgtttttccggaagaagacggaggaaatccgaacagccactacctggctgatgatgttaatcatggggtaactgcgcctaatggaacggaatacgaacgtgacggcatagaacggatctaccgttatggttctgtttctgaaaataagcagacgtatgatgccgtttcttattctggagagtatgaagcgcaataccaggatcacgtatctgctatggaaggtatgcagacggcctatgatggtaaatatgcctccatgctggtaccatggaccataacagaacctgtaagtgaagaacatgataccatacagaacccggatggttcagcctccggggtgggatatggataccggaaatttcgaaataccttttacagaagccgcctgcgcatagaaaaattggattcggagactggggaaaatattctccatgatggggcagtttttacagtgtatgcggcagaacgtgaagatggagagaaaacagatggtcgggtaaagttttataagacggataccctgataaaggggtccagagaattcttagaggcgatgggtgcgaaagagattacaaaggcggccagagcacttccgggaatcggcggcctgtggactggaattgtggaggcgggaacccctgtatgcagagagtcggagcagattatcatgacgaatgcaaacgggcgcagaacagggggatttgaagcgtatacgacgacgcgggatggtcttcaggcggaggaagagaacccgtcagaaaaatcctggcaggatcagaatacaggctatctgatcactccccagccattgggagcggggacctacgttttgtgtgaaatgaggccgccgtccggctatgtcagaacgaagccggtcgccatagaaatttattccgataagatttcctactatcttaatggaaaccaggacggccgggttgtcgcggcagtctatgaggatggtaccgtactgaggccggagggggcaaaagatactgcgcgggtttatgtgggaaatacaccgatacggcttgagatatccaagttaaaggaccgggacaggaccgttacttaccgtacccaaacacgagttgacggaagtgaaacggagctaaaggccaaatatggtcaggagaatctggagtttgcttataaagagggaagctatttgaactatgcctggtataagggaaccgcagaatacttagagagccgtaaactggcaggagacgcggtagaaccagtctgtatagatggcatatttgctggttacggcctgataacacgcccattggacactgcagatgatacaaaccgttacgtttcgggggcgaagatggctttgtatgatgcggtcgaggtcaaatcaaatggagacagcggtgattacggctacgacggcgtagaggtgttgcgggaccgcaataacaatgtgcagagtataaagcttttggaaggatatgcaggaaacaccgtggagtttgtcaatttagttgatattgaaggaagccttagtggaagtaccggtcacggtacctggacttaccgaacggttgagcggaaggatacggatattctttactattcattgggcggcctaagggttacagaactgggaagagacggaaatgtgtatggctatgaccgtgatggaaaccgtattcaggtgcgtaatcagaaatccgtttatgctataaaaaacggccatcctgtctttgaactcaccggtggagatttggaacatgcagtctattcgtccctggataaatgttttaagctacaggaagggactaaactttaccatgtggattcagatggaaacagagatgcaaagatcgaccctgcaacaggaatggcctatactacggaggtggggacggaccagaggggaaagaagtatgaacggattctggtctggccagtcaacgtatccaagacggtaaatggcgctgttatcgcacaggaaaaaataaagacataccggattgcgtcgattcacgcagatacagaggcggagtatacgattggaacttacgatggaaccatgcttaaaaagtctgtaaatccggtagttggaagccatggccttccggattattatcagagatcagaccaggtatataaaaaaggagagcctgtgtatgatattgaccacgattatgtgaggtatcggtactatgatcttttgcctgcgtttaaccggaacgcttaccggattaataaccaatgggatttacgaaatgtaggcgaaaaggaagatccggcagatgataagaaattgtttcatcgtcagggggaagcgtggattatggaaaacacgtggatgtcaggagatgaatatcccaacgatccgtttaatgtcgatcttacgacagggcgggcagacatgctgaaacgcgtgattccgggaacttatattatggaggaggtggagcctccggctgggtatgtaaagggatttccagttggtatcacagtgaaagaaacaaaacaggtgcagaatgcggagctggaagatgaaaaaataaagatcgagatcgtgaaaacggatgctgcggatcagtaccgcatagatgtaatcagcgattatcaggggatattgaagacaacggaaccaaagggcgcttacagctatggtcagatttcaggggcccatctggctctttataaggcccggaggaagtatacgacagatactgtcacttatccctctggctactacctggagaaaacagaaaatacacctgcaaagtggactgtagaaaactcggaagataattcaccagtcatagtgacagcagactggattacagatggaaagccgaaatattttgaagggattccggcaggtgactatattctggaagaaatagaagcttccagtggttatgtccgtcattccatggagttggaggtcaagaaaacaggagaagttcagacattccatatgaaagacgaccataccaagcttgaagtctttaaatactgcatggatgggaatggaaatatgataccgctgccaatggaatattccgcaggtctggcactctacagagccgagacggatgaagatggaaatattaagatgaatggaggagagccacaatatgtaaaagaccagctaatagatgaatggatgacggacgatctcaaagcttatacagaagactatgagataagtcctaaatggctggaccgcatgaaggcctttttcggacttgcagtgaatcaatccagttttatactggattttgaaaatacataccggaagttgggagataattttgtatggctgacatggcatacaaaagcaggtaaaaaatccgcagagagaatttcttccataaagatggacgtcacagacagcgcggtacagttgtggagaacggatgacggtaagatgatcagaatcaccatatatcgaaacgtccataacggctctctggatgaagacggacagcttcccctgaatttcgaatatcagttcaactaccgggagctggcagcagggctgaagagctacgatacactggaaggggttcacagaatcgattatctgccgtttacggatataaaagatggccgaaaagtgggtaattacgttctgattgaggctgaggtcccagaaggctttgaacgtacaaagcccaaggctgttgtactggaggagaatgggagtgtacagcgattcagcctggagaatgtggaaaagtatgtatccatattgaaagtgatttctgacggaaccaatgaatatgccgtggaaggggtaaaaatggccctctatcggccaggaacagatggaagctttattcatgatgagagaaatctgatagaacgttggatttcgggtgccgatggaagatttacagaagaagagtggtttttgggaaatattccggaaggctttcgggtcggagatataagaccccatcaaatcagtaagataccagatggtacttactatattgttgaggaggaggttccgccatatatggcaaaacgggaaccggtaaaaattgagattggcggtgatacggctacgataatccgtgtggtgaatcaaccggctcagggacgcctggaactgcttaagaaggcggccgatacgggagaactgctggaaaatgccagattcctgatcacgaacagagacacaaaggaggaatggtatattacgaccggtcataatggacgtgcagagcttaaaaatctggcagtaggcgaagttcgggcagatggaacaataaatccttatacttatacaattgaggaggtctcgccgcctgattattatcagatctcggggggaaagaagttttttacctttgatggaacggctgacagtcaggttgttacgtatacccatgcggtggaaaactatcccacacaaatacatttcaaaaagaccaattttgataccggcatggcgttggaaggtgccaaaatagctgtctatcatgcagtagctatagacggagaatacgtaaaaaatggagaagccattgaaattaatagatccgggccggagggatttacaattaaaaagaagttatcagccggtcatgtctatattatggaagaaatggaggcaccgaccggcatccatttgtcgcctccggttatctttacagtgaatcaggctggaaccggcatcagtaatataagaaataatttcagtgtactggaatgttcctctgccggcggaaccattgagtcactcactgtttttggcagggccgcggataagacctttacggttttgaaggacctggataccggggaggtgctgcctgatatcatcagcagtactgatattttacttacggctgatgatggaatagaggaaggccatttgtacgaaataaccgaatatacccgctattcagatggtaatacggagatgagtaaaaaagagacgaggagaatctggtttgatgagaatgggacatttcttttgccatccaggacatatcttggaaccaggcttcaattggaaaaccaggctcgggacgagcttgatacatggaccgtggagaatggaagttttaagcatgtaatagaaaatcctgttacaaaggaacgtgccgtcgcagaggtcacgggaactgtgggtaacggccagatgccggtcacaaacggcgatgtaataaagtacgtcatcacatacgaaaattctggtcttgaaaaagcggatctgattgtcagtactaaactggaaaaaggcctggagtttatgagatcatccgggaaccctgtaaaaactgaaggtatactgacatggcagattcatgatgcagaaccacactctgttgggcacttggagttggctgcactggtaagcggtcagatgggagcgtcagcaagagcggtatttactgtcagttctccaacgaatctcacggaaactatattggaaaatcctatcgcaccgaaaggaagtctaacggtcagaaatcacatttccgggacgggaaggaatccacaggatacctttacatatcagatgcgtttccttgattcgtcaggtaagctgctgtccggttatcagaattataccggaacaaaagaaggcaggataaagggaatgggacaaattaccctgaagggggacgagtatgttatttttcccggtcttccctatgggactgaatatgcaattatccaggaagtgaacagagattatgaaacagtaaccagagaactcgccggagcaatatcaaaggaggcacgaggggcagtctttgaaaataacagaaacgatgagacggtcagggaagttctgactgcaggaggcaattaccgtttgactgaaacaacgggatacacggacggtatggagcagactacagggatataccggttcacattaaatgaatccggaaaaattgataatgtggacatggaggaccggccggtaaaattatacttttccaaaattgatattgctgctggcgacgaaatttccggaggtatctatgcagtggtggatgcagaaactgaaaatgagatttacagatttacgaaagcggagtctgtaccggttcttattccggcagatgtactgataccaggaaaagagtacattcttcgcgagggtacgccgcctgacggttattcacgggaggaagatatacggtttacggtcaatgaggcggggattccggaaacaataatcatgcaggatagaaagaccagaatatatttggagaagctggatgccgacactggggaatccgttacaggcggctattactgcgtaagagatatagagagcggcgaaacagtcttctgttatactgcctccggtaagccggttctggcagagggaattctggcagccggcaggacgtatgagctggcagaagaaaagccgccggcgggttatggatactgcgaaagcattgttttcaccgttccattggaacctgagacgattaccgtacgtatgaaagataaaaaaacagaaattattgtgaagaagctcactctgccgtctccggcaaatgcaagcccgtcggatgcggaacgccaaaagccaggatttatactacagatcctgaataaagacaaaagtcctgctaaagcggtgagagacttctccggatttaaagcaggcgaagagctggtctttactacagagctggaatttaagaccatcagcggtcagctggcagcaggcggtgaatactggctgcatgaagtaaaaccacgcgatggttatgcatttgcggaagacgtgccgtttacggtaggcagagatggaagtcatgatattgtgattatggttgataagcctacccatgtggtactgtcgaaaaaagaacttaccgggagccgggaactgccgggtaaccatatggctgttcttgatgaagacggcaaggttttggaacgttggatttccggtgaaagacctcatgacattacagcaaaattaatagctgggaaaacgtattatctgtgcgaggaaactccggaagctggctatgcttatgcggagaaagttccttttaccgtgagtgaggacggaagcaccgatctggtagaaatgaaaaatgatatgaccagagtacggatcaataaaaaggatgagtcaggaaataccgtaaaaggagctgtactgcaggttcttacgttcgaaaaagataagatcatattcgaatttgaaactactggagaacccgtggaggttaccggaaaactgacggctggagagacatattatcttcacgaaaagcagtcgccccctggttatcttccggcagccgatatttcatttacagttccacgaaagaatcagcagatagaggttacgatgatagacttgaagcggcatgattctgaaattaataccatgtatctgatgaagacggacgcagagacaggaaaggggctggaaggctttgaatttacggttacgggacccggaggaaacacctataccgttattaccaacaaagaggggaaagctgaattctctatgccgtcggatgggatctatacattccgggagacaaaaagaaaggctggatatcttatatccgaggaaacctatacctttacaatcttgaatggaagagttaccggggatagtatgattctggtggcggatcagcctcttcctccggaagaacctgatgataccaggcgggttggaagaataacggccagttataaatcgggattcagaggcatgatctgtgcggcggaggaaaccagccatccgaccggtgaacggactggagatgagtatccgcttggtgctgttctggcagctatgctcttatgtctggcaggacttgtatacagattaagacggacagattctcgaaagcatgacagagaaggcagcagatga

SEQ ID NO: 1370 - DNA, 1668 bp, Hungatella hathewayi 2
atgcataaagcattagatgaaggttatattgatttgatgattgaaaacaatctggcggaaaatctcaaacatgattacgatatcacgagaatcaatgacagatattccattttacattcaccgcaggaaacgcttgatatgtgttacctgggagcaaagccctaccatgtattcccgaccatttattctttatgctctgagatttcactggaaagctccggggtctctccgattcagagcaaccccaatttcgaccttttcggacagggggtgctaataggcttcatagacacaggcatccattatcagcacccggcctttttaaatcctgacggttcatcgagaatcctgtccatctgggatcagacaatcgagaacggcggaatccgttccgatatcccgtttgggtccgagtatgataatgatatgatcaatctggccctgacggatcccaatcccctctcccttgttcccagcaccgacgagatcggtcacggcaccatgctggccggaattgctgccggcagtttggatgaatcacagaatttccgaggggctgcccctaagacggaactcgttgtcgtgaagctggcccaggcaaaagcttttaaccgcgccgtctttcgcattccggacaacgtcatctgttatccggaatcaaatatcctgattggtatcgaatatattaaaaaggttgccaatcagcttaagcgcccggtagtcctctgtgtgggactgggatccagccaggggagccatgaagggcacagcgcactaacctcctatctggataacttatcggtcattccccgaacaagtgtctgcgtggccgccggcaacgaaggaaataagcgtaggcattacaacggggttatttttaatgaagaatcttataaggaaatcgaactcagagtaggggaacttgacagacagttttccatggagatatggcagaattcacctggaaggcttgatgttaagattctgtcgccgaatggtgaacagaccgcggttgtccctccgcaattaaggagctgcattgagcataattttatattcagcaattccaccgtttacatcaataatattatcgtcgaagaggagtccggtgaacagctgatcttactccgattttcaaatgcaatgagcggtatttggaaaatacaggtttttaataccacgaatataacttcccatttcaatgcgtggctgccatccggaaacatcattaccaacaatacatttttcctggactccgatccctataccaccattacctcacccggtaattccaacaattcagttacggtaaccgcgtacaatcagctgaataacggcatgttaatcgcttccagcagaggtttttctgccaacggaaccatcaatcctgacattgcagctcccggattcatgctgaaaggtccaaacctaaaggacggctatggcagtgccaccggcacaggcgccgcagccgcccacaccgccggtattatggccctgatcctggaatggaacgtcttaaaaggccattatacgaccatttccggcagggatattaaccggctgctcatccgcggggcagtcagagatgccagtatggactatcccaatcgcacctggggttacggaagacttgaccttatggggatgtttcgaagtctggtttaa

SEQ ID NO: 1371 - DNA, 1467 bp, Hungatella hathewayi 2
atgcaggagatggatggagcatcggaaaggaaccgtatggagtgggagaaactgctttcaaaggaacgtttttatcattcgggagacagggaagaatctggccggaatgattatgatacgattatcaggagtacgctgtttcggcggctccaggacaaggcacaggtatttccgctggaggcggacgattatgtcagaacgcgtcttacgcactctctggaggtatctgccatcgggaagaggctgggagaactgacattccggcggctgaaggagaggcggatagacgcctggtttgatgaaaacccggaaacagaattttcagatacgcttctgtgtgcgggattggtgcatgacattggaaatccgcccttcggccattttggagaatatgcggtacgggagtggtttcagcgttatttgaaggacatggagctgggcggacgcagcgtcacagaggtgctggagcgagagatggtgacggacctttactgttttgagggcaatgcccagtcgctgcggcttctttccaaaacacctcatctcgggaggcagcaggggttcaatctgacgtaccgtgtgctggcatccatcatcaagtatccggtctcctcctttgccatgaagaatggcagcgggagcagccaatacggaaagttcggatattatgtggcggagcggccgctctttctggcagtcgaggaggctgtcgggacggccggagcgcgccatccgctgtcctatctcctggaagcggcggacgatatcgcttaccggacttcggatctggaggatgcaatggtaaagaagattttgacattttcccagattgccgccgtgctggaggagtatgcgactggagacggcataaggggagacgggagaaaggggatgacggaggcagttcttcttctgaagcagatgtatgaagaggaaattgcacacggtgaccggaaaatgggaggcgctgtggtcaggaacccgaagccggagctgacagccatccagcgttggaaccggtacgtacaggagatgatgatctgggacgcggccagttcgtttgagaaaaactatgatgcgataatgaacggcacctttgagggagatctgctgtcggggacgccgtccgggtgcctggtggaggccatctccaggctctgcgaggaggtggtctataccagccctgtgaaaataaaggcggagctgttcgggcgcagagtcatcgattccctgatgggccagtttatgccggcggcagtcaaatatgatactggcgaggcaatgacatttatcgaacggcggattatggatacggtgtcggacttttataaatccatgtaccacgcacaggcggcgggaaagggcgaagaggagaggctgtatctcagaattctgatggtaacggattatatcagcgggatgacggataattatgccagacggctgtaccgggagttgttttcctga

SEQ ID NO: 1372 - DNA, 1260 bp, Hungatella hathewayi 2
atgaattttatacaaaaagtaactgcgccaattctgccaatcggtgacgtttcctccttctccctgatcggtgatccgggctgcgaggggctgggaaccacaatgatgcgtgtctatgtcaacgcgctggaactggcttcccgggatgattttattctgattgccggcgatatggtaccgactgggaaaaggcggttttatgagacgatttctgaaatcaccaattctgtggcgggaaaggacacgtatattttaagagggaaccacgacaccggagtgtataccgaatattttggactgcagaattatgcgctgatcggcgattcatttactgtggtagtgctggacaacgccatgcgcaccttcgaggctgaggggctggagctgcttggacgggtgctggctatggaagagtgcaggaacgtggtgatcgcatttcatattccgctgcccaaccattttatccgaaattctgtctccgaggcggaatttgaacgcctgagagccgtgtatgcgccttacagggaaaaggtgaagtactttgcctgcggccatgtgcattccagattcgaggatgtggtggacgggattccattgatctgcagcggtggcggcggagcgatgatcgaggatgtctcagaggaaatcaaggcttcggatgtggattaccacatcgtgaggttttttatggaggaaggccgtctctgccatagaattgtggatttgacggagatgtattataaaagagagcagctggagccggttttgaaagagaagctggaggaggcggtgaagggggagctgtatgcccatctgcggtatttgacatttgcggaccgcgcgcagaaacgcgggtacgaaaaggtggcgaatctgatgagggctctggctgattcggagtatcgccatgcacgcagcttttttgctgttctggaacagccggtgccgtttatggaggcgctgagcggatttagaaagagcgagaattttgagtttgagagattgtatcctatggtatcggattatgcggcgggaatcggcggaatgctggccaagcaggcctttgctgacgctgcaaagatggaacgctcccatgcggaactgattgcaaaggcggagaagctggaggagttttccgtggatacactgtatgtgtgccctgtatgcgggtgtgtaatgaccgcggttgacgagattgaccggtgtccggtgtgcggagcgccgaaaaggcagttccgggaatttacgggcaaagaatag

SEQ ID NO: 1373 - DNA, 1527 bp, Hungatella hathewayi 2
atgaagcaggactataaagaatatgaagagaaaataaaaatgaatgacaacttaaaatttgatgcagagagaggtgagaccagaacgtatgaagcggctggtaaaaaaatcacctgcagagcttatcttggaattgtatactgtgaacggccggccgaccctgtccagaagctgaatatatttgttcccgaggcgtacggccaggggggaacggtctgcggatacacgaaggataccgctccaatctttataccgaatacggtaggcggttatctgccggggccggcggatgagccggggctgaatataagaaccggaatgcccaattcgatctttacggcactggagcatggctgtgtagttgtctccggtggtgtgcgtggaagaacctcgggaaagagaaattcagagttttttgaggggggaaaggccgatgataccggacagtatgatgggaaaatggtgggcaaagcgccggctttgattgttgatatgaaggcggttatccggtatatacgccataatcgaagtctgattcccggagataccgaacggatcatcaccagcgggaccagtgcgggaggtgcgctgtctgcgctggccggcgctgccggaaacagtcaggattacgttccttacctgaaggaaatcggggcggcagacgaacgtgacgatgttttcgctgcaaactgctactgcccaattcataatctggaaaatgccgacgcggcttatgaatggcagtttggaggtatccgtgattactaccgtacccggcatcagaagactgaaaatgggataatccggatcccggaagaaggcacgatgacggacagacagatggagctgtcacaggaattacaaaaccgatttccggcatacttaaacagcctgaatctgaaagatgaaaatggaaacagcctgaagctggataataatggtgagggaagttttctggaatatataaagggacagatcctaaaatcagccagcagggaactggcatttcatggcactgccagtcatttatcagggttggcagcgcctggcagcgctgtggatacatttccggctctgacgattctgggagaaagtgcggtcgggctggactggaaggcatatatgaaagcgattacccggatgaaaccggccccagcttttgacgctatagatcttaagagtcctgaaaatgaggaatttggctctatggaaatggaagccaggcatttttctgaattttccatggagcacacggagaccgaggcagagatggctcccgcgcagctcattcgtatgctgaatcccacgcagtacattggaaatgcggatacggcaaaacactggcgaatccgtcacggatcatttgaccgggatacatcgttcgcaattccggttatcttagcccttttacttgaaaataaagggtatgatgtggattttttcctgccctggggaattcctcacagcggagattatgatttgcaggaattattcgcatggattgacacaatctgcggacaacaataa

SEQ ID NO: 1374 - DNA, 2769 bp, Hungatella hathewayi 2
atgatttttctttcattatccgatgtgattggtaaatataatttgcattataagatacacgctgtcatccaactgataaaggaaagacggaatatgaagcagaatgactattttatagaagaatcggagcgtgtaatacaagagagaacggcagatggacagttttatatactttataccgacatcacggattttcatctggttaattacatttacggaaatgaaatcggggattcccttctgcaggaaatgaatcatttcctggacagccggcccaatattctgttgtgccgccgcttgtttgccgacttttttgtaggactctatttcctggaaaatggacaggagatcagtgaaataatcagcggattggacagagaactgcaggaattcctcacggatttgcagtcgagatatcctgcatgccgtttaaaagcagcctgcggcctctgcctcattgagcatgataatatcgcgcaggccatcgacaatgcaaatctggcgcgcaaaatatcaaaaaatcagtattccttcaaaaccgtggtttacgatcatttcatgaaggatcagatcacagccgtgcatgaaaatgaactggaaatctacaatgcgctccatgaaaaccgtttctgtttctatttgcagccgaaggtggatctgacgaacgggatgatcataggggcggaggcgctggcaaggcgtatcggtgatgacgggactgtaattccgcccgataaatttatggatctgatggaagcgaagggatctgtgattgagttggatcagatcatctgccgacaggtctgtgagttcctgaaagaccggatggaccggggattgtcggttgtttgcatttcggtcaatttgtcgcgtctccatatacgaaatcccgaatcggcagatgtgttccaccagattgcagccgaatatgggattccgcctgagcttctggaatttgaactgacggagaccattctgctggaggaattcgccggagccaagcatttgatcgatcagctgagggcttacggccatcacgtctccatcgatgatttcggttccggatacgcgggaattaatgtatggcaggaactgaacttcgactgcctgaagctagaccgcaagtttttgtccgatgatgagctgttaaaaaaacgcaatcaggcgctcgttcccaatattatcaacatcgcccaccgtctccatgtccaggtgctgtgtgagggagcggaaacggaggaacagtgtctctatctgctccggctgggctgcaccgtcgtgcagggattctacttttcaaaaccgctgccgccggaggaactgtgccaggtctgtgaacgccagggcggaaaatatccgcttcccgcgctgctgtgctccgataagtcagaacaccagtccgaacagacgaaggaggcggatgacggaggcggggcgcagagtaagattaaaagttatgttatcgtcattctttgctgtgcacttttcctgggagtctgcatcaccggtgtcatgaccgtgaaccgaaaccggacgcagaaggaatttaccagcatgataatcgaaacgctgaatgcttacactgcgggacagcgcgaaaataccctgacggaaatcgatggtgttgtgaatacactgcagtcatttgccgtgttgattatggaaaatgacgagccggaatttatcaatacatttttgagtgcgctgaataaggtgagtccgaagattcagtatacctattatacttacgggatgtatcaggagctgattacgagcggggaggcaagaccggaggacagtgaaattttagaacgcctgaaactgggcgagacagtggtgacagatatcatttattctgagcggctgggagacatctactgcgtcggagtcggagttcctgtgatgaaggatggggtgttcattggcacggtgcaggggattatcaacgcagaggcgctgatatctacagagctgtttgacccggggctgggagagatatgcaatgtatttcttactgacggggacagcaggattcttccgatccgggaaccgaatggaagaggcgttggtgagagtctcctggaacttttagatatctatggagtaaaaaaagaggtgatagaggagcttcatgacgcctatgatgcaggggattcccaggcaagaagcgtccgggcaggcagatttgacgggagtccgtattacttatccatgaccgggctgagatataacgactggtatctggtcgtctgtttgaaggccgatgccgcaaccatgcatttgcgctacattgtgaacaatatgatgtggagtatcgccgggctgattgcggcggttgccctggtttcggcggcaatgattcttttctgggtgagagttcagaacaggatttccttagaacagcagcgctatcttctgctggaacacttttcagatacggtactgtttgactatgactgcaggcacgataccatccgattcacctccaatgcatcgaagcttttaaagatccgggagctgacacagaatcattttctgaatgggctggaccgggcgtttatttacgcgggagatcaggaggaggttcagcgtgtactgagcggtcagactggcggggaatacggcgaaatccgagtgcgcgtgatgcgcccggataccgaagaatacttctggtgtctggtgcagtatcagaatctgtataagagcagcgccatagattccattattggaaaaataacggatattgacgagcgtatgccgcatgaataa

SEQ ID NO: 1375 - DNA, 1416 bp, Hungatella hathewayi 2
atgagaaagagagaaaaaagatgggtaagtctggcactggcgtcatgtctggccatcgcggccttgacgggatgcagctcaggttccggaaagaccggagagacgaagagcgctgctcaggcagagacagaagcaaaagcagaggcaaagaaggaggaggacaaagaagagaaaaaggaggagagcaaggacgaaaacaaaggggagaacaaagaggaagtcacactgacatttcttcaccatatgggggaacaggggaagaaagacggactggtagcgctgtcggaggcatttacgaagaagtatccgaacataaagatcgaggtggagttcctttccagagatgattttatcaatcagtacaaacagcgggtagcggcggacaatgcgcctgatttcatcaattaccggccgtttgagacgccggaggtcatagaggccgggttggtggaaccgctggatccctccattttcccggataatatcgataagaattgtatcgattccatatcactggacggaaaaatctatggaattcctctggacagaggcggatatggcttctattacaacaaaaacatgctggagaaggcgggagtgaagccggaggatttagatacgatgtcgggagttttagaggcctgccagaagataaaggatgcgggaatggttccgctggcttccggttatgcggaatcctggacagagaatatcatcatcgagggccagacttttacgggaccgatggttgccgatccgatgatttttgagaaactgatgagcggggaaaagaagttttccgattatccggaatttgtggacattattacgcacggccagcagctggtccgtgattacgcgctggtagatgagaaggcggcaagccagcaggcgtccgaccagtatgcgcagttcggacgcggtgacgcagccatgatgatgcagggaacatgggcgatctccgatatccgaatcgcacagaaggcagcaggcaatacggatgagtttggatttacgtattatccatggtctgacgatcctgcaaagaactatatgccggccaatgccgatgactccttcatgatttcatcggggagcaagcacatggaagaggccatgctgttcgcagagtttgttctgacaccggaggcgggaaaagtatgggccaacgcatcgggctgtatcagcgctctctcgggcgtcagcgcggataatccggatccgcttctcacgatctttacgaaggtcctggacgaaaagggatactattttgagatgaatccgggcctggcgggccagtattaccaggattttgacaagatctacatcgagggaagaattgcggaggattctccggagacggtgatcgaaaagtggcagaaatcatttgacaatatccgggctacagggggctga

SEQ ID NO: 1376 - DNA, 4377 bp, Hungatella hathewayi 2
atggatatgaggtatacagggagaagagtttgctgcgcactgctcagtgcagtgctgatcaccgggggactgccgggcggtacaggcgccgctggatttccagggcgcatgacagccagggcggcagttgtaacagagagtcttaaggacggaaaagccacttcgtcggaagcgggaaaagccactccgtcagaagcgggagaagctactccgtcagaggcagagaaggccaccccgtcaacagccatgagggcggaggccatgacgctttcccgaattttgatggaagagacgtttgacaacggtgatggctggaacgtcaataacacggccgtggtaactttcaccggagggcagggcgtgataaagggtggcgggcccaataaccgtatggggtcgaaaatgaagatcccggcgaacgattttctgttggaagcggatttgatgattggaggcggaaatacgaactgcaatgcgaaattcggatttaaggcggcggaaggctatgacggggaccggctgcagctgcgttttgatttcccgaggaacctggtgtacctggagaataatggaggaaccgtatataattctgttcattttccggccttaagtcagggggagtaccagctcgccataaaagtaagcggagggaagattaccgcatacctggacggtgaggaaatcattacagcggaaaatgatgaaattgcggaaatggagcagggctatatcgtaatcgcgggccagtatccggcccaggatttcgctgtggacaatctcgtggtttccacagatgaagcgccgcagggagaagagtataccgtcactctaaaaacagtgaccgacggagtggatgacctggctggaacaaccctcggcggaacgctgacagcggaccggcagaccggctactcaggggatacgatcacactgcaggcaaaagcgaaacacgggtatgtatttgatcattacgcatcctggggacaggatgggacaccgacggacgggctgatgcccatcattaaccacaagttccagttaaatgaaaagtttggaaatgtgacggttgctgcctattttaagacacgggagccgggaaaagacgagattttcttcgatgacttcggagcggcgctgaatgaagacgggcagtatggtttcatcaaagacgcagatcgcgcaaaaattacagatgaggaactgattctggatgctcaggctggagaagccaactgcgttctggtggatccaggtgtgttcgatcagctggcgaaaggcgacggctaccggatttccgtggatgtacgcagggccggagccaacaacggaactctccagatcgcctttgcaggaaatggaaaagcgtttgatgaacgttatgtattggcggtaaattcccagggaagcgccatgttccgaaggtttcaggacggtaagaacgatgaattgaagaaatgtgcatttcagctgaccagtgcattttcccatgtggagatcgaggtaaatgacgggaaagccgtacttctaattgacggaacagaaaaaatggtgttggaagataacagtggcgaatggtcaggcatggctcccggagcgggactgtttaatatgagcgccggagcaccggtgatctttgacaaccttatgattgaacggattcttcagaaaaaagatgtggaagtggtttccatttaccagggtgaggtggattctgcatatagaacaggagcggcatctgcaaatgtgagtgaagcctcggagggagagcagattacgctgtcttctgtggccaaggcggggtatcgtctgaaggagtatcaggcagagggggccccggatgtcgtggtgattggtgatacgcttaccgtgccggccggggattaccagactctgagaattatggcggtgtttgaagaagatacgataaggaatccgcagaccttctatattgattcagaaacgggagatgataccgctgcaggaacttctgaagcggaagcatggaaaactcttggaaaaatgaaacagtacggcacctttgttcccggtgaccaggtccttttaaaacgcggcagcgtgttccgggagcagcagctggtatttaacggcatgggcagcgaagcggcgccgattataattggcgcttatggtgagggagagctgccgcgccttgacggaggaggagcggtggaaaatgtaatctctctgtttaatcaggagtacataaccatatctgatttggaaattaccaacctctctgccggatatcagactgatttcgggctaaacaacagcaataaccggtcaaaggctctgagggctgtaaacgtgtccatcaaggatttcggaacggcgtccggtatatcgattacggactgctacattcacgatatcaacggcaatattaaccttaaatggaacggaggtattttcttcgatgtacaggcggatatccggggcggaaagctgaccggagttccgagcagatacgacgatgtgctgatcgccggctgtacctttgaacgtgtggacagatcgggaatcaagcttgtcagctcttcctggtgtaaccagtgggagaagaattctccgggagttccggtgaactggtatccttccaccaatgtggtggtgagaaacaattatatggaaaagatcggcggcgacggaattacagtgcgggataccgatggggccctgattgaacacaatctggtgcgcgactgccgttaccagaacacgggctataatgtaggaatctggccatttgaggcggctaatacggtgattcagtataatgaagcctatgatacgcacagtgtacaggacggccaggggctggactgcgatcacgcctcctccaattccgtcatgcagtacaattacagccataataatgaaggcggctttatgctgatcatgggaggttatccccacacgggggctacaattcgttacaatatcagccagaatgacagggacaaggccttcgagtttgcccagggatgtccgaatggaacgatgatctaccagaacaccatttactcggaccgcaccatacctaaaggtgttttctatctgtccaacacaggcgccggtttgggcgtgaatgaaatctatgcgttcaacaatgtcttccaatatccggagggacaggtattctatggagaaagcggagatacggcgaaactgaaagaccatttaaaactgtataacaacgcttatatcggaggaatggaggcaccggccggagattcgaaggcaataaaagccgatgcggccgggctgaaggccccgggcactgcgccggaaatcaatcaaacgcagcagcctgtgaccggaagttcaggcaaactggacggctatcagctgaccgaaggttctatgctgattgacgccggtgtgacgatggaagaggcgctgatgtatttcggaggcggagaaccggtagacggaagagagtattctccgagggaactttacgaggaagccaagagcggcagaagtattgactatgtggtggggacgaatttcccgaagatagacggtgtggaatataacagggatttctttggaaatgagaaccttgccgggcagcggccggatatcggagcgatggagttcggcggaaagacgccggggaatccggataacccggacaacccggataatccaagcaacccggataatccagataacccggacaatccagataacccggataacccagataacccggataatccaagcaacccggataacccagataacccaggcaacccggataatccaagcaacccggacagtccagataacccggataacccagataacccggataatccaagcaacccggataacccagataacccaggcaacccggataatccaagcaacccggacagtccagataacccggacaacccaagcaacccagataatccaggcaacccagacaccccggacaacccaagcaccccagcccctccctcctctgacaacgattccaccaccacctcagagaccgggaaaaattcatcaaattccattccggaatcgacaggaagctggacaaaatcggagcgcggatggagcttctgtcacccggatggaacgctttaccagtcggagtggatttacaaaggaaagcagtggtactggatcggtgaaaatggaatgatggcggaagactggaagtatatcggcggctcatggtactatttcatgccccagtccggggccctggcaaccggctggatcaaggctggagagcaatggtactatctggatgaagacggccgcatgctggcagacacggtaacaccggatggataccgtttggacaatacaggagcctggatcacagaaagcaggtaa

SEQ ID NO: 1377 - DNA, 1521 bp, Hungatella hathewayi 2
atgaaactgaagaaaatgggggcattatcactggcactggcaatgacggtaacagccatgacgggctgtgcgatgccgagtactgggggaagcgacacgacagcagcacccacacaggagaagacggaagcttcgtctaaggacagcagttctgatacaacggcggctgaatcggatgaaaagattaccctgcggattgtggactggagtgacagttctctggtaaggagagaagagtttaacaagaagtatatggaagaccatcccaatatcacgattgaatatacaatgctgacaattgaccagtttaaaaatacgatcgtgacaatgataaaatcaggtgatgggccggatttgttcccgataccgactggtatgacactgagcacagctttaaaagaagagtggtatcagccaatgaatgattacgtgacagatgagttcctggagactctggatccttccgtatttgaggaaggtgttacgatgaaaggcgaagacctgtatacgattacagaaggaattccggttgtaaactgcttattcttttataaccaggatgtacttgatcaagccggagtcaccaagattccggagacatattctgaatttgtagaagcgtgtaaacaaattacagaatcagggaatggtgaagtttatggtttgatcgaaggcggaaagcagttaaatcgtctggatactctggcacgttcctttgcggcagtaggtggcggaaagattgcgccaacctcgaaagtcctgactgtagatggcaaggccccgtatgacagtgctgcgatgaacgaagcaatggcattgatggcacagttggtttctgacggcagtgtgcatccggatacagtcaatatcagcgcgcctgaggcgagagagatgttcgctcagggacaggccggtttcctttgccagggaatgtggtgtattcctccgtggtcccagagttatcctgacttaaactatggcgttatggcggttccggttccagatgatggcgccaaaggctgcatccagcaggtagaaagcagtccatggatgggaatttataagcagagcaaacatccgaaagaggcaggagagtatttgatggctttattcagcgaagattacggttatcagtcaggctgcgtatcagacggaaattacgtttcgattgtaccgagtgtaaacgaaaagtatatgacgaatgaggttatgaaacagtactatgaaattgccagcgaaactgcaaaagttgtgcctgtagctacgacaagagatgagaaagcatacgatttctatgcagaagtaaaagatgtacagccaagtctgggagctattttacagggagtactgtcccagagtattactgattactcaagtgaactgacaaagctggctgaggcatcgactacagagtggaagcgcgcatccgaagctgtcggcctcgattacgcaacatttgatttcccgaactgggatccgcttaaggattatacagaggcagattatgcagcattaaaataa

SEQ ID NO: 1378 - DNA, 4542 bp, Hungatella hathewayi 2
atgaaaggatattcgtatttaaagagggcgtttacatggctgcttacggttgtcatcacagtatcgtatgtgctgccggggactgcggtaacggcatgggcgtcagagaaagaggaggcgggagagtatcccctgctgggctatatagatgacatcaccgttctgttcgacgggaaagaagcggcgccgggagatgaattcagtgatctggacccggaggaaacgtatgtcgtatcggcctcgtatcagagcggcgacattgcggaagcgctgcttggcggagcgctggcggcgggagtggaatataagattccgctgccggatgtatttccggtttccggcaatcaggaaacgctggagcttgtcctgaagaaaaatgagacaaatgcggagctgtatgaccgccttggagaaaacaaccacgtgataggaaccgtgaccttcaccttccgtcaggcggtgccggccacggcttctgacagtaccgccagccgcggcagctttgcgtctgtgcggttcaaccgctcttttgttgaaaagattcagcggctgaacgggagaacacagcagaagaaggcatctccgtcggtggccacggtctcccagctgtcggacgacgagccggaggaggacatcatcgaggtgagcgacatctggttctccttccgggtatcggggagtgtggaatggagcaatatctgcagtaaggatgtgtatgagacggttcttccatttgagggcttcggtgacatttcccttcagtttcaggagcctgttctggataagaaggagcagataaagatatcaaaggaattttccttccgggactcgagaggagccgcggtctgggagattaccgcaaagaccacaaatggtgcaaaatttccggagggtaccgtgatccatgatacctacagcgacaattccgtctggctggaggatgaggtaacggtcgtttcagacgggaaagcacttggcactgaggactatgcaatcgaagcgataccggaaatacacggttttgcggtgacactcctccgggatacggtctctccggtgaccatgaccgtaaagacgaaaccggttatggatctggatgccgtagacaaaccggttatggatctggatgccgccggcgtcgtagacaaaccggtgacaattaaaaatcaggccggtattaccgtcggcgatctggcgcttgatacggccgatcagacgtatacctatccggcggcattgctgcagaaaacggccggggagatgaaaaacgggattctgccgtggacgctgacggtgaatcccggcggggcatatctggaggaaggcttcaccatttcagatgaactgaatgagaaactgacttatagcggcagtttcaaagtgtattcctatgagggaaaagacaacagtttgaagctgactgagctttccggacacggaatcacggacgcctacgatgaagagagcagggtattaagcttcgatataccggaagggcttgaaatccccctgaaaatagtatttgagactgcgtatcaggagggattaaacggaggcgaaacgatcaccaacgtggcgacggcctatgtggcagaccatgtgatccgctcgaagcaggcagcaggcagtatcccgggcggccaggtcctctccaaagagggaaaatgggatgggcgtcagattacctggtccatccatatcaacaaacaggaaatgccgcagaaccacgtaatcatcaccgatttgcttccagtcggccaggaatttaccggaaccgtcacagtcagtgacgaaggacagcctggcggagcggtggagctctatcgtttcggcggtgaggaaccggagagtaccatggcggtggagctggaaggaaaggaaacacagcttacctttacccgcgggatcgtggaagaggacggggaggataagggaaaagagtactttaccattgattttggtgaagatttcgtgatggaaaaagcccatgtcgtgactgtacacacctttttaaacgggcaggacaacgtaacagacaaccagcagcgggcatacgtaaaccatgtggagctggaagccgatgagaaaaagatcgtcatggattacgatggcagcgtgaagctgacgccgcccgttgtgctcaagaagacgggagcctatgacggcagtacccagaagcttaactggaccatagaggtcaatgggggagagtttttacgcaagggctatgtgttgaaagactgtctggcacagccccatgccaacagcggctcctacccggttgcggatggagggaagcttaaggaccacaccgatatttcgtcagtcaggatagaagtgagggaaaaaagcagcccggatggaccagcttcgaaaacctggcatacggtgctggatacagagacgggaacctggaatcccgcggcagtttccgaaggctttgaactcacgtatcagacaggaagctacgaagcattaaaaggagccgggccggtaacggatggaaccgtggtagcttccgcggaagcggtggaagccatgatccggaatatcatgaacgacggaacgccggaagtgctggcattttccttcggcgatattgatcagtatttcaaagtgaccataggaaccacattcagaaagaccgcgggtgaaaccatcaatcatcacgatgagatcacatacagaaaccgggcggaaagctggtacgaggggctgaagggaacgatcggagcggatggactttatcagtacaagggcatgcgccacatgatcgatttccggaagagttccaaagtggaaggcaaagatgccattctgtggaatatcaatatcaacgacgataagttcccggtggatatagaaaatgactgtgaccatgcgtcgcttggacttgagccgggactctgtatcacggatacgcttcccagaggaatggaactcaaagacggccggatcaccgtaaaaaagagcggccgggaaataacaatgaccgagggtgttcattacgttctcaccggggagccgggagagcagacgctgattatccacattccggctgagtttaatgaggagggccaggcgcgtctggcagattcctttgtcgtgacataccgcacgcaggtgatgacgctggaaggaatgcttctcaatacgccggtggtctaccagaacgcggcaaaatggagttataaccagtacgtttcaaaggagacctccagttcacagaagatcatcatgtatgacatgtccgccgatgccggaggcacgggaaccggactgaaaaaggcggagataacaaagtataaggtcgataaacacggaaagaaccgcgtaatattcccgggagtggaatttactctggaaaagaaggttgacggaagctgggtgaaggtgactgcggccagaaccggagacgatggaaaagtgagctttgcagctctgaatcccaagaccgaataccggatccgggagacgggcggttatgagggatatgaaccgtcaaacgatgtccatatcgacttttcgaaggggaattttgcggaggacgtgatcaattatccgattgatgaggagccggaaacgccacctgaaacgccgccggtgacagagccggagacgccgccagtgacggagccagagacaccgccggtgacggagccggagacaccgccggtaactcagccagagacaccgccggtgacagagccagagacaccgccggtaactcagccagagacgccgccagtaacggagccagagacaccgccggtaacggagccggagacaccgccggtgacccagcctgaaacgccgccggtgacagagccagagacaccgccggtaactcagccagaaacgccaccggtgacagagccagaaacgccgccggtgacccagccagagacaccgccggtaactcagccagagacaccaccggtaactcagccagagacgccgccgccagtaactcagccagaaacgccgccagtgacagagccagagacaccgccggtgacccagccagagacaccgccggtaactcagccagagacaccgccggtaactcagccagaaacgccgccagtgacagcgcctgaaacaccgccagtgacagcgcctgagacaccgccagtgactcagccagagacaccgccagtaacaacaccggaggccacaccgccagtatcccctgaaacaccggaaaacgggggcgggagcagtcacggaagcggtcataattccggcggcagtgtaccgaggccgggacagaccggtaccgtaacggaggggccgggatatactggccatacggagacgattccggattcggagattccgttagcggcaatgccgacaccggatttaccgggaaatacggagattaccatagacgatggaaatgtgccgctatcaggtctgccaaagacgggagagcgcagacggcctggctttagcctgtttattgccgccggagtacttggcctggcggggctgggactgaccggcagaaaaaaacggagaaatcggactgagcgctag

SEQ ID NO: 1379 - DNA, 1863 bp, Hungatella hathewayi 2
atggcgatgaagagaaaatggatggcggcagcggcagcagtcctgattctgctggcagcaggagtctggtggctgtatacggaaagaggccgcggccagatcgaacaggtggactatgtgatcggagtctcccaggccaatatgcgtgagacctggaggctggcattaatcagtgagatcgaggatgcggcagcggaatatcccaatatcaggctgatcatgaccgacgccacttctgatggggaaaagcagaagaaggatgtggagagactcatgcagtttgatatcgaccttctgattatctcccccggagatgccagggagatgacggatgtgattggccaggtgtaccagaagattccggttatcgtcatggaccgcggcgtggagggctttgattacactctgtttatcggcccggataacgaactgatcggacggcaggcaggcgaaggggccgcgaaacggctcgcgggaaagggagggactgtgttcgaggtctgcggaagcgagaattccatttccagtgccgagagaagcaagggatttgacctggtgctttccagggagccggggatcgtcagagaacagtttcgtgtggagcaggagtccagggaccaggcggaggacttatttctggagctgggacaacggctggcgggggtggacgtggtgtttgcccacaacgattacatggcatccggggtctatgaggcggtgaagaagctggggtactccccggaaattataggagtggacggattttccggccccaatggaggcatggatctggtgcggcagggaaagctgagcgagaccattacctgccccaccggcggcaaggaggcgatccggtatgccatggatatcttaaacgaagtctccggagttcccaaacaggttattctgcggagccacaacattaccatcgacaatgtggacagcgaggtgaagtgggagcagtataaaaagaaggacaggaacacgatccaggtgggatactcccaggtgggaaccgagagtgcctggcgtctggccaatacggagtccatcaagagcgcggccagggaggccgggatcagccttcattttgaggatgcggatcagcagcaggagaggcagatcgaagccatccgcacgtttatcagggaggaagtggatgtgattgttctgtcgccggtggtggacagcggctgggataaggtcctgacggaggccagggaagccgggattcccgtgctgctgtcggacagaaggattgagacagaggatgacgggctgtacctgacgtacatcggcgcggatttcatggaggagggcaggcgcgccatgcgctggatcgccgctaatgtgaagccggagcatgggccggtgaagatcatggagctccagggaactttaggcgcatcgcctaccgtggagcgcaagcgcggtttcgaggaacagatggccggaaatcccggctatcggattgcctactccgagtcgggagactttacatatgaaggcggccgccggatcatcgaagattatactgaaaactacctatgggacattgatgtgatctacgcccacaacgatgatatggctttaggcgctgtgaacgctttggaagagcatggaatccacgcgggcagtgacgtggtaatcgtatcggtggacggcacgaaggatgcctttcaggccatgatagacggcaaattgaactgcgccgtggaatgcaaccctcttctcggcccgcagctgatgaaggcggtgcaggacctgatggaagggaaggaactgccgctgcggattattacggaggaaaaagtgtatgatcagacggatgcgcgggaagtgatgaaagagagaaggtattga

SEQ ID NO: 1380 - DNA, 1149 bp, Hungatella hathewayi 2
atgaaccggttttatcggccatcggggaagatatccgcatgggtttttccatattttctggtgtgtgcgtcagggattgttccgatgctggcgtttggatatacttttctatttcactttttttattcgacaaaaggaaccgtattcttttttctgatggccgttatagcgatggagtccatctgccagtattttgtggtgaaaaagggtaaggtacggaatcgaaagacagcggcgttcacggcttttttgctgagcgccttttttgtattgttttccagtgcttccggtttcgtggtatacggtgttcgggatgaattatggttttctgcactgcagtttttgacagtacttgtgttcctggaggctggtttcctgatggaggcttcgaagccattctgcgaggtcagcaaaacatgggcgaaggaagttaccatcctgtttgaactgccggaggatacggatgcgctggtcagaaaactgctgacctgtgatgattccctgtttgatggtttaaagagaatatccgcagaccatgcgcaggaggacagaaggacgctgcaaaatatcgccggcggccatcttttattccggctctgggtgacggaaggggagtcggattactacctgaccgtggtaaagaaaagggcaaaacagggcagaggcgggcggatccattactccgatgaggaactgacccgatggctcgcggtaaagagggagatcggacgcaggctgctcacctggagtcagatgcaggaggaacagccggttttgcctcgcgtaagtgtgcggaagggactctttggaaaacgggttaaatctgtaatacaggcgctggtatcgcttggggtgatggctgtcatgtttcttttgctgaattgccgtatcgcggtgcagatgcctgcagctgttatgatttcctatggaattacagtgtgtctgctctcgtcgatgagtctgattggctgctttataaaagagacggtgatagaactggacgcgttagaaccaggggaggcgggctgggagcgcggagccgagatgataactgctgattccggaatagcggtaaaactgtattatcttgtacttgtggcagggagtgtattctacctggtcctggttgtacgaatgcattttatttga

SEQ ID NO: 1381 - DNA, 1344 bp, Hungatella hathewayi 2
atggaacaagtagagaaaaaggatatagtcagatttacggtattgagcctgattgggattttcctgtattttatcccggtggacggctcccgggtgcctgtcgtaattatggtgggctggatcaaagatatacttggagacaatttaaaatatctggtgcttctgatgttaatcgtacttatgggtacgatctttggcgctaaggtacttaaacagaaaacatgcgtaagacttcatgcagatgacaagaattcaaagctgattcattatgccgccgcatttctggtcgttctggcggtatggtttaagcttcctccggccgcggtatttgcggatgagagagtgggcggacaaatcctgagtctggccggtacggtcatgcttacagtgtctgtgtgcggctggtttatcgtatttatcctcaaatccggaatcgtggaatttgtcggaacgattctggagcctctgatgaggccgctgtttcgcctgcctggagctgcggcgatcaactgtctttcatcctatgtggtcagtgcggctgtaggtgtttacatgacggaccagtactacgagaataaggtatacaaccgcagggaggccattgccgcggccacctgcttttccacgatctctgtgggctatatcggtgtgctctgctccatcggaggcatcaatgaaatgtatggtaccctgttggtactgacgttccttctggtgattgttatgaccgcggttatggtgcggattccaccgatctccagaattccgaagacgtattgcggggagctggaaaatggtgatggcggccgggacagaaggtgcgaggccggcccgaatcatgctgaagcgggaaaaaacagatttcagcgggcggtaaatgcagcggctctctgctccaggcagtttacattccatgaatttacggccagccttttaagcgcattaaagttctcacagagaattatcgcgtacatgattccgattgtgattgtaacgctgacgctggtccaccatacgccggtatttacgtggctgggatacccgattgccccggttctgaggcttttgggccttccggacgcggctcagattgcgcctgctgtgcttctgggatttattgaagtgagcctgccggctatttccgtcagtacgggagtggcggctcagagtgtattttttgtggtacttctctccatcgttcagattatcttcatgacggaagcggggaacgccatgcttggggcgcgcttttcaatgaaatttacggatctggtcattcatttcctggttcgtactgtgatcgcggttccggtgattgcagtgatatcgcacttattattttaa

SEQ ID NO: 1382 - DNA, 1512 bp, Hungatella hathewayi 2
atgaaagcaattatcatgatgtttgatactctgaccagaaaatatctttctgcttacggaaatgaatgggtgcataccccggagtttaagcgcctggaagcgcatacagtgacctttgataacttttatgcagccagtcttccgtgtatgccggccaggcgggatctgcatacgggcagatgcagctttctgcaccgtatgtggggaccgctggaaccctttgatgtttcggtgatggagcggttaaaggaacacggtgtatatacccatttggtgacagatcactcccattactgggaggatggcggtgcgacgtatcacaaccggtactcgacctgggagggattccgcggacaggaaggggaccggtggaagccctcgctgggtgagaatccggtgccgcctctcggccgcctctccaaaaccggtgactcggtcagacagaactggactaaccgcagatttcagccggaagaaaaggatatgccttccgttaagacggtgactgcgggcctcgattttattaaggaattccatgagaaggatgactggctgttacagatcgagtgcttcgatcctcatgagccttttatctgtccgcaggaataccggcagctttatgaggatgaatacgagggtgcggtctttgactggcctgcttaccgcaaaacggattcggcagagcaccggggggaagtcggccatatcaggaagcagtatgcgtccctgatttcgatgtgtgaccggtatctcggaaaagtgctggacgccatggaccggtacggtctgtggagggataccatgctgattgtgaataccgatcacggattccttttgggagagcacgactggatgggaaagaacatccagcccgcctacgacgaaatcgcccacctgccattttttatctgggatcccaggtacaaaaagatgggagagcgcagagacggccttgcacagaccattgatattgcgccgacactcatggatttcttcggtctggaagcagatgacaccatggacggacgaagcctgattccggttctggcggacgaaaagccggttcgtgaaaccgcggtatttggaatccatggaggccatgtaaacgtaacggacgggaagtatgtttatatgaaatgcgcctcctctgacgacaatcagcccttgtataattatacgcttatgccgactgcgatgcgcggttttataccgcaggtgtgcattgatgagatggaactgacagacggcgggagatattcccacggaagtagagtgttaaagatcccgtgcagagttccaggaagctcatcccggtatggaaatctgttgtttgaggcagaggacggggagcagaagaacaatctggcggacgatggtcccttagaacaacagtatcggacgcttctgatccggtgcatggaggaaatgggggcgcccaaggagcagtttgtgcggctggggcttgatgcccggcaggaaaaccggaacaataccgcgctgccgggtaaatag

SEQ ID NO: 1383 - DNA, 2271 bp, Hungatella hathewayi 2
atgaagacatcggttattggatacccgaggattggggaactgagagaattaaaatttgcatcggagcgctactggaaaaaggagctttcggccggagagctggaggagacaggacggcagcttcgtgcacgccactggaaactgcagagagatgcgggaatcgattatatccccagcaatgatttctccttctatgacggccttctggatacggcctgtttactgggaatgattccggaacggtacaggaaactgaatttatccccgctggatacgtatttctccatggcaaggggatatcagggagaggccggagatgtaaaggcgctggccatgaaaaaatggttcaataccaactatcattatatggtgccggagatcgaggattcctgtgagattgcccttgagggaacgaagcccttcgatgaatacgatgaggcggcagaactgggaatcacgacaaagccggtgatggccggaccatttaccctgttaaagctggcgagatttacgggaaataaaagagcggaggacgtaaagaacgaggtcatctgcacataccgggagattttaaagaagtttgacgacaggaaggcggaatggatcgagtttgatgagccttccctggtacgggatttaggcgaggaggacagcaggctctttcacgatctgtatttcgatattttgagcggaaaaggaggggtgaaggtccttttacagacgtatttcggagacgtgagagactgctatgaagcgattaccgcccttccgtttgatggtatcgggctcgactttgtggaaggcaggcagtcactgccgcttcttaagacttatggatttccccaggataaggtgttgtttgcaggggtggtaaacggaaagaatatctggaaaaatcactatgcaggaaccctggagctggcggagaagattcagaatgaggcgggcgaggtagtcctcagcacgtcctgttccctgctccatgtcccctgcactctgaaaaatgaaacaaagctggaggaacagtaccggagatactttgcatttgcagaggaaaagctgtcggagctggcggatataagggctgttctggaatcggaggagccggggaagcaggaggcttatttaagcaatcagcgtgtgttcggggaggccagaggcggtcagaatccggcggtcagggaacgtgtgaattccctgggagaaaaggaatttacacggcttcctaaatttgaggagagagaggcgattcagaagatgcggttcggtctgccgctccttcccaccactaccattggatcgtttcctcagacgaaggaggtgcgcgccaaccggtccgcgtataaaaaaggccagatcgatgagcggcagtaccaggagtttaattgcaggaaaatagaggagtgtatcagactgcaggaagagcttggactggatgtgctggtacatggagagtttgagagaaatgatatggtggaatatttcggagagtgcctggatggctttctgttcactgaaaaggcgtgggtgcagtcctacggcaccagatgtgtgaagccgccggtaatctggggcgatatctcccgcaggcgtcccatgacggtgtcctatgccgcctatgcccagagccttaccgaaaagcctgtcaaaggcatgctgacgggacctgttaccatactgaactggtcatttccgagagaagacatctccctgaaggaatgcgcctgccagattggcctggccatacgggacgaggtgctggatttagaggcggcaggcatcggaatcattcagattgatgaggccgcgctgagagaaaaacttccgctgaggaggcaggactggcgggaagactacttatcctgggcgattcccgcgtttcgtctggtccacagcggcgtgaaggcggagacacagatccatacgcatatgtgttacagtgagttcggggatattatagaggacattgaccgcatggatgcggatgtcatcacgtttgaggcttccagatcggacctgaccatcctggatgctttgaatcaatgcggattcagaaccgaggtggggccgggggtctacgacatccattcgccgaggattccttccaccgaagaaatcgtggacgcactggagaagatgctgtctaagataccggcggagaagctgtgggtgaacccggactgcggcttaaagaccagaggggaggaggagaccgcccccagcctgagaaacatggttctggcagctgaaatagtgagagccgccagataa

SEQ ID NO: 1384 - DNA, 1377 bp, Hungatella hathewayi 2
atgagaaaaaatttgttattcctgatggcagaccagtttgcctacgatgcactgggttacataactccaggcatccggacgccctgtctcaatcaattggcaaaagaatccatacggtttacgaactgttatacaaacgcacctttgtgtatgccggcacgggcgtcgctggcgacgggcctctatcccggagagctggggattgatgacaatttctgtgccggtctgacgccggaatcgaagacctggatgcagaagattcgggatacaggatatgagacctctcttttcggaaaagcgcatcttcataaatttgcctctgatttaagagacatggaatggcagacgaaagggtatggctacgacatcgtagatgagctgccggggccgcgtacatatgggattaaaaaatccagctactacgattacctgaaggaaaaggggctgctcgagtgctattgcagggacatggagaaacggtatgaaaaaggccacgtatatgactgcagtccaacacctttggaggtaaccgattatgcagacgtgtatatcgcggaccgtgcggtcgagtacctggaacaggtttcaaaggaaagcccctggttctgcaccgttggcttcggaggaccgcatgatccctgggatacgccgaaagaatatgcggatctctatcggaatatgacgccgccggcgcccttaaaagcaccgtattccttaaatcccaatcgtccgaagggagtatatgatgagattttaaatggaaaatacgatcccggcctcactgaagatgtgcggaatatgacggagcaggatatcattggactgcgccgcagctactatggccatgtcacactgattgacggccagatcagacggatcatcggctgcctggaaaagcgcggacttctggaaaatacagtgattgtatttaccgctgatcatggagaacaaaacggcgattacggacttctttttaaacaaacctttttggaaacctccgtgaggataccgttgatgatttccattccctcagaaaatggccagagcatccatactccggtcgagctgatggatttaggagctacgctctgcgatttactgggaatttcccaggaaacaggacattccagctccctgctgccgcttatgagcggcaccggaaatgccaaaaagcgtgtgatatcacagctcttcggtgagacgatgctgttggaagattcatttaaagcagtatttaatcaggcggaggagatttatctgctgtttgatttaaacaaagatccgaaagaacaatttaatctggcaggtacacgggaagctgcggagatagagaaaaagcttcgctgctcttatgatgagtggaaatgggagaaatga

SEQ ID NO: 1385 - DNA, 1749 bp, Hungatella hathewayi 2
atgagaagacgcaactttatcaaacgttttttatactatacgggaattattaccattcccattatcacgctgttctttatcttcatggctgtcatcgtgtaccgcaaacagcaggacatcgagaccgaggccgtcaaatcggcccaggccgtgagagacaactactctctcgtgctggacagcgccgcaacccaatacgaccttttggcccggaatcccaggatgtccatctccctgcgcaattacatttcccataaacagattggctatctggatgtgatactcaccaacagtatcctttccaacttcgcctccctcaccagccacgcctcctacatcgcctccgtctattactatctcgacggctacgactctctccttacctcctatacgggaggcatcacccagctgtcccagttctctgatttgaactggcttccttcctatgtggaatcggagcggaacgaatgggtggaaaagcggaatatgcatttatattcctacaccaatccgattccggtgctgacctactataaaaaactcagcatgttccgcggtgtcgtcatggtaaatatctacgaagaccagttaaagcagatgctggggggcggctccagcctggatcagttttttatcattgacgcggatggcagcttccttcttcagggcagagggaccacggagccggaccaggaagcgaaggacgccctcatttccgcggtacgcgccgcctcgggaacaccatttcaggactggatctcctttgaccacaccaaatacttcgtgcggatcgttcctgcggactgcggcacctatatcgccgcctgtaccagtcggtccagctattatcaggcgctttacacactcctttttcagcttttcatcgtgctggccgtcatcatctgcaccgtggtctggatcgcatacaccatcacgaagaagaactttcagcagattgattacttcgtcacggtattttccgacgcggaacggggaacctataagaatgaaaagccggcatttatcaaggatgagtacgatctcattctgaataacatcgtacagctcttcatccgccagacatttctaaagaaccagctggccctgaaggaacaggagcagaagctggcagagatgacggccctgcagttgcagatcaacccgcattttctctttaacacactgcagactctggatttcaaggctctggaatacacgcagaaaccgacggccctcaacagaatcatcgaggcactgtcggatattctcaaatactctctccaaaacacggcctccatggtcacactgaaggacgagatcgagtacctgaagaaatacgatcacatccagcggtaccgctacgaggataaatacattctgtattacgattatgacgaggaactggaaaccacgccgatcatccggcttatccttcagcccctcattgaaaacagcctgtatcacggcatcaaaccattggacggttccggctttatcaagcttaagatcacggaaaaagcagagtggctgactgttaccgtcatcgataccggcgtggggatgaatccggccgaaaccgcggcgctttacgagaagatcaaccacccgggaaatgaaagcatcgggcttgccaatgtgaacagcaggctggtcatgcagtacggcgaggaatccaggctgaggatactgagcaaaaagaatatggggacctgcatttccttccggattccgctttcccggtctttataa

SEQ ID NO: 1386 - DNA, 1065 bp, Hungatella hathewayi 2
atgggagaaagaaaaaagtttaactatatacttgccggagtggttggccttatggcagtttttgccctgtgccttctgtttcgcataaagactgttgaaaatttggaggatgatgttctctttaccgtagataattatccggtaagccgtaaagagttttctctttttatccgggatcaacgctctgacgcggcacagtatttctatgttacatatggtgctgaaatgaaatctgatttctgggccactgagtttgatgggcagacaccatctgaatactgtaaggaaaaggcgatggaagagatcgtcagatacaagacggaacgtattctggcatatgaaagaggccttattgaatctgttgattacagtgatctgatggcagacatgagggttctcaatgaagataatgcaaaaagtgatgtagctggtgaaatgacttatggattaactgcatttgaaccgtggcagtatcttctgtatattcgctctgattgtaataccaggctcatgaaagatgaaatggaacgtttaatggacagtattccggaagaaacgattcgggcgcgctatgatgaagataaagaaaattacagtaaggggtatcgtgtgacctatgaacggctggaggcagagtctgctgtatcggggtttgatctgaagactgcattagggcagatagctgaaagagcttctatgaatgaagaaagcttaaaagatgccgccgaaacgctggaggttctggaggagtattcagtaacgcaggaaatcagttctgagaaaataataggcaaagatgatatctgggagcagtttgtccaggaagaggttgtgaggcttgaaccgggaatgatatcctctccgctgctcttatctggtaataacggctgtctgctgcgctgtacccagcgcactgacctgggatatgatagctatgaagaggtaaaaaacagcatcattcttgaagaagcacagaaagtacttcaggcctctatagaggagagggtgcaagatgcttctgtgttttttgtaagcgataaatatgaacagatcattgttgagtga

SEQ ID NO: 1387 - DNA, 1341 bp, Hungatella hathewayi 2
atgagattactcaaaaaagtagtagcagtaggtatggcgtccactatggtattttccatggcaggatgtggctccaagacagcagaaacaccaacaacagcagctccggcagagacaacaaccgcagcagcaggagagacaacagcagctccggcagagacaaaagccgctgatgcaaaagtggagaacaaggataagcccttagtatggtttaaccgtcagccatccagcagtgccacaggccagcttgatatgacggcgctgaattacaatgcggatacatactatgtaggattcgatgcaaatcagggtgctgaacttcagggtaccatggtaaaagagtacatcgaaaagaatattgacaccatcgaccgcaacggtgacggaatcatcggctatgttctggcgatcggcgatatcggacataacgattccatcgctcgtacaagaggcgttcgtaaggcccttggaacagcggtagagaaagacggcaacattgtcagtgacccgattggtacaaacacagagggcaaggcaacagccgtacaggacggaacacttgaagttggcggaaagacatatatcgttcgcgaacttgcttcccaggagatgaagaactccgcaggagctacatgggatgcagcgactgcaggcaacggaattggcacatggtcttcttctttcggcgatcagattgatattgttgcttccaacaacgacggcatgggaatgtccatgttcaacgcatggtccaaggacaacaaagttcctacatttggttatgatgcaaacagtgatgcagttgccgctatcgcagaaggctacggcggaaccatcagccagcatgcagatgttcaggcttacttaacacttcgtgttctccgcaacgctctcgatggagttgatattgatactggtatcggtacagcggacgatgcaggcaacgttctgagcagcgatgtatatgtatacaaaacagatgagcgttcttactatgcattaaacgttgctgttacagcagataactatagcgatttcatggattccacaatggtttatgcgccagtagcaaatcagcttgatgctgctgcccatccggaaaagaatgtatggctgaatatttacaattcagctgataacttcctgggttcaacctaccagccacttcttcagaagtacgacaagctgcttaacttaaaggttgagtacatcggcggcgatggccagacagagtccaatatcacaaaccgtcttggaaatccgagccagtacgatgcatttgcaattaacatggttaagacagataacgcagcttcttacacatctttacttgatcagtaa

SEQ ID NO: 1388 - DNA, 936 bp, Hungatella hathewayi 2
atggctgaaccagcaatgagagaggcttatggagacgccctgttaaagatgggagaggacgaacgcgtagtggttctggacgcagatttggcgaaggccacttcctcctgtaaatttgccgccaggtatccggagcggtttttcgatatgggaatcgcggagcagaatctgatgggaacggcggcggggatggcgatcagcgggctgaagccatttgcatcgaccttcgctttgtttgcggcaggacgcgcctatgagccgatccgcaatgcagtctgttacgcaaaggctccggtgaagattgtggctacccacgcgggactttcaccgaattccgacggaggaagccatgagacgatcgaggatatcgcgctgatgcgggtgctcccgggaatgacggttttaagtccctgtgattacagacaggcgtttgacatggttttacagatgaaagagatggatcacccggtctatatccggatgtcgagacacccggtggagacggtgacggcggaaggaagccgcacagagatcggtaagatcgacgtgctccgcgagggcggggacgtgtgtttcgcagccacgggcattatgacagcagaagcgctgcatgcggcggagatcctggagactaaaggaatacacgcagcggtgttaaatgtacataccatcaagcctctggataaagagactctgatccgttacggaaaatcctgcaaacggatggtgacggcggaggagcactcggtaatcggcggtttaggatcagcggtggcggaggttctcgccgaaagcggcggatgccgtttgaaacgcgtcggcatccaggatcgattcggacagtccggcgatctggctgaactgatggaatgctatgggctgacagcgggaaatctggtggagaccgctttgaaaataatggaggaagacgtatga

SEQ ID NO: 1389 - DNA, 930 bp, Hungatella hathewayi 2
atggcaggaaaagccttggagggcggaagaaagaaaagcgtggaccggacaggatacttttttgtcgccccgtttgtgatcgtatttttcatatttaatgtctatcccgtagttcgtactttttacttaagctttaccgattacaagggcttcggtgatgcgatgtttacgggcggcaccaattatctgcgcgttcttcaggataaatttttctggaaggcgctgggcaacaccgcgagaatctggagcgtcaatatcgtgctccagctgggcctggcgctggcgcttacaatcgcgttcagcgatattaaatataagatcaggggcctggcggtcttccgtgcattatattaccttccgaatctgattgcggccacatcggttgcgtttctgttcaagacactcttagactggcgttacggcactttaaatcagcttctcgtcggagcggggattaccgccgatccgataaactggctgggctccacggccacggcgccctacgtgctctcagtgatcggcgcctggatgtggttcggcaattccttcattatgctgatggcgggagtgcagggaatctccagggattactttgaagccgcggcgatcgacggtgccggaaggatgaagacatttacaaagatcacccttccgctgctgaagccgattctgctctatgtggggattacatccttaattggcgggctccagatgttcgatttaccattcctgatctgcggcggcacggcgggaaatcctggcggaagcacacagacggtcgttatgtatctgtataagttcggatttgagacgaatcaggttggctttgcctcggcggttgcatacgtcctgttcatcatcattctgctgttttctgttctgcagtttcaaatgatgtatggaaagaaaaaggaggggaataagagatga

SEQ ID NO: 1390 - DNA, 2478 bp, Hungatella hathewayi 2
atgcctgatcacattgagatacggggtgcccgtgttcacaatctaaaaaatatagacctggatattccgctggggaagctggtggggatcgccggtgtgtctggatccggcaagtcgtcgctggctttgggcgtgttgtacgcggaggggtcccgccgttatctggaggcgctgtccacgtatacccggaggcggatgacacaggcggcggaggccaggatcgacagcatcgagtatgttccggctgctctggcgctccatcagcgtcccgccgtaccgggggtacgaagcaccttcggtacctctacggagcttttgaattctctccggctcatgttttccaggctgggaagccatcggtgtcccaatggtcatttgcttcagccgacggtgaacactgccataggaaaaccgcttcgctgtccggaatgcggggcggcatttgacggtcccagcgctgagagcttttctttcaacagccagggagcctgcaaaaactgcggtgggacaggcatcgtgagaactgtgaatgaggccgtgctggttccggatgaatccatttccatagacgatggggccgtcgcgccctggaattctttaatgtggtctttgatgacggatgtatgcagggcgatgggtgtccgcacagatgtccctttttcagagcttacaaaatgggaacgagagatcgtcttccatggcccggctgaaaagaagcacattctatacaaagcgaagaaaagcaatcaggcaggggaactggattttacctattttaacgcggtttacaccgtggagaatgcgctggcgaaggtaaaggatgacaagggcatgaaacgggtggagaaatttctgaagcaggagctttgtccggtctgcggaggaaccaggctgaatgaaagggcgcgctcttccctgctctgcgggataacactgggggaaggcgccgctatgacattggatgccctgattccctgggtgaaggccgttcctgcatccatgccggaagaactgcgggacatggctgagagcatctgcggccagttcctgcatacggccaggcggctgaccgacctggggctggggtatttaagcctcgaccgggcgggagatacgctttctaccggggaacgtcagcgggttcagcttgccagggcagtgcgaagccggacgacgggagttctctatgtgctggatgagccctcgattggactgcatccggctaacgtggatggactgctcggtatgatggacgatctgatcgctcacggcaattccgttgtactggtggaccatgacacacgggtattgaaggcctccgactggctcattgagatgggacccggagcggggcagcatgggggaaacgtgctggcgcagggaagtctggaagacgtggcagaaacgccggactcgctgattgccggatttctgaccggagaggaaccggttctaatccgtaaacggactccttcggagagaatgtttgaacagggacatatcagaatatcaaccgctccgctccatacggttcacgcccttaatctggatattccgaaaggccggctggtggcggttaccggcgtatccggttccggtaagacgaccctgattttggaaagcctgatccctgctttgcaggcgtcctgcggcggcacacggctgccagatcatgtgaaagccgctgacgcgcccggaatcaggcgggtcagcctcattgactcaacgccggttggaatcaatgtccggtcaacggtggcgacctacagcggcgttctggacgagctgcgaaaactttacgcggccactcctgaggcaaaagaacagggatgcagggtcagtgatttttcctacaataccggttccctgcgctgtgcaggatgcgagggcaccgggcagatcaccatggatgtgcagttcctgccggatgtggagattgtctgcccggactgcggcggttcccgatatggaaaggaagcggctgcgttccgctcccacggcatatccctgccggagctgatgggcatgacggtggaacaggcgctggagcggttctgtgatgtgagaaaggtcagagaacggctccaggtcctggctgatttaggcctgggttatctgaccttgggggaggcgacgcctgccctgtccggaggcgaggcccagcgtttgaagctggcatcggagatcggcaaggcccaggatgatgccgtgtttgtgttcgatgagcctaccatcggcctgcatcccctcgacgtgcgggtgctgatcggcgtattccagaagttcatcgatgccggagccacaattattgtcatcgaacacgatctggatatgatcgccaatgccgactatgtggtggatatggggccgggcggaggtgatgcaggaggccggatcgtggcggccggtacgccggaggaaatatcgcggagtgaggagagccttacagggaagtatctgaaaaagattatgaaatag

SEQ ID NO: 1391 - DNA, 2913 bp, Hungatella hathewayi 2
atgatgaaacaagcatcggtcgtgaaaaggttcggactttgggctgcggtaagcctggtgatcatgataatgtcagtgctttgtatcacctcgatggctgcggagagtcagccgcgtgtgcttcgtgtagcattttgtgaagcgaaaggaataacggaaaaagatccggatggaagccgtcatggcctggtgatggattacctcaatgagatagccaaatacaccggatgggagtacgaatatattgatacaactccggaggttatgctcaaaggctttgttgagggaaagtatgaactgatgggaggcaattattatcttcctggcctggaagcgtattattcctatccagattataatattggttacagcaagtcggttatttttgcgcgcgagaacgatgattctgttcagagctataatctaaggtccctcaatggaaaaaccataggagtttatgaccgcgccgttgaaaatatccgccggttaaaagaatatctgtccatgaacgatctggactgtacgctgaagtactattcctacgagcagctggtggacgggaacctctattcgtatttacaggagggagaggtagatctgctgctgggaaacagtgtggagcagaaacaggggattcgggcggttgtttcttatgattcacagccgtactatatcgtgacgaatgtgggaaatcaggaggttctggacggccttaatatggctatggcaaaaattgcagattccaatcctgattttgcatcagaacgctacgccgccaatttcctgaatgcatcatctgtcgatattcgtctcacgaaagaggaagaggactatattcggcagaagggcagcgtaacagtggccatgccgcatgattttcatccgttgacctgcgaagatccggatgatatgcatgatggattgacgtatgatattttaaaagaggtcactgagtttaccgggctggagtttaactatgtttccaccgactcttatattgaagcaatggatctggtgcgccaggggaaggcggatatactcggattttatctgggggacgaagcggattcgctgaatcagaagatggtgcttacggctccgtttgccagtatgaacagtattatcgtgcgcaacaaagcgtccggctttccggaaagtgagcttgtgggggcggtgattgaaggaagagcgctgccaaagagcatacgggctgccgaggtgaagagctatcgcaatatcaatgaggcgttaaaggcggtgaaccgtggagaggcagattttgcttacggtctggccacgtacatggaacatgaaattcagaagagtcattttgccaacgtcgtacctgtgacgctgattaatgaccgcatggatatctgtttggcaatggcaagaccggcggacccggagctgctgacgattatgaataaggcaatcaacagcatacccagcgacagaagcgcagaactgctggatcacaatatggtttccgcgggtacgggcgtgctttccataacagaactgatttatgccaatcccatgatgtttgtggggattttaactgcgattcttctgattctggttactgtggttctgtgggtcaaccgtgtccgtgtgaaggccgcagttatgcagagcgatttaaaaaaggctgaggcggagagtcgggcgaagggcgagttcctctcccgcatgagccatgaactcaggacccctatgaacgctgtggtaggtctggcggatctggccggaatgacagagggggtgccggagaatatacgggaaatgcttgtgaagcttcgggcttcttcccattatctgttggatctgatcaatgatattctggatatgagccgtctggacagcgggatgctgaccattgccagcgagcccttctctctggaacgtatgctgaatgagctgcggacaatgatggagacagacgcgaacaggcgcggcctgaattaccggattgagaccgatatttctcacggtggagtgaccggtgatgtcattcgtctgagacaggttctgacgaatctgctttccaatgcgtttaaatttaccccggagggaggctctgtgattcttcgggtgacggagaagccgggccccggtgagaatgcggccagtgagcatacagtcggtgagaatgcggtcggtgagcatacagtcggtgagaatgcggtcgatgagcatacagtcggtgagaatgcggtctatgaattccaggtgattgatactggagtgggcattgatctgaaagaccagacgcgtattttcgatacctttgaacaggtggggacgaattatgccaagagccagggaaccggactagggctgccgatcagccacagtattgtgcagctgatgggtggagaactgcgggtgaagagcgaaccgggccgcggcagtgaattttacttcacgcttacgctgcctgttggcagccctgtatacgatggagtgagcgtgaacgaacgccatgtcggagaagagctgttaaaggaagtcaggattctgcttgcggaagacaatgatttaaacgccgagatcgccattcagcttctggaactgaagggagcggtggtgagccggagtgaaaacggcaggcttgcggtggagcggtttaaagagagcgatccgggagaattccaggtgattctcatggacattcagatgccggagatgaacggcctggaggcgacgcgggccatacgggccatggacaggccggacgcggccgccgttcccatcatagccatgactgcaaatgtattcaaagaggatgtggacgcggcaatggaagccggtatgagtggatttgaaggcaagccgttggatgtggaacatctctatctccagatttgccggctgctgggactcgaggcaggcggattgaagagtgaatag

SEQ ID NO: 1392 - DNA, 1644 bp, Hungatella hathewayi 2
atgaaaaaaggaaacgtatttacaagagcgctgactctgacgctggcgggttccatgctgctcaccggctgcggcgggggaagcaaaacgacggagacgaaagccgcccaggaggcagtggattccgacggcagaaagatggagggaaatctctacacggaaggactccccattgtaaaggagcaggagacctttaccatcgctgtcatcggtcatcccctggccaaggggacctacgaggataagccctgtgtgatccaggctgaaaaggataccaatatcaagatcaagtggatggagatcccttccaccggatggcaggagaagatcaacgtcatgtttgcctccggcgagcttccggacgccattgctacgggaatcacagactcctccatcgtaaaaaatctgccccagcttgtaccggtaggagattatatcgataagtacgctccccatgtggcagagacgtacaacaagtatcccgatctgaaaaccatgctgaagcaggatgacggaaagatttattcctttatgacaaattcccaaacttcgagaaatgactccaccagcggcgttctcttcatcaacaagcagtggctggataaccttggacttccggtccccgccacggtggatgagtactacgccgccctgaaggcgtttaaagagcaggaccctaacggcaatggagcaaatgatgaaatcccattctccttctgccagcagtattacgcctcccagtttaaaatgatgatgggcgccttcggcatcaaggatgacaccgaccacatcatgatcgaagacggcaaggtggagctgtctgcggcgaagccccagtattatgacgcattaaagtactaccataagctggcttccgaagggcttctcgacgtggaaggcttcagccagacccagcagcagtattattccaaaggccagcagatggtggtcggttcctttttagagtaccttccctattacgttgtagggcaggagaatgacagccagtacattcctcttgcaccattaaaatctgactccggtgaaccattatgggatggcataaaagacaagtttgccggatggcacaacggcttcgtcattacgaaggcgtgtaagaacccggaagcactggtacgctggtttgattactgtaacacgtcctttacgacgaaaatgcagtggtttaacggtgaccgcggcgtactctgggaaatggatgacgagacaggggaatggtggaatgtcaataattatccggaaggccagaccaaaggagagtaccgttataccatgtccacaggccctcacgcccccatttttttaacaaaagacgattgggataaattcgttcagaaggatgatccccaagcagaggaacgcaaagactgcatcaaccttttagaaccgtatttcccgaaagactatatattgccggtatttgagaaaacggcggtcgtggaggaaaaggaaaatctcagggtggatatcgataattacatcaagaattttaccgcacaggccgtattgtccggtattgacgacgccggctggaaggaacacttagccaagctggagaagctgaatacagcgcggtatctggaactgcagcagcagacgtatgacaatacaaacgccaattga

SEQ ID NO: 1393 - DNA, 2643 bp, Hungatella hathewayi 2
atgaaagaactagaaaaaaattataatcctgccgaaattgagggcaagatataccagaaatggctggacaggaagtatttccacgcagagccaaatccggacaaaaaaccgtttaccattgtgatgcctccgcccaatatcacaggccagcttcatatgggccacgcgctggacaacaccatgcaggacattttaatccgctacaaacggatgcagggatacgaggcgctctggcagccaggtacggatcacgcggcgatcgccacagaggtcaaggtaatcgagagcttaaagaagcagggcatcgataaggaggacctgggccgtgacggattcctggagaaatgctgggactggagaaaggaatacggcggacgcattatcaaccagctgcataagatgggttcctccgcagactgggacagagaacgttttaccatggacgagggctgttcggaagcggtgcaggaagtatttatccgtctgtatgagaaaggctatatttacaaggggtccagaatcatcaactggtgcccggtatgccagacctccatatcggacgcagaggtagagcatgtggaccaggacggatttttctggcatatcaactatccggtagcgggagaggaaggttcctttgtggagatcgcaaccacgagaccggagacgcttctcggcgatacggctgtggcagtcaatccggaggatgagcgctacaccaatctcgttggaaagatgctggagctgcctctcacgggacgcaccatcccggtgattgccgactcctacgtagacaaagaattcggtaccggatgtgtaaagatcacaccggcccatgaccctaacgacttcgaggtgggcaaacgccacaatcttccggagcttacgattatgaacgacgacgcgaccatcagtctgcctggcagcaggtacgatgggatggagcgctacgaggccagaaaagccatcgtagaggatttgaaggagctgggccttctcgtaaaggtggttccccatacccacgccgtaggtactcacgaccgctgtaagaccacggtagagccgatggtgaagcagcagtggtttgtacgcatggaagagatggcaaagccggcgattgaggcgttgaagagcggaaaactgaaatttgtgccggagcgtttcgataagacgtatctgcactggctggagagcatccgcgactggtgtatttccagacagctgtggtggggccacaggattccggcctattactgcgacgaatgcggagagactgttgtaagcaaggaaagaccggagaagtgtccgaaatgcggatgcactcaccttactcaggatgaagacacgctcgatacctggttttcttctgctctgtggccgttctccacgctcggatggccgaacgagacagaggacttgaagtatttctacccgacagacgtgctggtgaccggttacgatattattttcttctgggtaatccgtatggtgttctcgggaattgaacatactggaaaactgccgttccataccgtgctgatgcacggcctggtcagagattccgaaggccgcaagatgagcaagtccttaggcaacggcatcgatccgctggaagtcattgacaagtacggcgcggacgccctgcgtatgacactcattaccggcaatgcccctggaaacgatatgcgtttctactgggagagagtggaagccagccggaacttcgccaacaaggtatggaacgcttcccgcttcatgatgatgaacatcgagaaggcgccggacagccaggcggagctgtctgatctgaccatggcggataaatggatcctctccaaggccaacaccctggcccgcgatgtgacggacaatttagacaagtatgaactgggaatcgccctccagaaggtttatgattttatctgggaggagttctgcgactggtatatcgagatggtaaagccgagactctggaacgaagaggataccacaaaggcagcggccatctggaccttaaagaccgtgctgatcaattccctgaagctgcttcatccgtatatgccgttcctcaccgaggaaatcttctgcaatcttcaggacgaggaagagtccatcatggtatccgcatggccggaatataaggaggaatggaactttgccgaggaagagcatgcggtagagaccatcaaggaagcggtaagaggcatccggaatgtccggacttccatgaacgttccgccgagcaagaaggcaaaggtatacgttgtatcagagaacagcgaaatcctggatatcttcgagcacagccgcgtattcttcgccatgctgggctatgccagcgaaatcgtgctaaagaaggataaggaaggaatcggcgaagatgccgtgtccgctgtgatccatcaggcagtcatctatatgccgtttgccgagctggttgacatcgagaaggaaaaggaacggttaaagaaggaagaggaacggttatccagggagctgtcccgcgtaaagggaatgctgagcaacgagaaattcgtaagcaaggcgccggcagccaaactggaggaagaaaaggcgaaactggaaaaatatacacagatgatggatcaggtgaaggagcgtatcgctcagttaggcgaataa

SEQ ID NO: 1394 - DNA, 1464 bp, Hungatella hathewayi 2
gtgtgtacaagtattgagggaaaagtatttgcagcggggacgagggtttttataatattagataaagagctaaaatggaaagaaagagagggtatttacatgaaaaaaaggttaatggcacttacaatggcggcggcaatggtgtttacaactgcatgttcaggcggaggaactgcaagtccgacggaagcggcaaagacagaggcggcgaagacggaagcagcgaaaacagaggctgcatcaacagaagaacagactacagaagcagagattaccgaaccggttacaatcaagtttgctaactatgcgcttctggagcagggatatgaggagttctggaatggtgtgaagacagatttcgaagccaagaatccaaatatcacgatcgaatgggtaacagctccttacggagagattgtaaatcaggtaatcaacatggccggaggcggcgaccgcatcgatatgatatttggtgagatcggctgggtgccaggtcttgcggatgcagggctgaccataccggtggacgaagtactgccggcagattatctggcagatttctatccggcgatcctggattcgttcaatattgacggaaagccttacggactgccgatgtatgtttctccatacgtactctattacaatacggaactgtttgagcaggcaggcctggatccgaattcaccgcccgctacctatgatgaaatgcttgaatatgcggaaaagctttcccagctgaaggattccaacggaaatccggtttatgcatttggtcagacgacagcttctgtaccggtatccggttcctcgatcaatggtatgatctttaacttcggcggaacacttcttgccgatgacggaagcctcagtatcgataatcagggctttaaagacagcatcactatgctgaagacgttagatgaaaagggatacaatcctcagaatgccaagttaaaagatttgagaaacttatttgctttaggacagctggcaatgtattacgaccagtcctggggattcaacggaattcagtctatcaatccggacgcaaagaaattcaccgcttctgcaaagcctttggcaggcggatccggaacaggagaaagcattcttcaggctcactgtctgatgtatgttgacaacggtgacgcacagaaggcagcctgcagcaagcttacccagtatctggttacctctgaagtattaaatgattatttagcaaatattactccggcgtatccggctaagaaatcaatggaaggcgcaacaggcacaaatcctgtccttgcaggtgcagctggttcagctgagaatgtaaaagcgcaggttttcgtacctcagatcagtgatttaaatctggaactctgtacgctggcacaggcagttacagtatccggcaaagatgtggacactgcaattgaagactttagaaaagcagcagaggctattcttggaaattag

SEQ ID NO: 1395 - DNA, 1968 bp, Hungatella hathewayi 2
atgattttgattttcgctgctggtaaaatcatatcacgctttttcgtacattttaatcaaatttctttacctgttttgttcaatttcattaccttttacacaaacagcctgtactttcggccaaaatcatgctatattacaaaccaaacacaggatataatccggcattttacacaggggatactgcttatgaagcttccgcattttacctattcgtttaacgatctaaaactaaaacacagactgattcttatcattattgttgtggccgctaccattaccggttttactttatttgggttcaactatgtaatccaccagtataacaaacttctgtatggccagactgccaactcgctttccttcgtctctgacgaattaatgtatcagctggaaagcattgagacggtctcctcctatatcgcttacggttccgcctttcaggaaaacctggccgtctgcagcacctccaaatcgtcgccgcttcctgcacaaaaggcaagaaacgaaattattgctatctttaaccagtattatacgtctgacatggttcatctaactacccttacgcctaatggaaagaaaatctggtgggggaaaacaagctattctgaatcggaggaagccacacaacgtctgatggaggcatgtgacaatgccaacgggcgcctggtctggcgtccttccgaaaaaggtgcccgccttctctgcgcccgcaaaatactgaaggtaaaaaatttaagtttaaaacccatgggatatttaatcattgaaattgacttgcaggatacggtacaggacatcttaaagtcccgctattccaacggtcagcattttgatttgttcatcagcagcggcgaacagctgatctatccggccgacaatgaaagctatctccgtcattaccagaagcttttctctgatacccagccctacgccattaaaaatattgacggcaggcgcatgtttataacctttgcaaaactgccggttgaaaacggaacgtggcggatctccctggctgttccctatgataatattttccattctattaaccggttgattcctgtgttcgtgttttctctgattctgtcgatttctattgctacatttctggccggacgcattgtaaaaaatatttcctatcagttcaatatgctggtggaaaaaatggaacggattaaaaaagagggaattatgaaaccgcaggctgcattgacgccatccaccaacagtcaggacgaaatgaccattttaaatgcatcctttgatcagatggttgtagagttaaaaaagctgattgaggacagctatgtaaatgagcttctcattacccaggcaaagcttaaggcactggagcagcaggtaaatccgcatttcctctacaacaccttaaacagtattaactggctggctaagagagctgggtcaaaggatatatccaccattgcccagtccctgggaagtatgcttcagagcacattgaataaccaggaaaatatgatttccattgaaaaagagctggaaatcgtatcctgctacgttaagatccagcagatccggtttgacgacctggtagtagaaatgaacattgatccgtccgcactggaatcagagcttccaaagatgaccatccagcctctggtggagaatgccatactccattcccaggaggaaccgcaggatgaatacgtgatccgtctgtccgttacggaggaaaacaacacgctcataaaggtacaggtggaaaacagcggttccttcatcgatacccggattctggagcatctaaaggatcagacggtgaaaccgaaaggaaatggaatcggcctcctgaatatcgattcccgcctccgcatcctattcggagacgattaccacttaaattttgataacagaaataatatggccattgtgtcattttcaattcccaggaaggcagaagcctcctcttctgacctatcgtga

SEQ ID NO: 1396 - DNA, 846 bp, Hungatella hathewayi 2
atggaagacagagaggatgaagtgctgaggctgaccagcaggatcgtgagagaccactgtgccagacggatcgggcgggtcagagaacttctggctgatgatgtcgtatggatcggccccctggagtttcagtgggcggaatcgaaagaagggatggattcgattctggatctgagacggttgaaatggaaagtgaatattcgggaagagaagtaccggactgtcatgtacgataaggacatttgtctcgtatacggcagctttgtatgcggcatgtggcatatagagaagccggtatttcacaagatccgggtgacatttctctggaaacggacgaagggggaatggaaggcccgccatattcacatttcccagccttttgattatccggtgccttctgagatgagcgatgaggagctggaggatctctatggatatgccggcagccatggggacagaacgaagaaatggctgggggatcacaggggacataagaagcttctgattaaggactgcagcggctattaccactatatttacgagaatgagatatactgtatcgagtcggacagccataactgcaacgtaatcctaaaggaccggaagatccgggtaagaaagaagatatcggaatatgaggcggaactgcccggtttcttccgccgtgttcaccggggctatctggtaaatgaaaactgtattgagggaatttccctctaccggctgacacttcctgacggcctcgatatccctgtctccagaaaaaagtatgcgcagatcaaaccgcttctgaaaaaacgtgccggtgcagatggaaatgaatccggcaatatgatatactcgtaa

SEQ ID NO: 1397 - DNA, 1539 bp, Hungatella hathewayi 2
atgaaagcgattatggtgatgtttgataccctgcgccggacgatgatgccctgctttcagccggaggaccagaaggtgccgatgccgaatttccagcggctcatcagtcattccgccgtatttgaccaccattacgtatgcagcatgccgtgtattccggcaaggcgggagctgcatacgggcagagcaaatttcctgcacaggagctgggggccgctggaaccatttgatgattccatgccggagctgcttaagaaggccgggatacatacacatctgtcgacggatcaccaccattactttgcagatggtggcgccacctatcatccccgctattcgacctgggagggattccgaggacaggtgggagatgcctgggtgggaaaatgcgggacagatgagtccggatttgcacctgtgatgttgaatcccgaacatcagccggagaagctgcaggccatgagaaagccgatgggatggcagaatctttccaacaggacgcgcaggaagggggaggcggagtattcacagacgcttacctttgacggcggaatctcctttatcaaaaataaccttgatgaggaccgctggttcgttcagatcgaatgcttcgatccgcatgagccttttgacgcgccggaagaatttctaaaaccctggtttcatgaggatttcacgtatgactggccgccttatgcggcagtggaagaatcacaggagatgattgatcagatgcgccggaaatactatgcgctggcacagttttgtgataagagcctgggccggatcctggatctgatggatgaatacagtctgtgggaagataccatgctgatcgtcaatacggatcatggattcctgctgggagagcatgactggtggggaaagaattttatgcccgactatgaagagatttcccatataccgctgtttatctgggatccgagatgcggtgtcaaaggggaacacagaatggcgctctcccagaatatcgatctggcgccgacgattcttcagtactttggcgtccccatatcggaagacatgcgggggaaaccgttgaaaaatactatagaatccgatgttccggtgagaaagtacggaatattcggcattcacggcggtccggttaatattacggatggaaggtatgtatatatgcgggcagtccggacgccggaagcgcgtgtatgggagtataccctgatgccggctcatatgaaaaatatgtttgcggcagaggagctccgggaaacggagctggaaccgcccctggcatttacgaaaggctgtcccgtcatgaagatacctgtaaaaaccggatacggaagaaagctggcccatgatgtcctgttcgatctacggaatgacccggggcaggagaggcccatgcacgacgaagaaaaagagcgggagctggaaaacgcgctgacagcgctttttctggaaaatgatgcgcctgactatgtatacaggcgatttggactggattatattccggggaagagggaggaagctgtccatgaaacagatttgtaa

SEQ ID NO: 1398 - DNA, 1506 bp, Hungatella hathewayi 2
atgcaattctatgaaaaacttatatttttacaaaatctcacacaagttacaaatcgaatgctggcacatgaaattcaggtggacccctcacagatcagccgtctgcgtaccggagccagaggaattccgcgcaaccgcgatcttattaaagccatgtcctcctacttcgcaaaacggtgcaacacggaatatcagcgtcaggccctttccggaatgctcggtatcaagcaggcgcttactctgaaaaaggatcagctgtctgagatcctctattattggctctgcggtgaatccgctgaagtcggccgttttatccggaccttcgagtcgctcacctttggagatccggacgcaggtatcccagaggatccattcaggctaaacattgataatgccgtctattatggcaatgacggaaaacgatccgccacgcgcacggtttatcagcatttactgtcgatggaaaaaccgtgtacgatttacatcctgtcggatgaagccgatgactggatttctgaagatatagaattttcccgcagccttcaggcctgggggttaaatcttttgcacagagggtttaaaattttacagattgtacctcctgctgcgccttccaacctggcatttgagtcattaacccgctggcttcctctctatatgaccttccaggtaaccgcatatttctatccccggctgcgggacagtctgcatcggcgtaccctcatcgtcgtgcccggagaaatcactatgacttcaaactccgccgcgcatcaaaccatcagcaccgagaccatgctgactacggacacgaggctgactctggcctatgcctctcagtttcaggactatatatccctttgccgccctatgcagattatatatacggagtctcagggactaatgtactgttttaccagttttttatcatttgatggggaccgcattcaaaagctgccctctctttccgcagaaacggcgcctcccgagctgatggcctactgtacggaaaagcaggcacatcccgacctgttgaaactcggtaatctctatcttcaggaattagccctttctaaaggcagcagcaaaccatatgtatttattgatcttgtgtatctagccagtgcagaagatgtaaaaagcggcaaagtccctattctcctgtcttatactaatgtcgactcgcctccgctttactacacatctgaaacttacattctgcatttaaaaaatattctggatattttagatacctatgataattaccattttgtgcctattaatccgagagcccaaaaggaaggtacgcttatggtgaaagatggccatagagttcttctggtgcgtggatatcatccggtctccgtcctggaaatatctcagcctgagatgatacagctctgtcaggaatatttatacaaaatggctgagcagatcggatacagcggaatgaacagagccaagattatttctcagataaaaaaaaggattcgggaacttcaggtttaa

SEQ ID NO: 1399 - DNA, 1383 bp, Hungatella hathewayi 2
atggtaaaccacaaggaggaaaatatgaaaaagaaaattttaagtgcggcattaggactggtcatgatcctttcttcggtactgaccggttgcgggggcagtggaacgaaagaatctccggaacagcagactgcggcttctgcggaaaaacagacggatggaacggtacaaaacacagaaaacagcggaacagccacccatttaaagtgggcggtgtgggatatcagcctgattacctactggaacgacctggctgacgcttatatggaaaagaatcccgacgtggaaatagaacttgtcgattttggatctactgactattcgaatgtgctggcaacagaactctcgggaagcggcactgattttgacattgttaccatcaaggatacgcccagttatgcgacgcttgtggaaaaaaatgtgttggactccctggacagttacatagaaaaggatggcgtcgagctggcaaaattcaatggcgtcaccgatcagatcctggtaaatgacagtctgtatatgcttccattccgaagcgatatatgggttatcttctataataaagacgtttttgatgcaaagggcctggactatccgtctaatgatatgacctttgaagagtacgatgcgttagcccgtgcgatcgcagatgattcgtttggatccgaggtatacggttcccattaccacacatggaattccgcggtgcagttatttggaattctggatgggaagcacagcgtactggacaaaaattacgatttcatgattccctattataacatggttctggcacaggaagacgatggaatctgtatgaaatatccggatattaagacggaaggccttcattattccgctgcatttaccggcggtaatatagcgatgatgaatatgggaagctggtttgtgaccacgatgattaataacttaaaatccggtgagtttgacgcctctttatgcggaaactggggaatcgctaagtatcctcacgcggaaggcatcgatgcggggactacgttgggtgcagttaccggtctctctgtggtgtccgaatcgcagaaaaaggacgcggcctgggattttataaaatgggtaagcagtgaagagggcgcgctcatcctggcagccagcgggaatttcccggctatctcgaacgatgagataacggcggcgatcgcttccattgacggtttcccccaggatgaacagagccgtgaagcgctcggcacggtaaccgtgtatctggaagctccttatggaaaagatttatccgcaatcaacccgatccttggtacttatcatgagatgattatgcagcgtgagtgcacggtggaggaaggcatcaaaatgatgaatgaagaaacttctaaaatcgagtaa

SEQ ID NO: 1400 - DNA, 1485 bp, Hungatella hathewayi 2
atgcaaacctcccgcattttgataacatatggccataattgttatgtttttgacaaacaaaagaatggccgtaacctctttttccaaccgttatttgtgaggaaagctccggggcttgcgagccagacggagggaaaaatgagtacaaaaaaattagaaattcttaaatgggcggcggttctgggagtaccgctccttatcttctgcatgccggaatccggggctttcagtcatccgatcaagcttttcttatgccttaccgtgtggggtgtcatgacatttgccatggaacttctgcccaatatcgtaccggccattgttctgcccgtcggttatgtcatgttgtcgctcaccggctttgagactgtattcagaccgtggaccaccaacattccatggatggtcctgggtgcgtttatcctgtcgaatacactggaacgtatcggacttttgaagcgagtggcggtctggtgcattgtgaaaaccggtggcacctacaccggtattttgtggggaatcttcctgtttggcatgatctccaacttagtcatgcccggaggctttgtcccggttactgccgcatttacctacggtatctgcaaggcgctcggcattcagaagtcaaaggccggcgcaggcatcatgctgaccggtgtcttctcgaccctggttccaggctacttcatcttcgatcccagcaatacgggagttttgatgggatctgcggaactatcgatcacatacctggaatatttaaaacagaatctcatattcctgccgctcattccccttctggttttcatcctctctaagatgttccggccggaacatgccgtcagcggaaaggcatattataaggaagaacagagaaagctgggaaagattacctccgctgaaaagaaggcaactgtcattatcatctgcctcttcctgtacttaatcagcggccaggaaatgatgtttggcttcatcctggcggcgttcgcaggctttattccggttatcggcatttccagggaagaagatttccggacagtcaattacccgtttctgttctttatcacaggctgtatgaccatcggaatggttgcaacggaactgggcttcggccagatcctggcggatatgctcttcccgtacctctatcagatgcacgagacggttctcctgggcgcggtatggtttgtggctgtgattgtgaatttcctgctgacgccgctggccgccatggcctccctcggagcgccgctggcccagcttgcccaaactctgggaatcaatccccagccggtgctgtattccttctttcaggggctggatcagatccttctgccctatgaatatgcgctctacctgatctcattttcctatggcatgatgtcgttgaaggattttgtgaaggggcttgccatgaaaatggcggtggcatttttgtatctgatggtaattggaattccatactggcatctgatcggtcttctgtaa

SEQ ID NO: 1401 - DNA, 2550 bp, unclassified Firmicutes
atgaaagcatcagggcataacatatttttaagattaattttgttgcttatcgctttaacggcaggtcttgttttatcagccgcggtgtatgcagaaaacagtgacgggcgtattgcgactaataagattaatgcggcaaattacgcttatgcgcaagaagcggacgttacaagcaaagaaggcgacgttaccgtaagtgaagaaaattttcccgattcggttttcagaaactggatattaaactctgccaatctgggcggagcgggcgcagacggcgtacttacccgggaggaaatcagcgcaataacttcagtttatattctgccttccgacgggttaagaataaaaagtttggagggaatcagctgttttaccgcaattacccaacttatagtgcccaatcatgaaattgtgtctttagaccttaccgataacaccgaattaaattatataaactgttcctataaccgtttgacgcttcttaaagtttacggattaagtaaagcagaaaccttattctgcgaatttaattatctttcggagctggatcttacgggacttacggaattaaccacattgtacagcagacacaacttgcttaaaagtcttgatttaagcacaaataaaaagcttaagtttatcgaaacgtttgacaatctgattacggatattgacgttaccgggctcagcgagcttgaatttttgcatatcgaccataataagcttaccaaactggacatgagtaaaaaccttaatcttaaaggcagcggctttgtggtgcgtaacaacgacgtaagagaaattattttgcctgtaattgacgggtttacggtttattacgacgattttgccgaacaggatcccattgccggttatgaaaatatggaatggtatgccgacgagctttacactcagcctataacttcagacgttactgcgcaaggtcagactctttacggcaaaagggtacccaacaaatataccgtaaattttgagggaaacggcggcagcggacttccttcgtctgtagttacttattacgacctggaaactgccttgccagacaatattcccgttaaaaaaggttataccttcatcgggtgggggactgacgcttacaatccttctgaaatttattccgcgggcgaaagcgtaatcaaccttgcgggtaaaaaatacaacggcgacaaagtaacgctttacgcgcagtgggaagccgtttcctataacctgaaattcgattcaaacgcttcggacgcatcgggcgaaatggaacagattaccttaaaatacgggcaatcgatgcctcttcccgaaaacttattcgcgcgtcctaaatacgattttatcggttgggcttatacttccgacggaaaagtcgcttttaccgaccgacaggcagtgcttaatcttgcttttgccgagggcgaaaccgtaattctttacgccgtttgggagcttacggccgaggaaatagcaaaaccttacgtcctgcaaattcaaaatatatttgaagaatattcttcggtgcaatacgttgccgaagactgggacaaactgttttcttcttataattcatcattgcaaaagttaaaagaagcaggtaaaaacgaacagaaaatgcgggcggaagtagaaacttgccgtcaggcgcttaaaaacgttcctacacttgaggacagagtggacgaaattgtttcggggtggagaaacgaattttcgtcaaggctcagcggcgtttataaccctccgttatctttaggttcgggtaaacttgctttagccgcagcaattgaagcggctgaaaaagccgaattgaataaacttatggactattcgacgcttacggattcaacatgcaaagaacagacggcagcgcttgcaggcagcgagctttcttcggatttagcgcgaattaatgtttttttaagcgcgtccgattggattgtccgcgcggaggatgcctgtttattacccaaaaacgaaattaaattttcagcctggtctttattcgattcaataaccaaagattacgatacgttgaccgcggagcaaaaagcttacgtatcggaagaggtattgagtacgcttgataaaaattctgcctttgcaaaagccaaagaatacgccgtaagtcttataaagcaatatcattctcaattcgatatgcaaaattattacagtgcgcaatggaaagaaatttcgtccgcgttaagcgtaagcataaacggtatcgaaaacgcttttaccgaagaagaaatcggtttttctgtaacggaaggtaaaaataacatggacagagtgtttacaaaatcggaatacgatgccgctcagaccgtgccggaagaacccgatgaaaagcctgaaattcccgatgagaatcctgacgaaacccccgacgaaactccttcggacacggaagaaactccacaacaacccgaaaacaacggagttcaaactttggttattgtgttatcggtaattgcggctgttgccgttatgggcgctgttgtgttttttatcgtgagaaaaagacgccgcaaacagtaa

SEQ ID NO: 1402 - DNA, 1101 bp, unclassified Firmicutes
atgaagattacgataaaagacagcggtcttgtcagtaagcctaacgacggcaaattcaatttcaacgcatggcccagcataataaacgtacgcaaaggacttatgcttgccgcctggtcgggggagcgcaacgcgcatatatgccctttcggaaaggtgatggttgcgcgttcttacgacgggggccacagttgggagccgccctacaccgccatggaaacgccgctcgacgaccgtgacgcgggactttgcgcatataaagggaaaatctatcttacctcttttaacaactcgcgcaagactcaaaagcggtacatggaagaagaaaaacgcgacgaaaagacgcgcgcgttttacaaaagctatcttgaccttataggcgaagaggaagaaaaaagatatctcggttcgcttataagcgtatcgacggacgaaggcatgacgttttccccgcccgaaacacttccgataacctcccctcacggtccgtgcgtcactaaagacggcaagcttttttttgcgggcagggcgttttcggacgatgaaaaagcgtcttttgcctatcttgacgagggaatttacgcgcttacgcttgacgaggacgcaaaacctttaaataagcccgtcaaaattgcgcccgcctattcgggcgacgaaaacaatgcgtttttctgcgagccgcatgctttaactttgcccgacggcaggataataatggggctcagggcacagaatcccgaaacgggactgtttacgatttacgactgtttttccattgacggaggcaaaactttttccgcaccgcgttatacggggtttgacggctcgccgccgcattacttaatgcattcttcgggcgcgatagtaatttcgtatgcaagaagaaaaccgcctttttcgcaatgcgcgcggttaagctttgacgcaggcaacagctggagcgaagaaatcattttaagacaggacgcgccgcacggcgacatcggctaccccgccaccgcagaaaacgacgaaggcgaccttgtgaccgtatactatcagaagtccgaaaaaacaaaagcaaatcaaatcttttttacggtatggagttttgaaaaatga

SEQ ID NO: 1403 - DNA, 1608 bp, unclassified Firmicutes
atgacaaccaaggatatgagcaaagggaacacgttaaaggttcttataatgtttacgttgccgatgattctgtcggtcagttttcagcagctttacaatctggcggacagcgttatcgcgggtcagatgctgggtaaagccgcccttgccgcagtaagcgcgtcttatcccgttaccatgatttttatggcggtaggcacgggattaagcgtaggctgctccgttgtgacaagccgaatttacggcgaaaaagactatcttaagcttaagactgccgtttccaccgcctttatttcgtttgcggccatagcgataatatgttcggtcgcggggtggtttctcgccgaacctgttttaaggcttttatccacgcccgaagaaatcataaaggattctactcagtacctcgccgtttacgttttgggactcgtgttcgtgtttttgtataattcctgcagcgcgactttccaggcgctgggtaattccaatattccgctgtttttccttattttttccacgattttcaacatagccctggatattatctttctgtattacttcaaaatgggagtgtggggactttcggttgcgacggtaatagcccaagggcttgcctgcgtgctttccgtaatagtgctggcatacattctcacaaatcttaagacggataaagaggcttcacaagaacaaaacggcgcggaaaaagattgcggttccgaagcgcaacacaaggaaggaaaatcatttaaaagtaaagtttccttaacggctcgctcgcttatttcgtactttttcgcgcgcaagccttacgcccgattcaaaacgtcggttttcaaagaagtcatgataataggcgtacccagcgttgtgcagacctccaccgtgtccataggacagctttttgtccaaaatctcgtcaacacttacggcaccgacgtggttgcgggttacggcgcggcgataaaaattcagactttctgtatacagctgcttgtaacagtgggaaacgccctttccatattcgtttcgcagaatatcggcgccgccaagcccgagcgcatcaaaaaaggcgtttttgccgggcttggaatgatttgcgtgctgaccgtcgtaatcgtgccgcttatcatgatatttgcctcgccgctgctgtctgttttcacggacggcgattcgggggcggcagtcatcgaaatcggcagaagcatgattatgcttgtcacgcctttctatttcttcgccatggtaaaattcatcaccgacgccgtgcttaaaggttcgggagccatgttgggctttatatctgccaccatggcggacctcattctcagggtggggtttgcatacgtattctcttatctcatgaactcttacgtcggaatatggtggagctggcctttgggttgggttgtgggcgccgttgtttccgtgctgttctacttcttcgggcactggaaaaagcgcgctttcggcgtcaaatcatccgcgtcggactttgcaagctcgacggcggccgcttgcgatagtacagaaattaatgaaaatttcgtttcgtcgaataatgatggcgcaaataaatcggataaagaaaacatcgctgaaaagtaa

SEQ ID NO: 1404 - DNA, 1899 bp, unclassified Firmicutes
atggaagaaaaaaccattaccgaagattcaaggaaaaccaaagtttccgggtcaggacaaaaaactttggctgttaaagaaaaaggcacagttacaaccaagaaaaaaggcgaagcaaccgttaaacccgacggaaaagtcgctgtaaagacaaaaaaggaagtagcggtccgcgcaagcggtcaggtggccgtaaaaaaacgcggtgccgtggtcagtaccgttcagccgcccgtgccgccccaaaacgccgaagaagtcgtcgttaaggaaaaaaaggcatcgggtgccaaaaagtccgcttccgtaaaagctgaaaagaaacctgcggaagaggttaaaacaaagaaaaaaggcaggacggcaaaagcaagtgacgcggcaaaatcggatacggtttccgcagcttcttcaaagaaagattccgaaaacgcagaaaacaccgtaaaaacgacgaaaaatcaagtcaagcacgttctttttgccgcgtcggaggcatggcctttcgcggggacgggcggactcggggaggttgtcggctctcttccgcgcgcactcaacaaattgggtacggtggaagcccgtgtgattctgccgctttatgaaaatttccccgcagaatacagagaaaaactttctttcgtccgttcggtaaccgttcctctggcatggcgcaatcagtattgcggcctgttcgaactcgagcacgagggcgtaaaattttattttgtcgacaacgaatattatttcaagaggtcggggctttacggttacggcgacgacggcgagcgtttcgcatttttctcccgcgcggtgctggagcttattccgtatcttgactggcacgtcgacattctgcattgcaacgactggcataccgcgcttatacccgtttattacaagcttttctatcagtaccgcgattcgcttcagggtatcaaaacagtatttaccattcataacatagaatatcaaggacaattttcgcccgacgttatagaggaccttttcggtattcccagaagagagtatatgtccatcgagttcggcggctgcataaatctcatgaaaggcgctatcgattacagcgacagcgtttccaccgtcagcaaaagctacgccggggagataatgagcggcgaatacgctcacggtctgcaaagtattcttctcaaaaacgcgcataagcttaagggaattttgaacggcatcgatacggatacttataatcccgcgaccaacgaatcgcttttcaaaaattacgacgccgatacagtggacgaatttaagcccgaaaacaagacgggacttcagcggctgctgaatttacccgcggaagaaaacgtgcccatgatagccatgattacaagacttgcttcccataaaggcatagacatcgtaaggtctgcgttcaacgaaatcatgaaaaaaggcgtgcagttcgttgtgctcggcacgggcgaaccggaccacgaaaactttttcagacatatgcagaacgtttacggcaaccgcgtgcgcgctataatttcttttaataaagacctcgcgcagaaaatttacgcaggcgccgatatcttccttatgccgtctaagtccgagccctgcggcttatcgcagatgatggcgatgcgttacggcacggtgcccatagtgcgcgctacgggcggtcttaaggactcggtcatcgattgcggcgacggcaaatcgggcaacggattctgcttcagcggttatgacgcgggcgaccttctttacgccgtggaccgcgcggtgggactttatcgcgattactcggatattttcaaagggctgcgccgccgcgccatgaagtacgatttcagctggggaagaagcgccaaagaatacgacgaatactataacgaagtactgggctga

SEQ ID NO: 1405 - DNA, 1824 bp, unclassified Firmicutes
atgaaaaagtttatttgcgttatattcgcggctattcttttcagcgtgacccttttcggttgcggaggagtcggaaacagcaacgtaaagttctgggtttacggcgacgagtcggagctggaagtttacacaatcatgaccgaagagtttaacgaaacttacggcaaggaaaacggaataaaggtggacatttccaccaagccgccgggaaattacgaatctcttattcagaccgtttccacctcgaaaagcggacccgacgtctttctgtgcattgaggacaactttaaaaagtgggtcaatatgggttttctgacggatatgacgcaataccttgacgcagttaacgacatcgacgtaagcgatgtgtacgccactacggtggacagactgcgctacgaccgcgaaaacaacacttccaattccgacgatccgctttacggtttgccgctggataccaagccctctgcgctttactacaacgaaagtatgtttgaaaaagccggaatcatcgtaattagcgtggacgaagagaatctggacgcgtggaatgacggaaaagtcgcggacaaccgcggcaaaacgcgcgctgattacgaagccgagcatcccgagcttaaaggagttacggtcccgaacaagggttattaccgcagcatatatccatataccgtggacgtgggctggacgtaccccgacgaaaacgaagtgcttgtattcaacaactgcattgcgatgaactgggacgaaatcgaggaccttgcgatgctgttcactccctcttacaatacaagtgcggcggcggaattcggcaccgatttcgggtattttaccgagtggtggttcaattacggctggtcggtgggcggcgactgccttaccgatttatcgggtaacggcgactggaacttttcgcttctggattacacgcccaactttatggtaacgggcgaaagctatacgggcgcttataccggtaaaacttatactaagggcgaaacgcttgagcatctcgacaaactcgatattcccgcaggcgaaatcatgacgcccgacaacgaaggcggctatacatataacggtcaaaaaataggcattcgtcagagcgtgacggaggcggccgaaaacgggacgcttaccgcgcttccctccacgagagaggcgtttacccgttatcttaagttgggggcggaaaaaaccgcagatatagaaggcgagggcggacttgcgatttcgcccaatccccttaccttttccacccgcacgagaatgaattatttttattcgggcaaaatggcgatgctggtggattactcatcctatatggctaccgtcagcgagcaggccgaagaacgcggattcaagtgggatatcgctccgcttgccgtttacaaagaatacgtcgatcctcttgatcccgactgcgacgaaaccgtagtagtgggaaagaccgcggggcagtccaactccaaggccatggtcagccgcgaaaattcgcagaacaaagagtcagcggcaaagtttattaaatggatggcaagtaaagccggtcagaccatacgcgccgaaaacggacatttccccaaccagaaggaattgatatcccgtgtagtttttcccggatacgcacccgcaaacgtaaaagctttttccgaagcgctggaattccaaggcgcgggcgactggtggtatatggcggattacgagtggataaatgtctgggcggttccgcttaactccgaagtgcgtaacggcaagatgacatatgacgcatggcgcgcagacgccgtaaacgacaccaacgaaagacttaagctttattga

SEQ ID NO: 1406 - DNA, 1776 bp, unclassified Firmicutes
atgcgcgtcgagttttttccgtgtgacgaaagatataaaaaccccgtcggcggcgtggaggtaaacgccgattttaccgtaagcgcggtttgcgacgaggcaaacgaagcttacttcgtgcttaccaaggaaaacgaaacccccgtgcgctatccgatgaaggattgcggcggaggaaagttttcttttaccatgcgcgtcacatcctccggactgtatttttatcatttcgcgtttgtcgtttcgggcaaagaaagaaaagttttcgcaaacgaagacctttgcgcgtccgaatcgggtaaagacgagtggcagcttaccgcttataaaagccgttaccgtgctcctgaatttttacgcggcgggattttttatcagataatgcccgaccgtttcaacaggggcgggaaaagatacaaaaccaagaaaaacgccgtataccgcgaggatacttctgtatgcccgtattatcttcccgacgaaaacggaatagtcagaaacaacgatatgttcggcggaaatttggacggcgtaaccgaaaaactggactacttaaaatcgctttcggtaaagtgcatttatctcaatccggttttcgaggcggcgtcaaaccataaatacgatacgggttcttaccgcagggtggacggcgatttcggcggtgaagacgcgcttaaaaaccttataaaagaggcggaaaaacgcggaatcaaggtgattctggacggagtgttttcccatacgggcgacgacagcgtgtacttcaaccgctacggaaactacgattccgtaggggcgtatcagtcagaacacagtccttatttcgattggtacgatttcaatgcgtttccttccgattacaagtgctggtggggaattaaaatcctgccttgcgtaaacgaaaccaacgttcgctacgacgagttcataaacggcgaggacggtattataaggtattatatgcgcatgggaattgccggctggcggctggacgtcgcggacgagcttcccgacgcgtttatcgataatctcactcgcgcggctaaaagcgtaaaccccgaagccctcgttcttggcgaggtgtgggaggacgcttccaacaagacggcttacggcttcagacggcggtatcttcagggcgctcagctggacagcgttaccaattatcctttcaaaaacgccgtaatcgatttcgtaaataccggcgacgcaaagggtcttaagcgtaccgtgtgccgcgtagtcaacaactatccgaaacgcgttctcgataatctcatgaattttttggggacgcacgatacggtaagaatactcaatgcgctttcctcggattccgtgcctaaggaaaaatccgctcgcgcggattataaaataagcgaccgcaaacttgcggtgcaaaaactgaaagcggcggcggctcttcaatacactcttcccggtgtgccctgtctttattacggcgacgaggcgggcatggaagggtacgaggacccctttaaccgcagatttttcccttggttaagtcgggacgaaagccttaccgattattatcgcgctttgggcaaactgcgtgccttaaaggagcttaacggcggaagcataaaaataataaatgcggaaaaaggcgtgttttcgtttgtgcgcggcgcgtctttgaaaatcgtgtccaacatgggcaaatgcgcatatgaattaagtagtgtggttaccgatcttattacgggtgaggagttaagcgttctttcgccgctgaagacgatagctttttattga

SEQ ID NO: 1407 - DNA, 1101 bp, unclassified Firmicutes
atgaagtctgtatccgacagtaaaatattattctggctgtcgctcggaggtattacgccgagaaagcaaaccgaacttattcgtaagtgcggttctttgtctgaactttgggaaagttttgccttcagcgaaaagcttaaggaatttatcggagaaaaagcttttgcttctttaaataggtttcacagtgacgatttcataaatttgtgccttgaaaaactgcgcggcgaaggaataaacgtaattaccgcgataaatccgttgtttccgaaactattgcttcagcccgaagtcaacgcgcctttggttttgtattatcgcggtgacataaacgttttcaaaaccgaatgcgttgcggtagtcggtacgcgcgcttgttcatcttacggtaagctaatgtctaaggttgtggcgggcgagcttgccgaaaacggagtaaccgtagtcagcggtcttgcgacgggtatcgacgcgtatgctcatgccgcggcattggacgcaaagggcaaaaccatagcggtgatggcgggaggacttgacaaaatcactcccgtttccaacctgaaactttacgagagaatattgtccgaaggcggtcttgtcataagcgaacatactccaaatacggaagcgacgaaatattcttttcccgaacgtaacagaattataagcggattaagccgcggcgtagccgtaatcgaggcgggcgaaaagagcggcgcacttatcaccgcaaggcttgccgccgaacagaatcgagaggttttttgcgtgcccggcaacgttacttcctccaaaagcaaaggctgtcttgacttgttaatggatggtgcaaaccttatcagaaacggcaaggatattctggaatatctttcaataaagccgttaaagcaaaaaacaaaatcggaaattattgttgacaaagtcgaaaaaaaagtatatagtcttttggaagcaggcataaaatctcttgacggattgattgaggaatgcggaatcgggcctcaggagcttatgcgggctttagttaatcttgaactaaacgatttgatagttcgcgacagcgctaacacgttttcgttaaaaaaacctgatttgtaa

SEQ ID NO: 1408 - DNA, 1146 bp, unclassified Firmicutes
atgaaacctgtttttgggaaaagcgccgtttttgccgtgcttgcggcaattgccctatgcgtgttttttgtatttggagccataggaagggcttacgcttttacgggttctgccgagtgtatgatagtgcttgaaagggattccgggcgcgtcctgaatgagaaaaacgcagataaaagacatcctatggcaagtactaccaaaatagcaaccgccattacagttatcgaaaacgttgcggacctcgataaaaaagttaaagtccccgcatgtgccgtgggtgttgaaggctcttcgatatatctggaaaaggacgaggaactcagtgtgcgcgacctgctttacggtcttatgcttcaatcgggaaacgactgtgcagtcgcccttgccgtaacggtgggaggaagcgtggataagtttgcggccatgatgaacgaaacggcagtaaaagccggagcggaaaatactcatttcgtaaatcctcacggacttcacgacgacaatcattacactaccgcccgcgatcttgccaaaattgcggcatgcgccatgaaaaacgaaacttttagaaagatagtttctactaaaaggtatacaacgtcatggaaaggacacgattatgaccgtgttatagtaaacaagaacaaaattctgtctacttacgaagggggcgacggcgtaaagacgggttataccgttaaggcgggcagatgccttgtggcaagcgccactcgcgagggtatgaacgttattgcagtagtattgaactgcggacccatgttcgaggactgccgagctcttatggacgaagccttttcgaattttaaattaagaaacgttaccgacgccgtaggagaaaatttatattcgcttgtaaccgaaggaaaggccgaaaacgtaaaactcggttgtaaagataagttttattatcctttaacccaaaacgaatacaataatctcagatacgaaacggaaggggtaaagcctatgcgcgcgcccgtctgtgaagaggatgaaaacggaaaaattaaaatttattcgggtaatcggttgctttttgagacgaaattgtatagtatagaatcggttgagccgctttcggtcgcagacagactgggcgatatcgtaaagaggtggaacagctaa

SEQ ID NO: 1409 - DNA, 1806 bp, unclassified Firmicutes
atgggaaaaataattggtatagatttaggtacaactaactcgtgcgttgcggtgcttgagggcggcgaacccgtcgttatccccaactccgaaggcgcaaggacgaccccgtccgtcataggctttgcaaaagacggcgagcgtcttgtcggtcaggtggcaaagcaccaggcggttgccaaccccgaccgtaccgtcatttccattaaaagggaaatgggtaccgaccacaaagtaaaaatcgacgacaaacagtattccccgcaggaactttccgcaatgatactttcaaagcttaaagcggacgcggaaagctatctcggcggcaaggttaccgaggcggtaataaccgtccccgcatactttaccgacgctcagcgtcaggcaaccaaagacgcgggcagaattgcgggtctggacgtaaagcgtattataaacgagcctaccgcggcggcgcttgcatacgggcttgacaaaatcaaggaaggcacgcagaagatatttatttacgaccttggcggcggcactttcgatatttccattttggagataagcgaaggcgtgttcgaagttattgccaccgcgggcaacaataaacttggcggcgacgatttcgaccagagaataatggattaccttgtcgactctttcaagaaagagcacggcatcgacttaagcaaagaccgcatggctatgcaaagacttaaagaggcggctgagaaggcgaaaatcgagctttcgacgcttaacaataccaaaatcagcctgccctttatttccatgggagaatccggtcccgttcacatggacgttgacctcagccgcgctaagttcgaggcgctcatttccgacctcgttcagcagacggtagatttgacgaagcgcgctttgtccgattcgggcttcagcgcaagcgagatagacaaggttattctggtgggcggctcgacccgtgtgccctgcgttgtggacgccgtaagaaaagtaaccggcaaagaaccgtttaagggaatcaaccccgacgaatgcgtggcaatcggtgcggctattcagggcggcgttctcggcggcgaagtcaaagacgtattgcttctggacgttacgcctctttcgttgggtatcgaaaccatgggcggagtgtttaccaaacttatcgacagaaacactacaatacctaccaagaaatctcagatattctcgacggcggcagacaatcagccttctgtggacattcacgttttgcagggcgagcgccccatggcggcggacaacaaaactcttgcccgtttcgagcttaccggaatagctcccgcaccccgcggaatacctcagatagaagttactttcgatatcgacgcaaacggcatagttcacgtttacgcaaaggataagggcaccggtaaagagcagagcgtaaccatcacagcgtccaccaatctctcggaagaggatattcagcgcgctatcgacgaggcggaaaaattcgcggctgaagacaataagcgcaaagaaaccgtggataccaaaaacaatctcgatacactggtgttccagattgaaaaagttctttccgaaagcggagaaaaagttgcagccgacgacaaggctaagcttgaagcggctgtggctaaggcgaaagaagtgctcaaaacggacgatatcgacgcaatcaagaaggaatccgaggaacttcagaagctttcgagcgaagtgtttacaaaactttatcagcagactgcgggcgcaaaccccgacaataacggcaatgcgggcggagacaacgtagtggacgccgaagaggtgtaa

SEQ ID NO: 1410 - DNA, 1488 bp, unclassified Firmicutes
gtggatttcatcagtaccagaaactcccgccgcgtcgtaagcggtgcggaagcggtagtaaaaggattatcggacgaaggcggactttttgtgcccgccttttttccctcggtcactaaggaagaacttgataaaatgctggatatgtcgtatcccgaacgcgccgcgtttattataggcaagtatcttcccgaactcggcgcggagcttaacgaatataccgaaaaggcttattcgcgcttcgacggcgaccctgcgccgttggtaaagcttaacgacgggctttttgtgctggaactctggcacggacccacgcacgcatttaaggacattgcgcttacgttgcttccttatcttctgacgggttccaagaaaaagctgggggaaaaggagcgtactctgattctggttgcgaccagcggggatacgggtaaagccgcgcttgagggattccgcgacgtcgaggggacggacataatagtcttttatcccggcgacggcgtaagcaaactgcaaaaactgcagatgatgactcaatcgggcaaaaacgtctacgttgcggccataaggggtaatttcgacgacgctcagacggcggttaaaaaaatatttaccgacaaatccgtcgcggaaaaactggaagaagcgggttacagactgtccagcgcaaactccataaacttcggcagacttgtcccgcagatagcctattatttctcctcttatctcgatatggtcaacgcaggcgagataaataaaggcgataaagtgaacttctgcgtgcccagcggtaacttcggcaatattcttgcaggttattacgcaaaacgcatggggcttcccgtgggaaaacttatctgcgcgtctaacaaaaacaacgtgcttaccgactttataaagggcggaacatactcggtcaaacgcgaattctttaagaccgcaagcccgtcgatggacattctggtaagctcaaacctcgagcgtcttgtgttcgaactcagcggcagggatgacaaactgaccgcttcgcgcatggacagccttaaaaaagaaggagtctattccgtttcggacgaggagcttaaaaagcttaaagaggagttttacgcggattggtcggacgaaaacgaggtttttgaaaccctcagcgattatttcgatgaatacggttacattgcggacactcacacatccgtggcgcttgctgtctgcgacaaatacgtacgcgaaacgggcgacgaaaacaagaccgtggtggtttccaccgcaagcccctacaaattcgtcgcggacgtattaaaagcgcttaatgaaacgcccgccgccgacgagcttaaggcaatgcgtcagctggaggagcttaccgcgcttccgcttcccgattcgctggcggaacttccgggacttaaaaagatttatacagaccttatcgataaagacgcggcggaaaatgccgtacttacttacgttaacgggaaaaaattatga

SEQ ID NO: 1411 - DNA, 1377 bp, unclassified Firmicutes
catgtaaccgcaagcgacgaattaggctataaaaaaaattatgtcctttacgtcgaacttctgggtaaatacgccaacgctattcttacggacagcgacggaaaaatcaccgacgcgcttaagcatataggatttgacgaatattccgcgcgcgccgtgcttcccgggcttaagtattccctgccgcccgtacaaaaagacaaaatttcgcccgacgaccgttgcggaatagaaaaactgcttgacaattttacgggaggaaagcttgccgattttatcatggcgcatgtttacggctttgcgcccgtcaccgtgaaacagattgtgtatgacgctttcggcactctcgaaccctcttccgccgtcgttaaagaggacaaagaaaaatttttcggcgcgcttaaagcgattaacgacgcttttgaaccgtgcgttacttattcagacggcaaaattaaggaatgcttcataaagccttatacccacaacggtgcggaatatacgccttgccgctcgctgagcgaagctatagactcgctttataaatcgaggaccgaaacgggatttgtgagcggaaaaaccgcaaatcttacgtcagtcattaaaaacgctttgaagaaaaacgaaaaaagtcttgctttatacaaagaaaaatcgcttaaaagtctggattacgaagacgacaggataaagggagaactgcttaccgccaacctataccgccttaaatcgggtatggacaaggttgaggtagacaactactatacgggcgaaaaaaccgttataaaacttgaccccctgctgacgccgcaaaaaaacgcgcaaaagtactataaatcttattccaagaaaaaaacggctattgaaaagtccgaggaacaaatagccgcggccgaggaaaaacacgagtactacgaatctctgcttgcttccttatccaacatcgaaaacgaatccgacgtggaagaaattgtggcggaaatggaaaacgcgggacttataaaaaaatccaaagacaaaaaacgccgtaagccttcttctccgatttgtcttaccgtggacggattcaaagtccttatcggcaaaaacaacatacaaaacgacgctttggtgaaatcttctaacggcggctggctttggctgcatactcagaagatacacggctcgcacggggtaatacaaggcgaaaacgtgccgcaggacacgataaaccgcgttgccgcatttgtggcgcattactcaaaggcaagcatgtccgaaaacgtacccgtggactacaccttgattaaatacgtaaaaaagcctgcaggctcccctcccggcaaagtgatttatactcatcagcaaaccgtaaacgtaaaacccgtcaaaccgtaa

SEQ ID NO: 1412 - DNA, 2004 bp, unclassified Firmicutes
ttgaaaggagaggcagggaaattcatcatgaaaaaacaaagagtcaacaaaacaaaaaaagaatttgtcaacaaacgcggcggtaaaaagagtccgattgctcgcgccgcgcgcaggaaaaacaataattttgccttggacgcaaaacaaactcttgtgggtttagttcagggcagcggcaaaggttttgccttttttataccgtccgacgagtcgggcgatttgtttatcgccgcaaaaaatcttaacggcgcgatgcacggagatactgtggaggcggtgaaaatttcttcacgccgcggcaacggagaggcggaagtggtcaggattatcaaacgcggatttaccgacgtcgtaggcgttttcgacggcagatacgtcgtcgcgtcggagcgcggcttcggtcagattaaagcggataaacacggctcattaaacgctgaggcgggagataaggtggtggcaaagcttataaagggttctgacccgctgaaatgccgcatcaccgagattctgggtaaagaaggggatatttacgccgacataatgggcgtaatacgcgccaacaagctgtacgagacttttcctcccgcagttataagggaaaccgccgccatgcccgacgaagtaagaccggaagacgttaaaaaccgtcgggatttccgcggcgacgacacggtgaccatagacggcgctgcttcaaaggatttcgacgacgcgatttgcgtggaaaaaaacaaaaagggctaccgtctttacgtccatatcgcggacgtggcgcaatacgtgacggaaaacaccaaaaccgacgccgaggcgttcaaacgcggcacaagcgtgtattttgccgacagagtgctgcccatgcttcccgaaaagctgtctaacggaatatgctcgctgaacgagggggtggacaggcttacgctttcgtgcatcatggatttcgacgaggacggcaacattctttcgcatgaaattacggagggcgtaatacgctcgaaggcgcgcatgacctacgagtcggtgcaaaaaatactcgacggcgacgaaacggaacgagagaaatatgcgcggcttcttcccatgctggactccgcggcggagcttgccaaaaagcttaacgcgctcagaatgcagcgcggctcggtggagttcgatatcgaggaatgtgaaataatcatgggtgaaaacggcaccgtaaaggacgtgagaaagcgcgcaagactgttttcccataagcttatcgaggagttcatgcttatcgccaacgaaacggtggcgcagcacttcagtaaacgcaacttgcctttcgtttaccgcgtacatgaagctccgcccgaagaaaaagtggaaaaccttaacgcatttttagacggattcgggcttagcgtgcctaataagcctaagcctgacgattacgcaaaacttatcggaaatctcgaagaccccattaagggaatagtaaaccgcgttgctctaaggtcgatgtctaaagccgaatacaaacccgcgtgtcttgggcacttcgggctggcggcacaatattactgtcacttcacctcgccgataaggcgttatcccgaccttgcgattcatcgaataatcaaatatgttcttcacggcggcgccgaccccgataaaaaattcggtaaattcgcggaagaagcatccgttcaaagcagcgagagggaaaaaatcgctgacgaagccgaaagaagcgtcgacgaccttttaaaagctaaattcatgaccgataaagtgggaagcgtgtacgacgcggtcatcgacggcgttacggagtggggcttgtttgcagaactcgataacggcatcgaaggcatgattcgcgtggaaaatttgccgggcggcggttacgttttcgacgaaaagagactgcttgtttcaaacgtttctcaccgtttccgcattggcgacaaaatcagaatccgcgtggagtcggtttctttcgataaaatagcctttgcgcttgtcgaagattga

SEQ ID NO: 1413 - DNA, 1272 bp, unclassified Firmicutes
atggggacgaaaaaaagcaaaattacatatatggcttttttcgccgcggtaacgtttttgtttgttgccgcggtttacgtatattcgttaaatagcaatgccgccgccgaggaagcttcggtttcggtggaaatgacttttgccgacaagcgggtatattacgaagacaagccgctttccgcgcccgattttactgtcgaaagcgagtttcacgaccgtaggataaacgcgccttattcggaaaaaataaagtgcgtggaggaaaatctttcccgcgggtcatcgcctaaagcggctcttttgtacagttttcctctgctcgaaaaaaaagtcgacgaaatcatgtcagccgtcaattgcgagcccgtggacgctacgataacattcaagccttacgcgcgccccatgttttacatcacgcgcgagcatatcggctattttgtcaacgaacagcgtctttattacgatatttacaatgcgctgaggaaatctccctgtgccggggttaaggtaagcgccgaagagcttgtgcccaaggtaaccgccgaggaacttaaatcctacacggcgttgcgcgcgtcttttacgaccgattattctcattcgggcgaaaaccgtaagcacaacatacgtcttgcgctttccaaaataaacggtaaaactctcaaaaaaggggaagaattttctttcaacaaaaccgtgggcaagcgcagcgccgcaaacggatttcaggaagcgaaaataattctggagggcgaatacgtcgagggagtgggcggcggagtttgtcaggcgtccacaaccgtttacaactgcgcgcttttggcggatatgaaaataacctcggtaagaaatcattcgctggcgccgtcctatatcgcgccgtcgtttgacgcaatggtcaattcgggctccagcgacatgaagttcgtcaacgaaagcgaaggtccgatttttatccgctcatacggtgacgataccacggcgcacgtggagatttacggacttaaaatgccgtataagattgtcaaggaaagcaaggtagtgtcccgcagcgcagtgcccgaggacaaaatgttcaccgacacggaaaacaaatacgtttcggaagatatgctcagcggcgaaaccaaaagagtaagttacggcgcggcgggactctcgtccgaaggatatctttgttattataaggacggtaaacttttcgacaggaaactcataagaaaagacgtatacaggtccgtgcaggggcttgtcgcagtaaagccttaa

SEQ ID NO: 1414 - DNA, 1821 bp, unclassified Firmicutes
atggcaagaaaccgttattacgaggacgaaaaagttacttataagttcagcgcgaagtccgtcaaaaaaactctcaaatactgtattccatacaaaaaaatactgttgtccatgtccgtgttaatggtgattatgagctttgtttcgcttttgccgcccatgattaacacttatatagtggactatgttctcagtaaaaaaggagctttgggtatcgattggttcacgcttgcgctgctattggtgggcgcttatgcgctggtagtaatttccacaaccgttttttcctatttccgcacgctttacatgaccaggacgggacacgcaatcgttcacgatatgcgttacgcggcgtttactcagctgcaaaagcttgctttcgattactacgattcgcgtcccagcggcaaaatactggttcgcgttaccgcttatctcgacgagcttgccgccgttttctccaattccgttataatgctgttggtggacgttttcaaaatagcgataattttgctttggctgttcgtgatagactaccgtcttgcatcgattatactggccgccaccgtacccatgacgctttgtcttgtccttatcaacggcacgctttcccgccgccgccgcagatacagaaacaaacgcagcaaccgcaccgcatatatcgccgaaaacattcagggcaacaacgttaccaaggttttcaaccgcgttcaaaaaaatacccaaattcaaaaagaactcaacaccgaagtcactaaaaaatggcaatcggtgacttacataaacgagttgcactatcccataatggacgcctttttctacataggcttgggcgtggtgtacgtagtcgtcatctacatggcgacgcacggcatgggactgggcagccttaccataggcaaacttataggctttatttcttacatgggcttgctcagtacgccgcttaacgacatggctaacattttacagcaaatcaccatggccaccagcaacctcgaaagcgtgttcgaggtgatagaaacccagcctaccgttaccgacgccgaggacgccggtgaacttcctcccatcgagggcaacgtgactttcgacaaagtatgcttcagctacgagcccggtcatcccattcttgaaaacgtttcgttcgatattccccgcggaaaaatgattgcgcttgtgggacccacgggtgcgggcaaatccacgatagtgtcgcttttaagccgcttttacgaccttgacagcggcaccgtttccatcgacggtcacgatatttcaaaggttacgcttcattctctgcgcactcaggtgggcgtcatgatgcaggacagctttattttctcgggcaccattatggaaaatatccgttacgcacgacccgacgccaccgacgaagagtgtatagccgcggcaaaacttgtttccgccgacgagtttatctccaaactgcccgacggatactacaccaaaacgctggagcagggaagtaaactcagcaccggcgagcgccagcttatctcctttgcgagagtcgtcctcaccgacccgaaaattcttattctcgacgaggcgacttcctccatcgacacccataccgaagaaatgataaaacgcgcgctggatataattctggaaaatcgcaccagctttgtaatagcgcaccgtctttccaccatcaaaaaagccgactgcatattctacgtcgccaaccgcaccattgcggaagcgggtactcacgcgcagcttatggaaaagaaagggctttattataaactcgtaaaatcaaattcggacgcctcggacaaggaagaacagtaa

SEQ ID NO: 1415 - DNA, 1527 bp, unclassified Firmicutes
atgaaaaaatacgatgcggtcgtaattggcgcgggcaacggcggtctggttgcggcgataaggctgctgcaaggcggtgcgaaagtgcttctggtggaaaaacataatcttccgggaggatttgccacaagtttcagaagaggcagatttgaattcgaggcgtcgctgcatgagcttaacgacttcggtacaaaagacaacgcgggcgacgtgcgtgatcttttcgactctttaggagttacggacaaaatcgagtggctgcagatacccgaagcttacagggttatagtaaaatccgaaaagctggacgctaccatgcctttcggtgtggatgattttatcaaaaagatggcgttttacgttcccggaagcgaaaaatccatgcgtaaatttttcgaccttgccgaagaggtgcgtcttgcccaggcatattcaagttccgtaaacggcaaaacggattcgaaagttatggtaagtaagtacggtaatttcgtgaggtgcggctcttactccgtcaatgaagtgcttaaaacgatcaaaatgcccaaaaaggcaatagatattttaagcgcctattggtgctatctcggcgcaaaccttgacgatatgagtttcgtgcattacgcctccatggttaacagatatatcagacgcggcgcaagtatgcccaaaatgcgctcgcacgagatttctctcgctcttgtggacagaattctggaactaggcggagaagtgcttttcaacacggaggcggtaaaattattgcaggataaatcggacggcggcgtcgcgggcgtagtgcttgacgacggtacggaaattgcgacaagacacgttgtggcaaattgcgcgcctcatcttgtgtacggaaagatgatggattcggtatcgcagaaaatcgtgcgcgccaccaacgcaaggaaattcgccggccgcgggtttaccatgtttttggggcttaacaaaaccgcagacgagttgggcgtcgaaaaccacaactattttctttacgatacaagcgacagcgtagttcagtacgaaagaatgaaaaccattgccgataacaccgctcaggctacggtgtgccttaaccgcgcttatcccgaatgctcgcctgagggcacctgcatgatgtatttcaccacgctttatatgtccgacgactggggcaacgttaaacccgaagattatttcaaaaccaaagacaaagtcgccaatatgatgattgaccgctttgaaaaggatacgggcgcaaaaatccgcgacagcatcgaggaaatttcggttgcgactccgcttacttacgcgcgttactgcggtcatcccgagggcgttatttacggatacgaatcgcagtactgggacggccttatgcccagattgcttatgatggacgaggacaagtatgtccgcgggctaaggttcgcgggcggctattcgatgcgtttgtcgggctattccagcgcgtatttttcgggcgatatatccggaagacagaccgtcggcgatatcaaaagggagggttaa

SEQ ID NO: 1416 - DNA, 2007 bp, unclassified Firmicutes
atgggcggcggcagacacgctgccatgcgcccgggcgaaaaagccaaggattttaagggcacgcttgtaaaattactgaagtatatgcgcgtttctttgcctgcgataatactttcgcttttgtttgcggctgcctcggtcgtgcttacgcttaatattcccaaacttttgggcagcagcaccgataaactgatcgaaggctttatgcagcggcagatttacgacgaaacggacgccatggttcgcgacaatcagaatattccttacgattctatttcagcgctggcttacgcggagggaatttccgatttcaatcagctgtttgacgttctggaagaaaaaggcgtgatttccgcttcccggaaagcagaatacgaaaaaagtctgggcgactacgcggaaggcgtgctttccatgagcctttacgagcggccctcaatcgacgttgacgccatcataaaactgcttaccgtcatcacggtgcttattttcgtttcggcggcggtgtcttacgcgcagtcctttattcttgcgggcgtcgctcaaaggacttcttacaggctgaggcgcgacatcgacgtgaaaatcaacaaactgccgcttaaatattacgacggcacgacaaacggaaacgtgctttcctatcttaccaacgacgtggactcgatttccaccacgcttaaccaaagcctttcccaactgataagcagtattaccaccatcgtgggcgtgcttgtaatgatgataagcataagctggattatggcgggagtcgcggtgctgattgtgcccgtttcgcttgcgcttatcgcaacggtagtcaaattcagccagaagtatttccgacgccagcaagccgcacttgccgcggtaaacgggcatatagaggaaatgtacgcgggcaacaaagtcattcagctttataaccgtaaagacgaatccgttgccgaatttgccgtttacaacaaggagcttaccgcaacggcgcagaaatcgcagtttctttccggacttatgcacccgataatgaattttgtgggcaatataggctacgttctggcgtgcgttatcggcggtgtgcttactgcaagcggcaagataaccgtaggtgacattcaggcatttgttacttatataagacagttcaatcaacccataggacaggtggcaaacatcgccaacacgcttcagtccaccgttgccgcggcagagcgcgttttcggtttcctggaggcggaggacgaaaaggaaacgggcgaagcggttcctcagtcggttaaaggcgacgtggaattttgtaacgttcatttcggttacgaccccgataaaatcataattaaagacttttcgtgctcggttaaagccggacagaaaatagcgattgtaggccccacgggcgcgggcaaaaccaccgtagtaaaacttcttatgcggtattacgacctgaacagcggtaaaatcctgctggacggacgggatatcgcggattacaagcgttcggcattgagggaagagttcggcatggtgcttcaggacacgtggctttacagcggtacggttatggataacattcgttacggccgccttgacgccaccgatgaggaggttatcgccgccgcaaaacttgccagcgcggaccactttatccgcacgcttgacggcggttacgactttgtcatcaacgaggaggcggacaatatctctcagggacaaaaacagcttcttaccatcgcccgcgcacttttatctgaccctaaagtgcttattctggacgaggcgacaagttccgtcgatacccgcaccgaacagcttattcaaaacgccatgattactcttatgaaaggacgtaccagctttataatcgcacaccgcctttccaccataacaaacgcggataagattctggttatgcgcgacggcgacatagtggagcagggtacgcatgcggagcttatggaaaagaaaggattttacgagcagctttattccagtcagttcgagcactaa

SEQ ID NO: 1417 - DNA, 1716 bp, unclassified Firmicutes
atgcgaactattttttcatatttatcgccatataaaataaggatagcgttcgggcttttaattaaatccgtgggaacatttgccgagttgtttctgcccatgataatggcgtacatgattgacgaagtggcgcctacggaaaacgtgacgttgcttgtagtctggggtgtaataatgcttgtttgcgcgcttgccgcacttttcggtaacgttatagcaaacaggatggcgtctaaagtggcaagagataccaccgaaagggtgcgtaaggaccttttttcgaaaacattggctctttcggcaaaacaaacggatgaaattaccgttccttcgctggtttcaagactgtcttcggatacatacaacgtacacaactccataggaatgatgcaaaggttgggtatacgcgctcccattctggttataggcggcatagccatgacttttaccgtggaccccgttctcgcgcttgttttgcttgccgtcgtaccttttcttactttggtggtgatatgggtatcgaaacgcggaatagtgctttatacggatttacagcgcgctgttgacgttatggtaaggaaagttcgcgacgattacacgggaataagggtaataaaagcgctttccaaaactgaatacgaaaacgacggtttcaggaaaatcaacgaaaacgtagttaaatgcgaaaccaaagctggagtcactatgggtataaccaaccccgtaatgaatcttttgcttaacctgggaatgactgcggtaatattggtcggagcatacagagtatcagccggtaaagccatggtaggcgaaataatagcatttacttcttattttaccataattcttaacgccgttatttccataagccgtatttttgtcaatctttccaagggcagcgcatcggcaaaaaggatagaacacgtccttaaacgcgaagaagaattgattatgcttcctgaaaaagataaacttttcgatgaaaacgcggtttgttttaaaaacgtatctttcggttacgactccaaaaaccttatactcaaagacattgattttgcagttaaaaggggcggttctttgggaattatcggcgcaacgggaagcggaaagtccacaatagtagctttgcttttgcgcttttacgatgtgacgaaaggcgctgtttatattggcggaaaagacgtaagaagttacgacaagcacgaactatgcaaaaaattcggcgttgtgttgcaaaatgattttttgatggcggcatccgtcaaggaaaacatagatttcgagcgcggaattgacgacgacagtattgaaagtgctgcaaaatttgccaaagccgatgattttatccgttctttcgaggaaggttacgaaagaaaactcagcgctcgaggcgccaatttcagcggcggacaaaagcaaagattgttgattgcgcgtgctttggcggcaaaaccgagtatacttattcttgacgacagctccagtgcgttggattataaaaccgacgctcagctgagaagcgaaatacttgctcattttcccgaaacaacaatcataatgattgcgcaaagaataagttccgtaagatttgccgacaaaattctggtacttgacggcggaaaaaccgcagggttcggaagcgatgaggaacttatggaaaattgtgaagaataccgtaggatttacgaatctcagcacggcggggagaaactgtga

SEQ ID NO: 1418 - DNA, 1815 bp, unclassified Firmicutes
ttaagtgtcatagagggcggctttacttcggcggcggctctttcttccgcaatgggcaaattgcttgatttttccgatgccgaggaaaaaacgcgggagctttctttgtcggatggcagaaatatcgacgcggtttacactaaaactgcggaaataatcggacttttcggcgaaatttatgcggaccgcgctatacctgccgcggaccttacggacattttgcgcgagggcttcgagggaacggaaatttcgcttgtgcccaatctttccgataccgttcagataggcgaaatagggcagttctgcggacaaagacctcgttttgccgtaattgtcggttttaacgacggaatccttcctgctttgtgcggcgacgacgggctgctgtcggacgccgacgcggacaagctggaagaatacaaactgaaactcgagcccaagaccgcgcaaagaaacgaaatctgcagatacgaattatggcattttcttaaggcaagcgaaaagatttttataacgtttaatctttccgacgggaataaaccgtcttttgactttcagctgctgtcttcgaaaaacgacgtcataatttcaaatcacgatgactttgcgcaagagcttgtcttatcgcaggatcctcaaataaccgccgccatgctgggaagctccaaaggcgcgctggaaaccttgttggtcaataaaaagctgccgtttgcttcttcgataaccgccgcgctttctgaagagcactgtaagttcttaaatcgggaagaccgtgccgattttctgtcttcgggaaaggctttgatgcttaaaagccgggtaacttcggtaagtgcgcttcagacctattttctttgcccgtatatgtactttatgaattacggattaaggataaaaaaggcggaggacggtacagtcacccccatagacgtagggcttcttcttcataaagtcgtggaaattttcgtaaacgaaggcatgccggaagatatatcggctttcgtacccgccgccgtggacaaggcggtgaccgagttcgaaaagtacagataccgcgttaacgagcgtattcttataagagtccgcaaggaggcggaaacgctttgctccgtggtaaaatcccagatagacgcgggggagtttaagccctacgccacggaagaatctttcggtaaagaggattccgtgcttcaaacccttacgcttacggagggcgtgaaattaagcggcgaaatagaccgcatcgacgtattcggggattatgcaagggtaatcgactacaagacggggcagacgcgtttttcctattccgacctctatttcggcaaaaaaatacagcttatgatttatatgcgcgttctggagaaaaacggtttcaaacccgcgggatttttctatttcccgttttccgtttcctggtcggacgacgagttttctcacaggctcagcggtgcgttcgactgttcgggtgaactgcttaaagcgttcgaccgcgatttaacgggcgaatataaaagccgtgtaatcgacgcccatctcaagcctaataaaaacggcgaactcgcacttaccaaaaacaaccgcgcctgtacgcagcagcagctttatatgcttaccgagtatgcggaaaaagcggctgacaatgccgtaagggaaattctttcggggtgtatcgcgactttgcccgccgaaagcggcaacaagacggcgtgttcgttttgcgattacgcctcggtttgccgcggtccgcgacgcataagaaaatgcgacggcgcaaaaagagaagatattttcgaggcggtgaccaaattatga

SEQ ID NO: 1419 - DNA, 3606 bp, unclassified Firmicutes
ttgcaaaaaaggaaagaaaggactttgaaattcaagaggatagaaatatacgggttcaaatcgtttgccgacaagtacgaaattcctttcggctcgggcgttacggcaatagtgggacctaacggttgcggcaaaagtaacgttgccgacagcataagatgggttctcggtgagcaatccgcaaaactgttgcgcggaaactccatgcaggacgtcattttcaacggaaccgaaaagcgcaaatccatgtcgtactgtgaggttgcgcttgttttcgacaacagcgaaaaactgtttccttcgcttgattacgaagaagtagtgctttcccgtaaactttacagaaacggtgacagcgaatacgcgcttaaccgtaccccgtgcaggcttaaggatatcgtcgacctgttgcgcgacggcggaatgggcagggaaggttactccataatcggacagggcagaatcgacgagcttttgtcggcaaaaccggaagaccgccgccagattttcgaggaagctgcgggtatatctaaatttaaggcaagaaaagtggattcggagcgcaaattgacgcgcacccgtgataatcttacgcgcattacggacatattggaagaaaaatcccgtcagcttgaacctttgatgaaacaagccgaaaccgcgcgtaaatggttggatatgcgcgacagtcttaagcatcatgaaatcaacacttatattcatcagtacgataccgcttcgcaggccaaagaagtcataaacggcaggcttaacggcattacggaagaaatcgatttaaaacaaaagtcgtacgaggcggcggttgcgtcttacaacgagtctatgtatgaccttaattccatcgataaaaacatcaacgctctcagagaggagctgcttacgcttaccgtcggaatggaaaaacaggcgggcgacatgaaagtcctgaaggagcgtttatccgcgcttttcgaccgtaaccgcagactggaagaggcaaacgaaacgcttgacggaaagtacaccgaaacgcttaaagctatcgaaacaaccaaggcggagcgtgctgagcgtgaaaacttgcttaaagatgcgcgtaccgaagtggaaaattaccgtcagaagtatcttgaggcggtagaaaaacttacgcgtgacgaaaacgacgcacaaaacagcaaacaggctttgatggaggcaatggacaggctggcagacatcaaggcgaatatgtcaagattgattgccgagcgcgacgcgctttccgcttcggttgaagataacgataagcggattgccaacgaaaccgaacttttaaatcgtgaccaatcggaattcagcgagctttcggaagggcttaaatccgtcgcgtcagtcaagaaccaactcggcgaaaaacttcagaatgcatacaaacgcaacaacgagttgcttgtcgaggcaaacgaaatcaccacgaaacttgacaaacttaacgagaaattttacacggcggaatccaggcgtaaaatcctgcatgaaatgcgcgaggcgtatgacggatttgcgttcagtatacgcaatttgatgaacgatgccaaaaagaacgctcagttaaattccaaaatagaaggtatcgtcgctcaacttatcagtatggacgccaaattcgagacggcaatcgaaacggctttgggacagtcgatgcaaaacatagttacgcgcgacgaagacgccgcaaaattcataattgactatcttaaaaaaatgaaatacggaagaattacttttcttcccatgactgccataaaacccagatatctcgattcgcggttcgatcgcgcgcttaaggcggacggcgtattcggagttgcgtcggatttggtaaaatacgaccgcaaatacgacggaataataagaggacttctcggtaatacggttattgtaaataatctcgatactgccgtgtcgcttgctaaatccaccggatacggttttaagattgttacgcttgaaggcgatataattaatcctttcggcgccattaccggcggaagcaagaaaaacgatatagccaatattttcagccacgaccgcgagcttaaggaacttgaagaaacagtaaagaatctgacggaggaaatagctcgtcttaccgaaaagaaggaaaagtgcgcaagcgagcttgattttgtccaatcttcgattaaggatatgcagcagcgtattcacgaagcggaccttcagattgcggcgaaaaccgaggcgaaaaataaactcgatatcgatatcgaaaaccgtaaacgagttatatccgaccttgtttcatcgggcaatgcggataagttgcgcatagaaaagataaatgcggacattaacagcgtcggcgaactggaagaacttattaccagtaaaaaacaaaacgcaaaacaagacgacgaaaccaggcaaaagaaatatgacgaacttaaggtaaaccgcgatgaacttcaggaaaaactgactgcggctcgccttgccgcggcggaactggaaagtgccgttaaaactcttgaaaacgacattcagcgtatgcaggcggatatagctgccgtagcgacggaaatagaaaccaataacgaagaaatcaacgagaacaagtctcagattgccaccattgaaaaaggtattcaatcggacgagcagcgcgacgaaagcgcggacgcaaagagaattgtcgaaatcagggaaaaacttgcgcatctcgattcctataaggaatctttgcaggaaaaagttgcgtctgtggataagaccaggcttgaccttatgaacgaattgcagacgttgcgcgaaaacaagagccgcgaagagatgttgcttcttaaggtcgatacggatatcgagcagatggagcagcgcgtaagagaagagtataatctggaatacgaagactgtttgcaatttaaggaagaaggctacgacgcaaacaaaggcattcaggaaactgcgcgtcttaaacgcgccatgaacgcacttggcaacgttaacgtggacgcaattgagatgagcaaaacggtttccgaagagtataacgtgcttaacgcgcagaaagaagacctggaaaaagccgaaagcgatttgcttaaaataataaaagacctttccgacgaaatgctggcgcgtttcagtactcagtttgcgcagatacgttccaattttatcaagattttcaaggaactgtttaacggtggcaatgctgacctggagcttctggacagcgaaaatcctcttgaagcgggcatcgaaataaaagctcagccgccggaaaagaaacttcagtccatatcgcttttgtcgggcggagaaaaagcgcttacggccattgcgattctgtttgccatactcaagcttaagcccatgccattctgtttgctggacgagatagaggcggctttggacgacgcgaacgctaaccgctttgccaaatatcttcgccgtttcagcgaggacactcagtttattgtaattacgcaccgtaagcccaccatggaacttgccgacagtctttacggcgtaaccatggaggaaaagggcgtaagtaaaatcgtttcggtcaaactcgaagacgcggttgctgccgtgtga

SEQ ID NO: 1420 - DNA, 1620 bp, unclassified Firmicutes
atggagcttattaccgcaaaaacgctgtggaaggattacgacccgagaaacattcctctcgacgaaacggttcttatcacagaatataacgaaaaatattccgtaaaacacgtttatttcaacggtgaagcaacgggcgacggttgcacgcgcatttacgcgcgcgtttatgtccccgcgtccattccttcgggcgcggcggttgtgcttatgaacgatatcgaaacgcctttcgacaccacttataccgaaatgctgcttgactgcggctacaccgtgcttgtccccgattatgcgggtaaacgcaccgagggcaggttcaccatttacccccggtcgcttaaccgcgcggattactatacggaaaccagcggcttttattcgcttcccgacaatcccaaagtttcctgctggtacgtttacgcctcggtcatgctgaggggttacgtctaccttgaaaatatgccttccgtcgacaaaagccgtatctgctttatgggggtacgccgcggcgccatacaggtttataaagccgcttacgtaatgaaagaggcggcctgtgcggtggctttgttcaattcctcctatatcgagggtctggacacggacttcgacgacgccatggtttacaacacgtgtcttgctccgtccgcttacgcacccctcgtaagcgtgcctttttacatcgttgaaagcagcaataaccgcgaaaattcgcttttttataccgacgacctttaccgcgcggcgtcggattcggtaagattttacgtggcggaacactccgacaacactctaaacaaaattcagcgcgacagtatcgtatcgtttctcaacagccgttgtttttcatgcgctccgctgcccgcgccgcccgtcgttaccgccaaaaacagcgaccgcgcgctttattacgaagttaaaataagcgactgtcaggacgccgaagccgttaagctttattatttttacggcaccgaaaagggcgaataccgcaactggtcgcggcttaacctcgagcgcgtgtcggaaaacgaatacatcgctaaagcggacgtttatctgcttaaggcggaaacttcggcttacgttactgtaaaatacaaaaatggattgcttctttcgggcggcatcgaaaccaaaacgccctatcttatgggcgttgccgcaaaggaaatcgtcaaatcaaggcttgtctacgacaccgaaatgggcgtggacgattggcttattaccgaaaatatcaatacttcgggcgaaatttcgctgaaggaaggctctttgggcgtgacgggggtaacaagctccgtaaactcgcttaccactctgaaaataggcgacgtgcacacctgcggggaacgcgacagccttttacagatgctgatttattccgcccgtatgcagacgcttatgataaaagttacctgccatacggaatcgggctacaagacttattttgcgtccaaaaagacggactctttcgacgaatggagtaaaattacgctttccgtcgacgacttcaaatcccccgacggacccatggacgggtgggataacgcggtttcttttaccgtcagcagcgaggatactttgcttataaactcgcttttatggatatga

SEQ ID NO: 1421 - DNA, 2178 bp, unclassified Firmicutes
atggaaggaacaaaggttatcaaacttgacactcaaaacacttcattggtttttaccgtttgcgaaggtaaaattgaaataacgcattacggcaaaaaaatagccgatgcgccgttggtcgattcggaagggaaattttcttttaaatattattggggtgcgtcaaccgacagagttaattttatcaaaatgccttattcgtttgtgggcgacggcagcatgagagaatctcttttgtccgttaaaaatgccgacggctcgtacacaaaccgttttgtatacaaaagccatgaatttgtagacggaggagttcctcttaaaaatttgccgtgcgcgcgcagtgcggaaaaaactttggtggtggagctgaaagacgattatgcggagcttactcttaagcagtattacactgtttttatggacagtgacgttatcgccgtcagacaggagcttgtcaacaacggtaaaaacgacgtttcggttttaaggcttatgagccttcagcttgacgtcagcggcacgtcgcacaattgcgtgtcctttagcggagcatgggcgcgcgaaaggtttcgcaaggatacggtcgtcacagcaggaacttggtccattcaaagcatgggagggcagtcttcggccatattaaatccgttttttatgctggaacgcgcaaacggcgacggagtttatgcttttaatatgatttattccggaaatcacaaagaaatagtggaagcctgcaacgatatagataacacgcgcgttttggttgggctaaacgactattgttttaactggactcttggaaaaggagaaacttttgcctctccgcaggcagtaatggtttttgccgattcggaacagacagtgactactcaaatgcatgattttgccaataagcatatagttgaccccgaatttgcctataaagacagacctgtgcttataaataactgggagggaacatacttcaattttaccgaagaaaaattacttgctcttgccgataaagcagctgaactgggagtggaactttttgtgctggatgacggatggttcggacatcgcgacaacgataaaagttcgcttggcgattggtatgactatacggaaaagataaaagggactttgggcgaacttgcagacaaaattcgtgccaaaggattacatttcggcatttgggtagagccggaaatgataagcgaggacagcgacctttatcgcgctcatcccgaatacgccatgactgtaccaggacgcgaccccatcaggcgcagaaatcagcttatgctcgatttagtcaacgaagaggttcaggaatatctgattaaagagattggcgacgtaatttcaagatgcaaagcttattacgttaaatgggactgcaaccgtcatatgacagacgtttattccaagactcttaaaaatactggcgaatatttccaccgttatatgctgggcctgtatagagtaatttccgcgttaaaggagcgtttccctgcggtactgtttgagtcgtgttccgcaggcggcaacagattcgacttgggtatgctttactatatgcctcaaacctggggcagcgatatgaccgagccgaggcaccgcttgtccatacaagagggtacattatatgcttatccgcagtcttccgtcggtgcgcacgtatcggcatggagcaattcttcttacgaaagtaagtttaacgtggcttgcttaggcgctttcggatacgaactcgatgtcacgaaatgcactcccgaagagttggatacaatgaaaaaacagattgtgttttataaaaaacacaggcatcttttgcagttcggaaaatattacaggctgaaaagcatattcgggaaagaaagacaaagctcctggataatagtaagcgaagataaaagcgaagccgttgctttccttgccgaaacagacgaacttattaacagcgttccctctaaatggcgttttacgggactggacgataacgcgttatattccgtcgaaacaagagttcaggtcaatcttaaaagcgatgttatagttaacggaaaggcaagaggagacgctttgaataattgcgagttctgcttcggcaatatattcggcggagaaacggacagacaggcttgcggcactccgcttgcaacaagactgatttatttcaaaaaaataggttaa

SEQ ID NO: 1422 - DNA, 2709 bp, unclassified Firmicutes
ataagcggcgttccttcttccggtaacgtcaataccgccgttactctgcctgtggctacggcaagcgattctttcgactctaaagtggaagtaatcgttaccgttaagggcaaagacgcttctggtaatcttaccgacgtcaagaaagtcgaacttgacgacaacgattacgccgtcagcgaactttccgacaacgaagttttcgataacgacaaaaacatgactttctatcccgttcgttcgggcgactacagggttgtttaccaggctgtcgacgacaacggaaacaagtccgccgagtggacttataccattacggtttccgacaaaaaggctcctacgcttgtcattgacgaaaccaaaatacccgaaaaatggggctactccggcgtaattaagcttgacggaaacgacgccgctaaagaaaacatcacgctttccggcgaagaccttaaggtaaaattccagttccccgaggcttatgacaatgccgataaagccgagaatctcattctttctttctctataaaggaccccgagtccagaaccgttgtaaacttcaccaacatcaataaagctgaaggcgaaagcggtaccaaatataccaataccgttactaataaagaatacgtcttcaataagaccatggccgactttgcgttcgatttcggcgaatacgtcaacgcaatcaagagcgacagctccaagaccgattacgtttacgagggcgattacgtcgttacctattctgccgaagacgcttcgggcaataggtccaccaagactttcacggttaatatcgtcgaaactttcgaagatacttcggtcgttacggttgaattcaacaacgtcgacaaatacgtgcttgccagcgagaccgaaaccgtagaatttaccgttcccactcccgcttattccagcactaccgacacgaagcttaaccttgtttacgatatctacaacgccgaccccgcttccgaagacgaagcaaacgctctcggtgcagagcttaagggcggagaagtggtggaaatcaaacacgaggcaagaagcgcttccgacgccaccaaagtttacaaagtcgtttacgacgataaatctcttgaaataaccgacagtatcgtgcttgtggctaccgctacttccgacgcgggcaacactgcttccgctaccgaagttgttcctctggttaaaccttccgattccgctatgtttacttccgtgaacattgacaacatcaatcttgaagaagccaccaagtatgacaacgttaagactcataagctgggctatgctgttgtctacggaatttccgccgaaaacagaaaatacgtcggcgtagagcttggcgtcaagactgaggacggcgattatctcaccgacgtttcggctgaggtttacagccccgaaggctccgaaaaaatggtaatccgcaacatttctttcaataccaatgttgcaggcacttattatctcgagctcagagtattcgatcttaacggcaaaagcaccattaacgtgattcccgttactatcgagaaatctgaagcgggcgacggcgacttcagcgcttccgtaaacgtatctaccgcggatatcaacaccaagataatgcttaacaacgaaacgatttccgctcccggaattttcgattacctcactgtttccgacgagggtcagtatcttaaagcactcgttcgtgaaatcagcggcggcagattctccatcatgggcgaagagtttaccgcaatgtccaacggcttctacagcgtaaaggacaaagctgttcttgttgacgctaccaacgttcacgaaaactacgctatcgccaccaccgataaccagactgctcttgacaactatctgtctcagcagacccaaaccggcgagtttaccgtttccgacagctctaccgtttcgttcgagctccagggtgtgatgcctacctattcggttatcaatcctgcggacgaaaacgatatcaaattgcctcttgcaactgcgtttacttccaacggcaatgcagacgaaatcgttctcagcatcaaatctccttccggcagcaccgttacgccttactatatgtccggtgacgccaaagtcaatatggcaagcaacggcataatggttcccggtaccgagtacagattcaaacctactgcaaacggcacttataccgtaacctataccgttaagatgagcggtaaagaggaaagcactttctcttacacgattaaagcaggcgacgttatcgctcctacctttactttgaccgacagcaacggcaatgccgcttctcacgaactgtccgttaaatcgggttataaattcaacttcctctatgtcaaggctacagacgataaggcttccgaaggtaaccttaccttcacgaagaaggttgtcggacccgacggagaagtagtgggcggtaccatcagcggcaaaggcacgacttacgccaacaggacttaccccaccagcggagagttcacgcttgatgcaagcggcaaatacaccgtaacctataccgttaccgacgaagcgggcaacgaatccaagcaggagtttgagattaccgttaccaattcctcgggcggcggcggaatatcgcttgcggcactttccaccatccttatagttgtaggcgtgttgcttatcgtgggcgttgtggtatatctgttcagattccgcagagttaaaaaggactaa

SEQ ID NO: 1423 - DNA, 1323 bp, unclassified Firmicutes
atgaaagaaagagatactttgagaataaacgaatgcggacatcttgaaatcggcggatgcgatacggttgaacttgcgcgtaaatacggcacgccgctttacgttatggacgaggcgtacataaggaaaattgcgcgcggctataccgacattatgaattccgattacggcgacggccttatttgttttgcctcaaaggcgttttccgttaaagcgatatatgaaatatgcaagagcgaaggcctcggcgcggacgtcgtttcgggttgcgagcttcttacggcgcttgacgcgggcatgaatgcggataacatttattttcacggcaacaacaaatctcctttcgagctggaacttgccgtaaaacacggagtgcatgccgtggttgtggacagctttttcgaaatggacgttctggaaagcatatgcgcttcgctcaataaaaaaatcaaggcgcttgtacgcgttaatccaggaatagacgcacatacccaccatttcatacagactacgcgcgtagacagcaaattcggtttttcgattgccgacggtacggctttagaggcgattaaaagcgtttcacagcggccgcatatcgaatttgcaggtattcattgccatataggctctcagattttcgagcttaagccgtttgagcttgcggtggaaaagatgaccgatttcattcttgcgataaagaaggaaaccgggcttaaagtgtcggagcttaatatgggcggcggttacggcgtgacttacaccgaagaggacaaaccgttaaaacccgaagaatacgttaaagccattgtagcaaaacttaacgaatgtatttcggataaaaaaatcgaaaagcccaggcttattctggagccgggtcgttccattgtgggcgaggcgggaattacgctgtacaccgtgggagcaataaaggaaataaaaggcataaagaaatatataagcgttgacggaggaatgttcgaaaatccgagatacgctttatacgaggcgaaatacgaagcggttatggctgacagtatgcgcgaagaaaaaacggaaacggttaccgttgccggaaaatgctgcgaaagcggcgatatgctggtagttgacgcaaaactgcctcgcgcgcaaagcggaaatcttttggcggtgctcacgacgggagcgtacaattattccatggcaagcaattataaccgcaatcccgtgccgcccgtcgtgcttgtatacgaaggtaaatccgactacatcgtcaagcctcagacttacgaggacataatgagcagggacgtttatccctattggtcggaaaggacgaaataa

SEQ ID NO: 1424 - DNA, 1176 bp, unclassified Firmicutes
atggaaggtaaacaggtcagcataaaacagtttgtagctattcagtttttagtcgcgcttgccgtaaaaatgttcatgcttcccgcgttaatgctcagaatagtaggcaaagacagttatatagtcatgggaatctggattgcgtttgaatttataaacctgactttttttctcattaccgcaaaacgaaatccggacaaaacaatatacgatatactcagcgaaactctcggaaaagttgtttcgagaattgtcgtagtgttgttttcttcctttttcgcgacaaaagccatactgattataagcgaaattaaaatgttcttttccgtaacgatgtatgcggaaataggttgggcgataatgataattcctttgcttgtactgcttgcgtcgtttgcgatacgctcgttgcgcgcaatgggccgcacagcggaaattattttacccatagttttaataagtactcttgtgcttacgggcctgttaatcggagacatgcagggcgataatctgatgccggtattggaaaacggatttgcgcccgtagccgaaggacttatcacctttccggtatggttcggcgatataacttttttgctgatttttttgggaaacgtcaaactcggaaaagggtttgtgctggcgacgatgataagcaaactttttgcaagtctgttggtgatgtttttctctaccatgctttttgcaacttatgccaacatgggtacgcttatagattacggaaacaacgtgagtaacatgactcagttcagtctgggcgcgcacgattacggcagattcgacctgcttttttattgcgtgtggatgttaagcgtttttatgaaacttgccttgattttttatttccttacccgtaacgtttcctttgtcataaacagcagaaacaattatgttatagccgtgtcttgcgccgttgccttgtacgttatttccgaattttttctagaaaacgaaaataccgtattcttggtttgtacgggtgttatgaaatacatcgtctgtccgcccgcgtttataatgcccggtttgcttttgttgctgagcgtaataaaatacaaacctaattatcatactcctaaacttttaaacggtaaagaaatcaaggagaagaaaaatggatttaagaactccgaaaaacaaaaccaaactgcttaa

SEQ ID NO: 1425 - DNA, 3279 bp, unclassified Firmicutes
atgtcatttacccgaaaaggagttaataccatgctgaagaaaataaaaacagtccttttaatcgcggcgctgtcgctttcgttctgggcgttttgcgcttgcaccccggaaaccgaaatttttaccgttacggtttcgggcggcactggcggcggggaatacgcgtcgggctcggaatgtaccgttaccgctgtaattgatggtggcagcgaatttttaaggtgggaggaaaacggagtaactgtttccgaaagcaatccttatactttcaccgtcagtcgcaacatcagtttaaccgcggtaaccgagcttaaatcaacaaaagaatataccgttacggtttcgggcggcactggcggcgggactttccccgcgggtgcgtccgttaccgtgaccgctgacgtcggtgcgggcgagaaattcgtcggctggtttacggacggcgtaaacgtatcaagcgacgtaagttatacattcacggtggaaaaagacacagctcttaccgcggtgactgctcccttggcgacggcgggtgcgtttaacggcaagtgggtaagcgcggacaaaactctggacctcagcgacatgacgcttacgggcgcggaggagttctatcttaccgacgcttcgggcgagggcgcggaaaccgtgcttaatgcggttatagacggcgcggcttatactttttcgcttaacaaggacggcagacttatacttaaatccctgtccgacggaaccgaaaccgaatttatgccttatgacgcgcggttcaacgggctttggacaatagaggacgaggactcggatatatatactctttttattcagaaaacagatacggacggtaatttcggctggactcttatcaatgcggacggttctctttacgatgaggatttgcgttacacggcaaagactcggctggttttcgacggagttaaacctgttgtgcaattcgtaagcagcgcaaatatagtttacgttgtgggcgaaaacggttttgtcaccgctcccgacgaaaatctcgtatatattcccgcggacgtcgctttctatgatttttacgtgacgcaaagcggcaggaacattaaactcgatacttccgccaaaaccgtaagtgtggaaggtaaaacttttaattacaacgttacgacctgcgaatacggttcatgtatccgttttatcgctgacaaagaagaatgttttctcgtctattcgactgacggcgccgttctgtacggcacaaatgagcccgaaaatgccgttaaagcggatttgacgtcgcttacgggagaatgggtgggcgcagttaatttcaccgtagacggcgaaaacgtttatatcggcggcgaaagatatgagattaaaggtacggtcaaggaaaacgccgtagtgttttctttcacggcggatgacgtgacttacggactttaccccgtcggctacggtaaaggagttatcgcagttgcggacttaaagaccgataagggcttttactgcgtttccaaggcggttgccgactcatttaaaggaaattacggcgctttaacggtgggcggcgattattccgttacgcttgacggagttgtgaaaaacgcattttttaccgcattgcccgattttgaaaggtcgttaaacgagccctcgggacttgaggatatcggcatcgcggcgctttgtgcggaagagggtttttacctcgtctgggcagaagagggcgtgttggcgttaattgaaaaaagcgaagagagttacattgtttcgcgggcgttttattcggctgacgctacggaaaaactgaaaacttctcttaaagcaggtcttaattccgaaagcgacctttatacgacgggcggaactaatcccgttaccgtttctttggattttgacagcagtcggattttatacaacggcgcgccctatccgttcgaatacggttattatataaatgcggaagctgcagcggaacatacagcattattgtttgaggcgcaaggaaaacgctttgctttgtacagatacttcgagatgccttacgttgtgcttgaaaatctttccgacggcgaaaaacgttcgttcgtttccacggaggaattttcggaaattctcaactcttcgtttgtgctgaaaggggcagttatcgacgaaagcataagttttgccgccgacgggaccctcagcatcaccgaggctgatttttcgcttacgggcgacgctaccgaaacaaatatatgtgaatactctttgtcaaaagacgccaaaggagtctttgttgttacggctgtcacatactcggacggagcaatgttcgaaacgcttatttattgcgccgaagacaaacaaagcctgcaatcggtaaaaggaacttatatccgcacttcagccctaagcaaacttgaagcgataggcgattatttttcgtccgattacgttccggtattcaaggttttgcccgattttacgttcctttacaattacggcgaaagtcttgacgaatattacggcgatcccgaaacgttcgactcggtgtctgtggacggcaacactgtgacagcttcgattagttgcggattcggtgcgtccgcttatacttttaccgcggtttttgaaaacggcaacgttacgctttcggaagacggcgagacggtaggcgaatattttaagccggaaatcgaccccaactgttttatggggacttacagcgtgacgatagaagaagcggggaaatcggcagttaaaaccgtggttgtaggcgccgcaaccgattccgtcaacgccgaatttcagccttttgtgaccgtcgacggagaagaagcgtctgaagtcaaggtatcgttaaacagctcgggtttacatgaactgacgtttgaagttgcggaggatgcgggcgtaaaatgctataccgcggttcttcaaagcggtagaatcggtttttaccgtgaaggggttatttgtcaaactcgtcccgccgttcccgctcccgcatgggatttgtcggtgctttcgggtatgaattccgtctatacattgtccgacgaatacggcgacgagtaccgtcttgactgcgttttcaaagctgacgggaaaattcccgttttccgaattgcggcgaaggacggctcggcagaattgtatcttaccaaatacagcgtcacttattcggcgggcacattcacggtggacgtaagttcgcctttggggttaagcgtgcgtataagcgcgctcgctcagggcggacagtatgacgtgagtttcactccttatcccgacgaagagtaa

SEQ ID NO: 1426 - DNA, 1596 bp, unclassified Firmicutes
atgagtgaagaaacgaacaacaacgttcagcccgaagttcagactcaagagcctgaacagccgcccgtaaaggaaaagaagactttcgggaaaaagctggacaactatttcggcatcagcaaggcgggcagctccatcggtaccgaaatcgtcgcgggtattgtgaccttccttgcgatggcttacatactcgttgttaaccccaatgctattttaagcagcaacgccgctgcgaccgaatggtcttcggtgttccttgcaaccgcttttggcgcggtcataggcaccgttttaatggcttttgtggcaaagatgccccttgcacaggcttctggtatgggacttaactataccgtgggcgcgattttgggcggctcgctcggatttgcggtttcttacggcaacgttatgctgcttgtcctcatcagcggtattttgttcctgcttctgtccgttatcaaggtaggcggcgtatccgttcgcgaaaagatttttgacggaattcccgaatgtgtccgcggcgccattgccgtcggtatcggtctgttcatcgcattcatcggcatgcagaacgccggacttatcgtttccacatatgttcccattaccggcgagggcggagtattcctgttcggtatccccggcacgcttgtcgaccttgtcgctttcaacgcatacggcgcgggcgcttatgcggctgcaggtgcggtggtttgccttatcggccttatcgccattgccgtgcttgagcatttcagagtaaaaggcgccgtaatcttcggcgttatcatcgcaacactcgtaggtatacctctcggcgtgaccaaatggtccgattatacctggaagttctgggaatattttgaaaagttcttcagcttcaactcggcagaaggcggcattttcttctccgcattcaccgagggctttacttgggaagcgggcgctaaggctattatgcctgccatcatgaccgtcatcaccttctgcatgatcgatatgttcgataccatgggtacggttgtcggttgctgcgttcccgtcggtcttgccgatgaaaagggtaagcctttccactacgacggaattatgatttccgactccgttgcgacctgcacgggcgcaatgctcggtacttccaccgttaccacgttcgttgagtccggctccggcattgccgcaggcggcagaacgggtcttaccgcgcttaccacggccgttatcttcctgctttccatcttccttttgcccgtgtttgcgtctatccccggcgcggctgcgtcttcggctcttctttatgtcggttgccttatgcttaagggcatcaaaaacgtcaagatagataccgttaaaaacgctgttcccgcgttccttaccatcgccatgatgccccttgcttactccatcaccgacggcatcggcttcggtattctttcttacgtaatcatcgaccttatcatttatatcgtcgacgctatcaagtatgcggtaaacaagaagaaaggcgctgaaaagcccgtttgggatttgcacgtcgttaccattatcgtggcagtgctcttccttgtttacttcttcgtgcccaccacgttttaa

SEQ ID NO: 1427 - DNA, 1446 bp, unclassified Firmicutes
gtggacaaacttttccgaaagtggacaaaggttgacaaaagcggtaaaaaaaagtataatcaaacggatatgactgaagaaggaaaaacaataatagcgattgcaacggcggcagggcccggagcaataggaatcatccgtataagcggacccgattcgttaaagggagtaaaaagggcgtttacgggttttaaaggagaagtaaagccaaataccatgtattacggcacgcttacggcgggcgaatatacggataagtgtatggcggcttactttaaatcgccgcactcttacacgggcgaggacggcgtggaaatttactgccacggaagtatggccctcatgcagggaatagtgctgtattttatggaaaaggaagggtttgtccaggcggaaggcggcgatttcacggcgcgcgcattcaaaaacggcaagattgaccttaccgaggcggaaggggtttacgacatcataaacgccgaaacggaatcggaaatacgcggcgcgtactctttgcttagcggcaagcttaaagaacggatagaaagtatacagaaacagataatatccgcgcgcgccgacacggaagcggcgcttgattatcccgaagaggacgtggaggagcagacaagcaggcagcttcagataagtcttgttaaaataaaggacgaccttgacgaacttgtaaaaagttaccgcacgggtaaaattatgcgcgacggagtaaaggtagcgcttatcggcagacccaacgccggcaaatccagccttatgaacgcgcttctggggtacgagcgcgcaatcgtcaccgaagaaaagggtactacgcgcgatacattaagcgaaagttacgtttataaaggcgtaaactttatagtgaccgacaccgcgggactcagggaggcggaatcgcttcccgaaaaaatggggataagccgtgcttatgccgcgctggacgagtgcgacgaggcggttttcgtcacggaaaagggtattacggatgcggaaatagaagcgatgtataaaaaattgcgcgacgagggaagaaaagtctttctcgcggaaaacaagtcggatttaacggaaaaaccggcttataaaaccttagataagcttactgacggcaaagccgcgcaaagcgataacgtgatttcggtcagcgcaaagacgggagagggtatagaaaagcttaaggaaaagctgttcagtgcctgcggactgatttcctcgaaaggggcgcagcttaacaacgcgcgccagtacggggcggcgattgcggcaaagacggcgattgaccgcgcgtgtataaacgtcggcacggtacctacggagcttatttccgcggatcttttcgaggcttacgtggctttgggacgcattacgggcattacgggcagcgacgccgtggcggaggaaattttcaaaaaattctgcgtgggcaagtaa

SEQ ID NO: 1428 - DNA, 2286 bp, unclassified Firmicutes
atggaatataccatatcgcttgccggcaaccccaacgtcggcaaaacaagtctttacaaccgaataactcattctctcgaacacgtgggcaactggcacggcgttaccgtaagcgaggtaagcaagactataatgtacgaccaccataccgtaaacatggtggatttacccggactttattctcttaccatttacagtatggaagaggggataacgcgcgacaacgtgctgtcgggcaaaaacgaccttatcgtcagcgtgtgcgaagtaaacaacctttcgcgcaatctttatctcacgcttcagcttttagagcttaacgtccctttggtgctggtcatcaacatgatggacgagcttaaaaaacagggaaaggtgcttaattaccgcaagctggaatcttatcttaaaattcccattattcccatgagcgccaagtatcacagcgacgtgcatcttttgatggacgtttccctcgattatatccgccattttcgcggcaacaaagtaaaacttacttatcttgacaaacttccgcttcaggacgttatgagtataataagcgcaaatgcatcgaatgcgggacttcagccgcggtgggcagccataaaggtgctggaaaaggacgaattcgtgctggaaaaacttgcgcttaacgacgaccagaaaaaagcgttggaggcaatgggcgactggcagtcgaaagtcgcgcaggcgcgatacgagtttatcgacatgattaccgaaggcgccgtatccaaagccgttgtcgacgaacatcgggaaatgcacgagcacgtcagtcaccacgtaccgcttgaaaccgaacccgctaaaagcgaagaaacgctttacgataaacacaagcgttatcacgatcagtataaaaacaattccaaactttatatgcaggcttacagccgcatcgataaagtggtgcttaataaatatcttgcgcttcccatatttctggcgctgatgtgtttgatttttttcgtaacgttcggacttataggcaactggctttcaaatcttctggactttttgattaccaagtttatttataagcctgtgacgaacgggcttacaagcataaactctccgctgtggattgtcaatcttgtgggagagggcgtaatcctgggcgttctgggcgtgctcaagtttttgccgcaggtagtgcttttgttcttcttccttgcgcttatggaagacagcggttatatcagccgcgtggctttcatgacggacgggcttttccgtaaaataggtctgtcgggcagatcggtttttacaatgcttatgggcttcggctgttcggcaaccgcagtgcttacggcgcgcggactcgaagacgatacaatgcgcaaaaaaacggtaattctcactccgttcatgtcatgttcggcacgtcttcccgtttatacggtagttgccggcgcgtttttcgcatcgggtaaatttttggttatcttcggcttgtacattttgggcgcggcggtttcgctgctgcttgccgtaatcttcgaaaaatgggtaaaaaatcttaaaagcggaaagctgtcttttattatggaaatgccgccttaccgaatacccactttcgagagagtcatgcagataatctttcacaacgcaaaagtctttatagtcaaagtgggtactgttgttttcgcgcttaacgttattgtgtgggttctttcaaacttttcgtttacgcagggttacacggcgggcggcgaaaacagtattcttgcgcttttcagcggattcattgctcccgttttcactcctttgggattcgggaattggcgagcggttacttcgctgttaagcggtttcgtcgcaaaggaagtagtagtatcgagtatagaatcgcttggcggagtaggggccgtgtttacgggcgaatacgcttctctttccgcattgacgttccttgtatatacgcttctatacattccgtgtatagcgactttctccgccgaaataaaggaagtgggcgtaaagtgggcgcttttcggattggttctgcaactcgcggttgcttatgttgtcgcgcttttgttccacacggcaggccttgctttcataatcaatcccggcattacggtaggcgttatcgtggtagccttgattgcagttgtgtgcgttgccgtgcttataaacagaatcaaaaaccgcggaaaatgttcttgcggttgcggctcttgttcgtactcctgcgcaaaacgcgacaaaaagtccggggaaaaggacagcgataaggacgggaaaaacaaataa

SEQ ID NO: 1429 - DNA, 1695 bp, unclassified Firmicutes
atgaattttaaggatataatttcggagattctcaaatccgacgagattaaaaaagaggatattttttctgcgcttgcgcccacgccgtcgcttgacaaaggggacgtttgtcttccttgctttaaattcgcaaaaattctgcgtaaaagtccgcaggcaatagcgggcgagcttaaggaaaaaacagattcttcctctcagccgcttataggcaaaaccgcggtggagggcggatacctcaacattttcttcaaccgtgcttttgcggttaaggagatggttaccgctttttcccaaaacggcggcgtaaccaaaccaaagccaaaaaacggcaagacggtttgcatagattattcgtccgtaaacattgcaaagccctttcacatagggcatttgcttaccaccgtgataggcggctctttatacagaatcttcaattatctcggttataacgcagtcggcataaatcacctcggggactggggtacgcaattcggcaaaatgatagtcgcgtatctaaattggggcgacgaccttgacatagaaaaacgcggcgtgcgcgcgcttttagacctttacgtccactttcactccgaggcggaaaaagacgaaagtctggaggcggaaggcagggcgtggttcaaaaaaatcgaggacggcgacagccgcgccttggaaatattcaataagttcaaagacatcacgcttaaggaagtcaagcgagtttacgaccgactgggcgtaaaattcgattcctatgcgggcgaaagtttttacaacgacaaaatgcagcccgtaatcgacgagctcaaggcgaaaaacctgcttaccgaaagcgagggggctatggttgtcgaccttgaaaaatacggtatgccgccttgtcttatacttaagtcggacggcgctacgctgtacgccacgcgtgatcttgccgccgccgtttaccgcaaacagcattacgatttttacaaaaacctttatgtcgtggcttatcagcaaaatctccacttcaagcaggtctttaaggttttggagcttatgggcaaaacgtgggcgtcagactgtgtgcacgtcccgttcggtatggtgagtctggaagggcagggcgccctttcgacgcgcaaaggcaatgtagttttccttgacgacgtgctcaacgaagcggtggaaaaagccgccaaagtcatcgagggtaaaaatcccgaacttgaggacaagcagaaaatcgcatccgacgtaggagtaggcgcggttatattcggcgcgctttcttcgggcaggataaaggaccttgttttctctatcgataaggctttgtctttcgagggggaaaccgctccttaccttcagtacacccatgcgcgttgccgctcggttctttcccgcgcgggagtatcggacgggaaaatcgattacgacgttcttaccgacgatgactcctttacgcttgtaaggcttttgtcgtcgtttgacgacgtggtctctgacgccgcagcaaaatacgagcccagcgtggtttcgcgttatcttctggaccttgcggcggttttcaaccgtttttatcttaattgccgcatcatcggtgaaaagccggacgtcatgtatacccgccttctgattacccgttacgttgccgaagcgcttaaggaaggcttgaaactgttgcttataaacgcaccggacagaatgtaa

SEQ ID NO: 1430 - DNA, 2949 bp, unclassified Firmicutes
atgaaaagagtatttttgtttattctttgcgtttgtcttctgtgtttcaccgttcttgcggcatgcgacgatggaaacaaagacaaaggtacgcttacaattgccgatattaccgtaagcgtcggcgaagaaaaggatatcaatcctgtattttcgattgaagcaggtaagggcgacgttacctatacgtttgagggaaacaatatttccattgaaaacggtaaggtaaaaggtcttgtcgcgaatactgaaactctggttacggcaaagaccgataatcacgaggtagtgtttaaagtaaaggttaccgaaaaaaccattgaccgcggtacgcttacggtagcggatatcaccgtaaacgagggcgctactgttgacatcaatcctgttttttccaccgaagcaggaaagggcgaagttacatacacgtttgacggaaacaacatttccatagcggacggaaaagtaacggggcttgtgggcggcacggaaacggttgtaaccgccacgacttcctatcatgagattacgtttaaggtcaacgtttccgttgtggatcgcggtacgcttaaaatcaacaacataatgatgactgccgacgttaccggtaaaatcaatcccatattctcaaaagaagagggtaaaagcgcgcttacttataccatggagcccgccggaataatcgaaatttccgctgacaacaagataactgtcatcgaccccgagtctatcacgcaaaacgttgagattacggttaccgcaacgggcaaatatttatctactacttttaaggttaccgtaagcgagataaaccgcggcactcttaccgtatctctgcccataggcaataccgaggatcagcttaatacgctgtatgcaaactattcggctcgtcctttaagcgcgacgttctctaaacccgagtttgccgagcaggtgacctattcggttgaatccgcttatcaaagcaaggtcaccatcgaggacggcaacaagataaaagctacgggagatttttccactcccgcaaacgtgaaagtgaccgccgtatcggagaattttactgccgaagtcacgattaaagttaccaacttcaacggcaagaaccatgtgggaaattccttggaccttgaaaacaaggttaagtccagactttccaattgggaaaatctcggtggagaaacgggcggagtcctgtttatgggcgactccttcttcgacacgggattctggtccgatttctatacgacttacagccgtaaaaacgcaattaccatgggcataagcgcaaccaccacaaccgactgggaatatatggttgaaagactcgtttatcccgtagctcccaaagcggtagttattcactgcggaaccaacaacattttcgacgacaaaaagaacgccaataccgtaatcgaagatgtcaagaaactctttgatatggtacatgaaaatcttcccgacgcacaaatctattacttcggtatagagccgcgcgtcggacaagataacagcgcgcccaaggcggcaaacgtcggaatcaaagcttattgcgacgagaacgattggcttacttatctcgattctccgtcctggtgctatgacaatgacggaaacgtaatttcaggcttcttccgcgacggagtgcatccctctcttgaaaattactcgcgttacgtccgggcgcttgaagacgcaggcttagttgttgacgcgtcgcaggcggcaaccgatcctacgattgacgacattacgactactaccgatcagtccattgccaaaaataatacttatcagcttttctaccgcggactgccgcttaccaacaattacgttcttacgggtaaaatcgatattgcggtcgctgccaaaaatccgcacatccagtttaaattcaccggcaacaaccgtttccttatctgggacggcgaaagtttccaaggtaacggcagcatgggtcttggctggcaggtaaacggcactcacgtcagcgatgacgacgatatttatgcctatactcagaacgaacagtttatcgttctgttcaaactggtagttacggacagcaacgcttatttctatttcggtaacgataatgaaggcaccgttacttatacgcttaattccgtgtttgtcaatctgcccgattcgcttacgcttatttacggcactgaaaatatgagcgcgaaattatacaaccttacggcaaagacggctttggatgaccccgacgattatgccgccgcaacggttggcgctgagttcgattattatgaaaatgctcagacagccgtgcccgacggactttacgtcaatattccttccggcgacggactttacgttgtgcgcgacagccagcgtaccgaaggctatatcgattacagttccgcattctatcttaagggcatatctgcaaacaatgatacaggttacgacggaatctcaagggattggcgcgtggtaagcggcggtaccgataaccttacgggtgactttgcggtttcctatgattttgaaatcgtaaaaagaggcacgctcgagtctatcgatgccttaagcgcggaaaacgtttccgctgtcaactggttccatgttgcatcgatttctaccgataacgtatttaacgcttggaaagattatcacgtcctttattggaaaaccagcgatactaccgcaaaagtggcaggattgggcgagggcacaattaccgcacgcgaaggacttaccgacactaagttaagagtggttattgtccgtagcggaaatgttgcatatattgcaataaaggccggcggagagtggacgataaagacttgcgattataccgcaacatccgcttatgtatttttaagtagcgaaaacgtcaacggcaaaatcaccaaatttaccgtttccaaagaggcggcagacgttaccgccgcgcttaccgaaataggtaaaaacgcctga

SEQ ID NO: 1431 - DNA, 1131 bp, unclassified Firmicutes
atgatatatcttgacaatgctgcaactatgcccgtatataaagaagccgtcgacgcgataaacaatgcggttacggcggatttttacaatccttcctcgacgtatcccggcggaataaaggttaaaagacttatttccgcagcgagggctgatttatcttccatgcttgactgtaacccgagcgaaatgtatttcacttcctgtgcaaccgagtcgaataactgggcgcttaattgcggatttaaaaacaacagaggcaatattgttgtgggcggaggagaacattcgggcgtttacgaatgcgcaaaagaactgaaaaacaaaggatttgacgtaaggtttgcaaaaattaattcttgcggacttgtggacaacgattcgcttctgtcccttgtcgataaaaacacctgtcttgtttccgtaatgcatgtttccaacgaaacaggggcgaccaatgacatagcttctttgtcggctggcgtaaaagcaataaatcccaaaataatatttcattcggacggagtgcaggcttttcttaaaaccgattgcagtgtgaagcgtttgggcgttgatctttatagtgtaagcggacacaaaataggcgccccgaaaggtataggagcgctgtatatatcctcgaaaataactttgcgaccgtttattttcggcggcgggcaggaaagcggaatgcgttctgggacagaaaacgttttgggaatagttgcttttgccgctgcagcgaaaaaatttcgcgaagagttcgataatgaaaaaataaaagagcttaactctgtacttttccgcgaacttgagaaaatcgaccgcatgacggttatagcgaaagacgcttatcgcacgggaatgattactgttttttccgcggaaggaacaaagtcggaaataatacagtcgatgtgtgcggatgacggcgtaataataggacgcggctccgcttgttcaagccgtcacggaggcaacagggttctggctgaagccgggtttgacaaaagagtcatagacggagcgttgagattaagtctttcgcccgaaacacaaacaaaagacattgtaaaagccgtcgcggtaattgccgcgaatatagaaaaattaagaggtaacaaaattggatag

SEQ ID NO: 1432 - DNA, 1935 bp, unclassified Firmicutes
atggataaattgcaacgaataaaggagcttatcgcacagctcaacaagtacgcttatcagtattacgtacttgacgaacccactgtttcagataaacagtacgacgagctttataacgaattgcttgctctcgagaaggaaacgggtatcgtgtttcccgattcgcccacacgcagaatcggcggagaacccataaaggaattcaagcctcacactcatcttaaaaagctttacagcctcgataagtgcaacagttttgatgagctcagggaatgggacgccaaaataaagaaaattgcacccgacgccgtttatactcttgaatacaagctggacgggcttacgctttcgctgacctacgaaaacggctattttaaaggggcggctacacgcggaaacggcgaaacgggagaggacgtcaccgcgcaggtgtccactataaaatccataccgttgtccgtgccttataaaggtacgtttgaggcgcagggagaaggcataatgcgcttgtcggcgcttaaaaaatataacgaaaccgcttcggagccgcttaaaaacgcgcgtaacggtgttgcgggcgcgataagaaaccttgacccgaaagttaccgcttcgcgtaatctggacataattttttacaacgtcaattatatcgaaggcaaggacataagcagtcagcgcgaatccattgcatttctcaaagataacggtttcaaaacggaaatgctttttgtctctcaagacattgaagagattatcggcagaataaattccgtggaccgcaaagctcttgattttctgatagacggaatggttatcaaggtggacgatatccgtttaagggaaaagctggggtatacggataaatttccgcgctgggcaatggcgtataaattcgaagcggaggaaacaaccaccgttttgaaagacgtggtctggaacgtgggccgcacgggaaaacttacgccgcttgcttcgcttgaacccgtggagctgtgcggcgccaccgtcagccgcgccacgcttaacaattacggcgacatcgtgcgcaaaaaggttaaaaagggaagcagggtattcgtaagacggtccaacgacgtcattcccgaaattctgggagtggcggaagacaacggcgggactgaaatacaaaagcccgaagtttgtcctgcctgcggcgcgaagcttgtggaggaaggggcgcttcttttctgtcccaacgaaagcggctgcccgccgcaaatcacgggcagaatcgagcattttgtgtccaaagactgtatggacattcgcggcataagtgaaaaatcggtcgctcagctttacgaaaaactggacgtccgttccgtaacggatttatattatcttaaggcggacgacgttgcgcggcttgacggatataaggacaaaaaaatcgaaaacttcatctcttccgtggaaaaaagtaaatccgttcctcttgaccgattcataaacgctttggggatagaaaacgttgggaaaaaaaccgcgcgcgaccttgctttgcgctttaaaagcatgaatgccttaatggacgccgaacgcgaaactttgctggaaatagaagatatcggggaagttgttgccgattctataacgtcttattttggaaaacaccgtgcgttgatagaaaaattccgtgaaatcggaatagaccccaaaattgagcaacaaactgcaaacggagccttttcgggcaaaaaattcgtacttacgggtactcttccgacatatacccgcagcgaggcgactaaacttatagagaatgccggcggcgaagttgcgtcctccgtgtcaaaggatacggattacgtgcttgccggcgacaatgcgggctctaagctggaaaaagcaagacaaaaaggtataaaaataatatccgagaaagaatttatttccttattaaacagttga

SEQ ID NO: 1433 - DNA, 2208 bp, unclassified Firmicutes
atgagtaaaagaaaaacattttccgtgatagcggttatcgtgcttgccgcggtgtttattcttgtcgcggcgtttaatccgcttccttttaacgagaaagcaaccgccgattatctgtcggacgccaagtttacggaggcgggcagcgccagcactctgtatgacctgtccgtcaacgaggaaacgcttgccgtgcgcgtcaccgataaagccacgggcgaaaccgtgcttcaaagcgacaacatcgctcccgacaccgaggaatacgacaacggactcaataccacctgggaaaagaccgcttacagcgccgtcacgatttattacaccaacgaaaaaatttacaagccgcttgtagacttttccggcgtggaaataaacttaagttccacgtccgacggtttttccgcaagagtaaaggttaccgaaatcggtttgatatttacgcttaaagtatcgcttgacgacgacgggcttaccgtttcaatccccggcgactccgttaccgaaaacaaagtcgccaaatatccgcttgtcagcatcaacgtttatcctttcatgaacgccacgcgcggaataagacaggacggctttattctggtgcccgacggcagcggcgcggttatcgaccttacccggaaaaccctggcaagaaatccctattcggcgcgcgtctacggcgacgattacggcacttcgggcgtggtcacaatggcgcagtacggcgacacgcctcccgtcaccgcgggctatcccgtgttcggacttgccgacgaaggcaagggctttacgggaataatcacttcgggcgcggaatacagccgtataagcgcgtatgcaagcggtataaccaccgattacaacttcgtttatcccgggtttatctaccgcgaaagcttttatatgcccgtggacaacaaaggtaccaccgttaccgcgcttcaggaggagcgcaactctttcgacgccgaaatccgatacgacatactaaaagaggcgactttgggcagcatggcggcggcataccgcgacagtcttatcgagcgcggaatgttacctgaaagaacaagcggcggaagcgctcccatgaaagcggattttctgatggcggacaactatgacgacagcttcggaataaagaccgtctgcgccaccgataccgcctttgtgcaaagcgcgtttaaagagcttgccgacgcgggagtttcctccgtggtaagcggacttatcggttacagcaaaaacggagtcacgggcgcgcagcccaaacatttccccgtgggaagcagcggcagtaaagcggattacgaaaatctttcaaagtacgccgcggaaaacaacgtgctgctgatgtccgtaaccgactatctcaaggcgtacaacggcgattacaccaaagcgggcgcgtcttattcgcagaaagaccttgccatgagcctgggtaaaaagattctgtccgtgcgcaactataagcagcagacggaaaacgacgacgattttcttttgcttcaccccaaggcttcggcggaatatttcaaggacgacctcaaggagatttcggatataggcttcggcggtattcagctggattcgctgggatatatgctaagctccagcacgggcaatcttaccgtaagcaggtcgcaaaccatacagtattaccgcgatatggcggaatcggcaagtttcccgcttgcgatagaaagaccaagcgaatatctgtataaatacgcggattacttcgtcaatgcacccatgagcggctctcagtacatgatagcgcttaacaacgtgccgtttatccagatggcgctttcgggttacacggtgttttacagcggctacgtcaatctcaacaagtcgtccgacgatgtgatttcgcttatcgaatacaacgtttatcccgcgtacgtctttaccgagaaaagcgcttacgagcttaacaggacgctttcgggctgggtttattcctctcagttcgacctcataaaggacgaggcggtggcaacctataaaagcgtggactcggcgttaagccgcgtgaagggcgcattgttcgtcgattattacacaacggataacgggctgaaagtttgcgtttacgacaacggcgtcagcattgccgtcaatcacggcgacgccgaagccgaatttgcgggacagacggtcaaaccgcagggtttcgttgttacggagagtgaattatga

SEQ ID NO: 1434 - DNA, 1386 bp, unclassified Firmicutes
atggacaaaatgtgggcgggaaggtttaataaacccaccgcggaagaaacggacgaattcaattcttcaatcggcgtagacaaaaaaatgtacgccgccgatattaagggcagtatagcgcacgcttgtatgctgggcgcgcaaaacattatttcttccgaagacgccgaggcaattacggcagggcttgaggaaatccttgccgatatcgaaagcggaacgcttaagatttccgacagcgcagaagatatccatatgtttatcgagggagaacttaccgcccgtataggcgatgcgggcaggcggcttcataccgcgcgcagccgtaacgatcaggtcgctacggatacgcgactgtaccttgcggaaaagacggacgaggttatgtccgctttaaaatattgcgttgccgtgcttaaggatatcagcgaagaaaataagctgaccgttatgcccgggtacactcatcttcagcgcgcgcaacctgtgacgttagctcatcacatgctggcctattgcgccatgctgatgcgcgatttcgacaggcttgaggattgcaaaaagcatatgtcggttatgccgctggggtcttgcgcgctggcgggcaccacttacccgattgaccgtttttccgtaagcagaatgttggggtttgaagatgtgtgtttcaacagcatggacggagtgtccgatcgcgatttcgttatcgaactttcttccgcgcttgcgataattatgatgcatttaagccgccttgccgaagaggtcatactttggtcgagctgggaattcaaatttctggagcttgacgacgcatactcgacgggttcgtccataatgcctcagaaaaagaatcccgacgttgcggagcttgtgcgcggtaaaacaggcagggtttacggaaatcttatgggaattcttaccgtaatgaaaggcttgccgcttgcatataacaaggatatgcaggaggacaaggagggtgtgttcgacagcgtggaaacggtttgcgtgtgccttaaaatttttgcggacatgatggaaacagcaagatttttgcctgaaaacatgttgctggctgcaaaaaaaggctttataaacgcgacggattgcgcggattaccttaccaaaaaaggaatgcctttccgtaccgcctacaagattacgggtaaactcgttgcgctgtgtatcgaaaaaggctatactctcgacaatcttcccatcgaagaataccgcggcgccagcgaactgttcgacgaggatatttacagcgctgtggatattgtaagcgccatgaaaaaacgtaacgtatacggcggtcccggtcccgaaagcgtagaaaagcagcttaacgttgtgcgcggatttctggaggatgacaatgattaa

SEQ ID NO: 1435 - DNA, 2901 bp, unclassified Firmicutes
atgggtaaatccataaaaaatttctttacccgtaaaaggataattcttttttccacgattgcggtgctgcttatcgccgtcatagtgatttcggttgtaaacggcaggagttacgaatacgattttgcaaaagcttacggcttttataaggaaatcgcgtccgaaggccctgccgtttcggaaatcaccgttacgaccgacgacatgacgctttccggttccgcccaaaaaattcaggacggcgactacggtgaagcagtgtctttgggtgtaggcgactccgtttcttttaacgttgtcgcgcctgagggcggcacttacaacgtttggctggaataccgcatcaccggcagcgaaaacggcgagcaggctatatccatgtccgtcaacggcgaaacaagcgagagcaccggcagcttgcctctggaaaaaagatggcgcaacgaaaacgacgagtttgccaccgattcgctgggaaacgactcgctgcccatgcaggttttcttggacgggtattacaacgtacttctcaacgactcaaagttcagtaattcttacgggttgtctttcgcccttaacgcgggggacaactctttcggcttgcaattgcttgcgggacaaatcaatcttaaaaaagtaaccgttacgcccgcgtcggttttgccgtcttatgccgattacgaccttgcaaatccgaccgaaaaggcaacgggcgaagaaatctctctcgaggcggaaaaacccctttataaaacggacataaccattcttgccgaaagcagcaaggacataaacgtcacgccgtacaacacttataagtccaagcttaacactatcgtttcctccgaggcgggacagcgcgtccgctacgagttcgaggttgccgcggcgggcagatataccatatctctcaattacgccgttaccgacgcaaacaccacggcgttccgcaccgtttatatcgacggtaaagttcctttcggagagcttcagcactatccgctgccttattcggacgactatacgttcgttactctcggcacggataaacctttcgaaatttatctcaccgcgggcaagcacaccatagacatagaggtggacggcgcgcagatgtatgcgattaccgccccgctcgaggaagtaagcgcaagcttaagttctctttatctcgatttgagaaaattggtgggccccaatcccgacaaggacagggaatggattgttttcgattatttccccgaaatagtcaacgacatgaacggttacgtcgacgtcataaacagacaaaagcagttgcttatggagtttaacggcaacgacgtcaaaaaccaggcggctgtatacctcgacgcggctttgcgcagtcttaataaactgctggaaaaacccaacgaaatccccaacaacatcgcgcttatcagcgaaggaacaagttcggtcgtgcagtctatttcttccgccgtcatggaagtggacagcggaaccatgaatctcgacagaattttcattactccctcgggctccgaaacaaagttcaaggtgcgttcgggttttacgaaattctgggaaagcgtcaaatttttcttctatactttcggtgacaattacagcaccgaaaccagcgacgaagttatcgaaatatgggcaaaccgtgctttgcagaacgtaaacctcattcagaggatggcggactccgactttaccgagaaaacgggcataaaagtcagggtttccatgcttaaggacgaaggaaagcttgtgcttgccaacgcttcgggcatcaatcccgacggcgttatcggcataagcaactggattccttacgagctgggactgagggaccttatttacgaaatgaacgaccttgacgggcttaccgacatcatgagtcttatcgagcccggagccatgctgcccgtcgtcgtggacggcgaagtgcttgctttgcccgaaactcaggatgcgaccgtgctgttttacaggaaggacattctggacaaactgggacttgacgtgcccgacacctgggaggacgtcaagaaaatgctgccggtgcttcagcgcaacggtatgaatttctatttgcccgtgtcctcgacttcggcaagtaagtccattgcgatgaccgcgccctttatttatcagtgcggcggctcgctttacggcgaagacggcatgagtaccgccatcgacagcgaggcatccatcgaaggattcaaactgcttaccgacctttatacgatatacggcctgccgcagcaggtatccaactttgcggaaagcttcagggacggctccattcccataggactgggctccatgtcgctgtattcgcagcttcaggtttccgcccccgagcttgtggggctttgggatatctccctttcgcccggagtggagcaggaggacggcaccgtggtaagatggcagggcggcggcgcgaccagctgcgcgataatgaagaaatccgaccagcccgaaaaggtatgggagttcattaaatggtggatgagcaccgaagtacagacctcttacgcgcagcagtgccgcgcaatatggggcaaccagttcgtctgggcaagcgccaatacggaggcgttcgccgcgtcgcctttcgacgacaagcagaagaccgtggtgctggagcagtggaagtggattctggaagttccgcgtattcccggctggtacatgattgaacgcgagctttccaacgcgtggagttacgtcgtcatcgacggcatgaacgtgcgcgcagccatcgacaacgccgcgacgctttcagacaaggaaattaaccgtaaacttaccgaattcgggtatattaaaaacggaacggttgtcaaacagtacaaaatcacaacgcgggaggacataataaattggaccggcaaatag

SEQ ID NO: 1436 - DNA, 1332 bp, unclassified Firmicutes
atgagaacaaccgaaaaaaagaaaaactatcccattctgctgattgcggcggttgccgcgcttttggtgctgagcgccgtgctgattgcaggtaccgtggtaatcaatgccgaaagcgcaaaaaggcaaagtgcgcttgaaagcgtttattcacgcgcgctttacgatatgtgcgacagcgtcaacaatctcgaagtcaatctgtcaaagctgatggtcgcctcttccgaggcggaaagcatacccattataaacgaaacgcttgcccaggccgagcttgccgagtcttctttgtcggcgcttccgctggatatgggtaacatacgcaagacaagcaaatacttcaatcaggtgggcgactggtgtcagtcttattcgtctgccattatgaagggcggcgataccgaaaattttgcgggacaggctgaaacgctttatattgccgcgcgcaacataaatcaaaaccttaaagacatcgtacaggctaccgagggaaaaaagattaccgaatgcgtgggtgaaaaaagactgttgtcgcttgaccttgaattttctttcgaggacatggaaaacaacagcatcgaataccccgaacttatttacgacggtcctttttccgattccaagaaatactgttttcatgccatagacgctcttgaagaaatcagcagcgaacaggctttggaaaaagccgtcaggctgttcggacttaaagacgccgtttataagggcgagaccgacggcaaaacgaaggtttacgagatagagggcaatgcggacggctacgatgcgtatgtgtcggtttccaaaaaaggcggaatgattatcggctttaaccgcaccaaagacgttagcggagttaccttgactcaggaacaggcatgccgtatcgctaccgacagaattcccgaattaggctacgaaaatcttcagcccgtttggtacaacagcgaaaacggcgttggattcgtcaatctcgcgccggtagaaaacggagtaacctattacacggaccttgtaaaagtcaaggttgcgcttgacgacggcaccattttgggctgcgaggcaacggggtactgttccgctcatcacgagcgcgaacttgctcctaccgtttcggaaaaaaccgtaaggtcgctggtcaatcccaaaattacggtggaaaaagtttcgcttgccgtaattcccgacggcgaaacggaaaaattctgttacgaagtttacggtagctacaagggtcttgattacttcatttacgtcgacgccgaaaacggcgctcaggtagacgtgttgcgtgtaatcgattccggtcagggaagtatgataatgtaa

SEQ ID NO: 1437 - DNA, 2061 bp, unclassified Firmicutes
atgattaaacgtaaaatcaaaacgtcgcgtatatggatcgggtttgcgattgtacttgccttgcttatgtgcatcgtttcgcttttatccgcgtcccgacccgcaaacgcgcttaccaccgaaacttcatacaatacctatatcatggggccgcagaagaaattgcttaagtcccaggcggcttacgcccccaaagaactcctgcccataaacaccgtgggcgcggaagatattttcctttacggcgacaaaatttacgtcgcggacgctacgggcaagtgcgttatcgagatgactctttctggcacggttgtaagacaaatcggtttgggcgaggacggtcaaagtgacggaacgtttgtttcgccttacggaatagctatcaaagaggacgtactgtacgttgcggacaagggcaaaagcgcgatagtcaaatacgaccttgccgcgggcgcgctcttaggagaagtcacgcgtcccacgtcgcccctgtacggcgcgcagactccttacgtccccgtcaaaatagcggtggacgacgcgcttaacatgtacgtcgtgggcgagggtaaccccaacggcgtcattcacataagttccgacggcgaattccagggttacctcggcgcaaacaagacgcccacttcgcttaagaccattcttcagaacctgtttttctcagaggagcagaaggagcagtttcttaccaagactccgccgtcgccctcgtctttggtaattgacaaccgcggattgctgtacacaatcacccccggcgacactcagggcgcgcttaaaaggcttaacacttcgggcgtgtccatcaccgaaaccgccgaggaccagaaagtgcgggcgatggacgtggacgacgattacaatatgtattccgtcaccagcgaaggcaacatcgtcatatatgccgattcgggtcagatgctgttttcgttcggcggcgacaacgcgctcgaccgcttcggacggctggtcaatccggtcgccataaaagtggacgcaagctacaatctttacgttctggacaaaaccgtgggcgcaatcgtaaaatacgcccccacggaattctatcttaaagtccataaggcactggggctttaccaggagggctactacctcgaggcggagcccatctggaacgaagtgcttaaggacaacgccaacttcattctgggatacaacagccttgcgcgcgccagcttaaagcacgaaaattacaccgtcgcgcttcagcagttcgaaatagcggaagacagggcgggttacagcgaggcgtactggcagataagaaacgtctggctgcaggaaaacattctgtggtttttcgtggccgtattcgcccttatcgtggttgtcgtcgcgctgaagcagatagcaaaacgtacgaccgtgcttcaacccgttacgggcgcgcttaaaagattccgtaatatcagaatcgtcgaccaggtgctttactccacctactttatccgtcaccccatcagcgcgatagagcagatgagatacaaaaaccgcattaccgtttcttccgcgctggtgctttatgcgctttacgtcattgtgggaatagtgggagtgttctgtcaaggcttcatctggacgggagtggtgtacaacgtaaacgtattcggctcgataataaccatgcttctgccgcttattctcggagttgtgtgcaactatttcgtggcgtccgtcaccgagggcgcgggcaaattctcgcacgtgttcatcgcggcgatatattcctttacgccctacattctgttctatccggttttcatcattctttccaacgtactcacgcttaacgagctggttatcctgcagttcataaacttctttatcgttttctattgcgtgttgctgcttctgatatccatatatcaggtgcattactacaaattcggcggagtggtcaaaaacgtgctgcttaccgcgttctgctttgccatggtggtactgttcgcggtcatcatttaccttcttgtcatgcagcagttcggcttctgggagtccgtcatctgggaggtgtttcaatga

SEQ ID NO: 1438 - DNA, 1545 bp, unclassified Firmicutes
atgaaaatagtgggcagacggcaatcgcatcttttcgccgcggtgataaagacggcgcttgcaataataatatctttggtgattcttgcgcttcagatcgcgttttacgcggtactgcttttaggcatttacaatctttggtttttaaggattttcaccgaagtcatcggaatattggtcgtactcagtctttaccgccgcgacatcaattcaagttacaagctttcctggacgatattcatactcgcgcttccttttgcgggagtggtgttttattttactttcggcggcggcagaaacgtgcctaagcgtaaagccgaaaaaataaacggttaccttaagaccaaggcggtcagcggcgaagagtataaggggctttacagcgccgatccgcgcggcgcgatgcttgtaaactcggtgcgcaacaattcgttttacgacgtttaccgccatacaaataccgagtttttccccgacgttgccgaaaaacacaggcgtatgcttaaggatatcgaggacgcgaaagaatacgtttatctggaatatttcataatttcggacggcaaagttcttgacagcgtgatagacgttcttgaaagaaagggtaaagagggcgtaaaaataaaattcatttacgacgatataggctccaaaaaatgccttaagcgcaagacaaaaaagcgtatcgccgccatcgaaaacctggagctttgcgtttacgaacccatgagccttgtaataaatccgcgcatcaattaccgcgaccaccgcaaaataaccgtagtggacggcaaagtgggttacacgggcggcgacaatcttgcggacgaatacacgggcgaaaagatacgcttcgggcactggcgcgacaacgcggtcagaattacgggcgacgccgtgtacgcgttggaactcatgttttccgaaatctggtttatgtccacgggcgaaacgcttaagctcagggactttgtttccgacgcgtccgcatcgggcttcggctacgtccttcctttcggcgacgggcccaccaatccgcttaatcccgcatatcatttgttcgagtcgcttacggtcgcggcggaaaaatacctgtatatttccacgccctatcttatcatcgacaactcgtttatcaacatgattcagcttgcggcgaaaagcggtgtggacgtgaggattctggttccgcacattcccgacaaaaaacttattttcgcaatgacgcgcgggcactacggcgacatactgaaagcgggcggcaaaatttacgaatacaccccggggttcaatcacgccaaaaacataatagtcgacgacaaatacgcctttataggtacggtaaactgtgattaccgcagtatgctgctgcatttcgagtgcggcactcttataatgcgcgacccgtccgtggacaaaatgcgcgacgattttctgtcggcggtcgcccaatcggaggaaataactttggaaaaatgggaaaaccgtccttttctcacaaagttgtcggagcttcttctcgccgtaatagcgccgttattgtaa

SEQ ID NO: 1439 - DNA, 1137 bp, unclassified Firmicutes
atgaaaaagatttcaaaaatcgtggcattgatcgcaagtttggttttgtgttttgcggtttttgccgcatgtgcgcccgatgaaggcaaggacgacaacaacaataataacaacaacaactctgccgcaagaggaaattatctcgacctttgggataaggctacgggatggacggacgccaactcggtagacgtaagtcccgaaaacgacaacgcgggtctttacgcttacgtcaacaaagacaaaagcactttggaaaatcttaaatccacggttaaagtagataagtttaccgaatacgattccatatactatgctttgggttcggaagacctgtcttcttacaaaaagcttgtggtcaccgcttattcgtcgggcgccacggtagttgccgacggccaggagaggaccgagcctaccaaacttcttttcaaaatagaatctcttccccccatcgagggcggcgaaggcaagtccgaagtcacggtagaactttcttccgaacccaagactttcgaatttgaccttacttacgaagattacgacaaggcaatggaaggcgcgaccaaacttacctttatcgcgggcccgggaaccaaggactacagcgcggaaatcacgtttaccgaaatttatttttccgaccttgctcccaatcccgaacttgtggtaaacgaaaagggttcggtttctctgccccttgtttacgacggcacaagcgaaacgttcaacatcaattccggctttaaggctaacgacggcaacataagcatacttgtcgacaacggcgccaccactttgacggtacccaccaccaaagccgaatgggaatacgtttccaccaagataagcggtaatcttaaaaactttaccaaaatcaaggtagtattcaccgcacccgtgggcgtaacgttcaaaatgaaacttgaaggcgcaagcgccgcaatcgaaacgagcacagacgaagaaactcttaacgccggcacgggagaacaaaagacctgggaatggagcggctttaccgcagataaccttaccgagggtcccgagatgcgcttcctgattttcccctcgcccgggtcgtcagtcaccgaggaatacacaatcgtcatccacgaacttgtattcatgaaataa

SEQ ID NO: 1440 - DNA, 885 bp, unclassified Firmicutes
atggaattcagaaaacttaccgttgacgataaaaaattgtttcaaagttacattgataaaaacgatttgggttgggaatacaattttgcaaccgtttttttgtgggacgttaatgatacaatgatgatggctacagaagacggaattctgtttatttacaatacgttttacaacagtatcgtttttatgccgccgtatatgaagaacgattccgactttcttaaagcggtgggcaaaatttccgaatatgcgcgggaaaagaaaattgtttatcgtttgcgcggattacgccccgaacaggccgcacttttggatgagacaaaatttcttacggcaagcagcagaaacgattacgattacatttataattcggatgaccttaaatatcttcgcggcaaagcttttcattctaaacgtaattttgtcacgcgttttgaaaatacttataattataccgtaagagattatactcccgaagattacgacggtcttatggcgttgtacgaaatctggaaagacgaatcctcgcattcaaccttggaggtggaaaaaaaggctgtggaacgcgcttttaagtatcataaacaacttgatttacgcattgcagttattaaagtcgacggcaaatatgcgggattctccgtttcgtccattgagtgcaacggtattgttcatacgatatttgaaaaggggttaacggaatacgtaggaatatatcaggcgataaacaagtttgccgcgcagagatatttcccggacggaactttcgtaaacaggcaagaagatatggggattgaggggttgcgccgcgcaaaactttcatacaatcccgtaatactttatgaaaaacattttgccgaggagagagccgttgacaccgagtga

SEQ ID NO: 1441 - DNA, 1830 bp, unclassified Firmicutes
atgaaaaagtattttttcgacaatgttatcgtgggcagcggatgcgccgcatataatgccgccgatattttagcgggggcgggcaaggaaaccgccgtggttaccgaggggaaaaatatcggcacgtccagaaacgctggcagcgataaacaaacttattataagctgtccgtttcgggaaattctgcggacagcgtttacgccatggcggaaaaacttttttcgggcggatgcgcggacggcgacgtcgcgttttgcgaagcggcaggctcaatcgagtgtttttataaactcgtaagttcaggcgtaaaatttccccgaaacgaatacggcgagtacgtcgggtataaaacggaccacgacgacagcgttcgtgcgacaagcgcgggaccttatacctcccgtgatatgacggtcgcgctggaaaaatccgcgttaaataacggggcaaagctgttcgacggttttacagtcgttaaaatagttgtgtcggaaggtcgcgcaaggggcgtaatcgcagtagaaaaggcttttgccgacgacctggggttatgcttcttcggctgcaatcacctcattatagccacgggcggacccggggagttatacgaagataccgtctatccgttcggccagtcgggggctttggggcttcttattgacgcgggcgtgaatatgtgcaaccttgccgaatggcagtacgggctttcttcggtaaaattccgctggaacgtttcgggcagttaccagcaggtcataccgcgttatatttccgttaaggacggaaaacagcgcgaatttctgtccgattacacggataaaaacgtatttgaccttatattcttaaaaggttatcaatggcctttcgacgcggctaaagccgaggaaagttcggttatagacattgccgtttattcggaaaagcaaaagggcgcgcgtgtgtatctggattacaccgtaaatcccgacggtttttctttaagtaaaacgggaaaagaggcgcgggattatctcgagcgttgcggagtttacggtaacacaccttacgagcggcttacggaattgaatccgtccgctgcaaagctatttaaagagcacggcatagatttagaaaaagagcctttggaaatagccgtttcggcacagcatcacaacggcggcgcggacgtggacgtaaattacctcacctgtgtaaacgcgctttacgttgcaggcgaggcggcagggactttgggcattacccgtccggggggaagcgcgctaaacgcctgtatggtgggttccatgcgtgcggcacggcatattctttcgcttgaaagccaacctgtcgacacggagagaatgctgcagaaagccgaagccgacgcgcggcaaataagggattttgtgaaaaaatcggtcggagtatccactttaaaacaggaaaaaagttttttgcgcaaactcatgagcgcgcgtttttcgtttttgcgcgacgaagggaaaatgcgcgaggggcttaagactgtggaggaaaaactacttaatttttccttaaacaataaatgcggacaaaacgaaaccgcagagcttttcaaaaattattacgcgcttatctccgcacgcgccgtttgcttaagtatgcttatatgcgcaaccgatgcgggaagccgcggcggggcgcttgttacctcagacggaaaagtcaagcccgaggacctttctttccgggataaaaagctgatatattcgtcgggcaaaactttttaccgttccgtcaggagcttacccgaacccgacgaaactttcgaaaaagtgtggaacagattcttgcgggaggaaaaacaatga

SEQ ID NO: 1442 - DNA, 2514 bp, unclassified Firmicutes
atggaaaaattcgatgtcggcggcatgagttgcgccgcgtgcagcgccgccgtggaaaaagcggtttcgggcgtggagggagtgacttcctgcacggttaatcttttgacggggtcgatgggcgtggagggcgatttcaactccgaaaaagttattgccgccgtggaaaaagcgggatactccgccaaaatcgcgggcggacgggcaaacaaatcggcacaaaacgacgaaagcgacaaaaaatcggtcagagctcttgccgcgcggcttatttcatccgtagcgtttcttttactgcttgtttacgtttccatgggtcacaatatgtggggctggccgcttccgccgtttcttgaaaacgacatggtggcttcggggcttactcagttactgcttgccgccgtcataatggtaataaatcaaaagtttttcgtaagcggattcagaagtcttttccgcggggcgcccaacatggacacgcttgtggcgcttggctcgggcgcggcgtttttatacagcgtttacgcgctttacgccatgagcttttttgtggccgcaggcgacacgacttgcgcttccgcttatgtgcacgagttttactttgaatcggcggcgatgattctgacgcttgtaacggtgggtaaaacgctggaagctcgcgccaagggcaaggcaaccgacgccataaaaagccttttgaaacgcgcgcccttgacggcggtcgtttgggaggacggcgaggaaaaaaccgttcccgtaagccaagtgtcaaaaggcgacgtgtttatcgttcgacccggaggagtggttcccgtcgacggagttgtcataaaaggcgaaagcgcggtggacgagtcggctttgacgggggaaagcgtgcccgtcgacaaaaaaaccggcgaccgcgtttcggcggcgacggtcaacacgggcggatatcttgaatgcagagccgtcggagtgggggaagaaaccgcgcttgcgcgtattataaaactcgtggaagacgcggcggcgaccaaagcgcccgtcgccaaaatcgcggataaggtttcgggcgtcttcgtgcccgtagtggcgtttattgcgcttgtttcgctgattgcgtggcttatcgcgggcgaaagcttcggatttgcgttagcaagggcgatttccgtgcttgtgatttcctgcccgtgcgcgctggggcttgcgactcccgtcgccataatggtaggcagcggtatgggcgcaagaaggggaatacttttcaagaccgccgcggcattggaatcggcggcaaaagcggacatagtggcgcttgataaaacgggcactattaccacgggcaatttctcggttacggatatcgaggcttacggatgcgacgaaaaaaacttgttaagcgcggcttattccgtcgaaagcaaaagcgagcatccccttgccaaagcgatatgcgcatatgcgcgtgaaaataacgttaccgcacttgagacgacttctttttccgcgctgtcgggcagcggggtcacggccattgcggacggtaaaaaggtgtacggcggcaattataatctgataaaaagcgttgtttccgtgcctgaggagtatgcactgcgggcggaagaacttgcaaatcagggtaaaacgcccatgtttttttcgtccgacggcaaatttacgggaataatcgcagtcgcggataccgttaaacccgatagccgcgaggcgatacggcagcttaaaaacatgggtaagcgcgttgtcatgcttacgggcgacaacgaacgtaccgccgcagccgttgccgcagccgtgggcgtggacgagataatttcgggagttcttcccgacaaaaaagaagaagtaatacaagatttgaaaaagcgcggcaaagtcgtcatggtgggcgacggtatcaacgacgctcctgcgcttaccgcagccgatacaggcattgccgtgggtgcgggtacggacgttgcggtggactctgcggacgtagttttgtcaagcaacagtcttaaagacgttgcggcggcgttacggttgggaagagccacgcttaccaacattcacgaaaaccttttctgggcgtttttctataacgtggtaggaattccgcttgccgcgggactgtggattccgattttcggctggactcttaatcccatgttcggcgcggcggcaatgagcctttcttcggtttgcgtagtgcttaacgcattaaggcttaatcttttcaatcccgataaggagcgtaaattaaggacaaaaagcgcaataaaatcagataaaaaatcaaaggaggtaataaaaatggaaaaaactttgaaaatcgagggcatgatgtgcgcccattgcgaggctcgcgtaaagtccgctttggaaaacgtcaagggagtagagtcggcaacggtttctcatgctcatggaaaagcgacggtaacgcttaaaaaagaggtttcttcttccgctcttcaaaaagctgtggaaaaagcgggctataaggttacggaaatcgactga

SEQ ID NO: 1443 - DNA, 2253 bp, unclassified Firmicutes
atgagcctggacttaagcaaacttaacgaagaacagattaaacccgtattggatactgaaggcgcagtgcttgtaactgcaggcgcgggaagcggtaaaacgagacttcttacgcaccgcatagctcatttgatagaggatttggaagttaaaccctataatatactggcgattacttttaccaacaaggcggctaacgaaatgcgtcaaagacttgcctccatgctgggcgataaggcggaagacatctgggtttttacctttcatgcactctgcataaggattttgcgcaagtttataaaaaatctcggcggatattcggctaatttttctatctacggagagcaggaaaaagaacactgcataaaacgcattttaaaagaaatgtctgttgaggacgacattgcaaagcttaccgttgcgtctatttccgacgcaaaaacttacggactttcccccgacgagtaccgaaaagccaattcctggcgcgaatatatagacgtaatagcaaaagtttattacgaatacgaaaaagaacttaagaaatgcaactcgctggattttgacgaccttttgaacaaagcattatatttgcttaagcatgacgatgaagcgcgggattatttccaggaaaagttccgttacatacacgtggacgagttccaggacaccaacacggtacagtacaatctgattaaaatcctgggcgcgaaacacggaaacatattcgtcgtaggagacgaggaccaaagcatttacgggtggcgcggcgcaaattttgccaacattttcgatttcactaccgactataattgcaaggtttataaactggaacaaaattaccgttccacaaaaaaaatcctcgcgcttgccaacaaaataataaagaacaacacgacccgaatggataaggaattgtggacggaaaatgccgacggagcggacgttcagttttatgcggcgcgcaccgacggagaggaagcggactttgtcgtaaaaaacattattaccttaaaaaagagtacgggctgcagatattccgattttgcagtgctgatgcgcattaactctttatcccgcacgtttgaggaaaagctgattcagtacggaatcccgcacaaagtttacggcggcttcaaattttacgaccgaaaagaagtaaaggaccttatttcttatctgaaaattctcggtaatcgcaacgataacgaagcgataatgcgcgtaataaactttcctaaacgcggtataggcgacggaaccgtaaaccagcttgtaaattattcacttgtaagcggacaatcgctttacgacgtaatttacggcatagaaaaaaacgaagatttacccacgggcgtaataaaaaaagtaatgccctttgccaacgttttacagtgcatgcaaaacgcttacgactcgggctgttcgctgttcgaccttgtttgctacattataaaacttgtcgggcttaaagagtactacgccgaagacaccgaggaaaacgaggcccgtaagaataatatacgggagcttgcgcacggcatagaacagtacgaggaagcgaatcccggggcggggcttgccgactaccttcagcagatttcgctttacagcgatctcgacgaaatggatgaagcgggcgactgcgtaaatcttgccaccgtacattcggcaaaagggcttgaattcaacgtggttttcgtcgtgggtcttgaagaggggattttccccgtgtcgcgtaaaaacgattcttcttcggaaacggaagaggagcgcaggcttatgtacgttgccgtgaccagggcgaaacaacgcctatttctgtccatggcacgctcgagattccgcttcggtgaaagacaggattgcctgccttccgagtttctgaaagaggcaggttttgcggattcggtccgtgaaaacaacgcatatcgttacggcggcggatacggaaattacgggtattacaggggagaacgcgcttattcaacttacggcgacggctatacgaaagaggaagttccgttgccctcggcaactcagacggtaaaatcttcttcgcaaagtcagtcccgtcccaaagtcgaccccgcgctttataaaccgggtaccaaagtccgccataaaaaattcggcgagggtaccgtcgtgaagctggatacaagcggagaagcgtatgcggaagtggattttcccgggcttggcaaacttatgctgcttttggcgtatgctccgcttgaaatagtggaataa

SEQ ID NO: 1444 - DNA, 2709 bp, unclassified Firmicutes
ttggatttttccgtaaaggaggcagccgccatgagaccgcttaaacttaccatagaaggcataaacagttttttatcctcccagaccgtggatttcgaggcggcgggggcggataacttattctgcatatcgggcagtacgggcagcggaaaaaccaccgttctcgactgcataattctgtcgctgtatctcaaccactccgagcgcggcaatctttccgattacataaatttaagatgcgacgcaggacgtatagattttattttcgagcttgacggcgaagtttacgaaaccagacgggtcataagccgcaaagcgggcaaaaacagcatgcttctccttaaaggcggcgctccgatggcggaaggcgaggaggcgtttaagtttctgggcgaaaaaatcggactggaagtcaaagagtttaccaacgtcgtggttttgcagcagggggagttctcgcgttttctgaaggcaaagaaagccgagcgcgtcgcgcttatcaacaagctttttgaccttaaacgctttgacggactgtacggaaaattcaacgcccgtcttaaagctttgacggctctgtctgaggcgtgcgacaagtcgcttgaaagtttcgcgcttgtatccgacaagaccgttgcggacaacgaaaaagcggttgccgaaaaagaaaaggaagccgtcgccgccgaaaaggaagccgagattttccgtaaagtcgccgccgaaacccgcaaaaaagcggaagattacgccttgtttataaagcttaaggaggaaattgccgccgccgaaaaggaacttgcggttttatccgagcgcgagcaaaagggcaacgagtataaaaattcgctttccgagcgcgaaacggcgcttaaggcaagggaagaaaagagggatttactggtttcaagacgcgccgaaatagtgcagacagccgaatcgcttgcacagattgagaaaaaagaagccaaagcggcaaatcagcgcgccgaggcggagaaaaaggcgttggcggttgccgaaaaggaagaaaaattaaaaattttgcgcaccgaataccaagccgctcaaaacgaggtggaaaaaattgcgtcggataaactgattggcgactccgttactgctcaaaacgctaaaaccgccgcggcgctgggggcggagaactgccgacgcgatatcgccgacgcgaaaaaggcggacagcgaagccgcggacgcaaaggcaaagcttgccgccgccgagagggacaaaaacgcccttgaaaaagagtggattaatttcaatgccgcccatgccgcgattgcgaaaaacgtcgaaagatgcgcagtattcgaaaaatccgcgcgcgacaattacgaaattgcgatgaaggacaacgctttggcgcttgtgatgaacgggctgaaagagggcgacgactgtcccgtgtgcggcggaaaagtcacccgcacggaagcggtttcgggcgtaaatctcgatattatgaaaaacaacgtagaaagcgcggagaagactcgcaagcaatcggaagcggagctttcaaagtctgccgaaacgctttccgcgcttacggaaaggttatcgggggcggtaaatacggttaaaacgctgacggatgagtgcgcacaaaaggaaaaactttctcaaaaatacgacgtttcggttttgtcaaagcggcttgaagtttacgaaagactgtcgaaagcggtcgaaaacagcgaagtactgtgcaaaaaaaccgaaaatgcggcggcagagcttgccttaatgagcggagaggcaaaatcggctttgaccgcggtagcggaaacggaaaaggaaatagcggaggaaaagctgaaacttaagaccaaagcgggagaaaattccgccgccgaaaaagccgaaatagaaagggaattggaagcgcttaattccgacaggaaaaaactggacgcggataagtccacttgcgaaagactgcttggggaaataaaaagcaagtccgactcgctgaagggaaggattgcttccgccaaggaaaagcttaaggaaaccgctcccgtcaaagaacaagacgctatagaatccgaaacccgcgccgacgaaaaggtcaaagccgcgcgcatattgtacgaaagtcttgcgtccgcccgtgaaaaactgaatcgggaaaaggaggacctggggcgcaaaaaggtgcttatcgccgaaaaagcgggctacgaccgcgaagcggaaaaatttgccgtgcttactaagttattcaacaaaaacgcattttcggaatttgtcgcggcggagtacatcaaggactttacggctgtggcttccgacaagctttcagaccttaccatgggtaaatacaggcttatttacgatgaggagagcggcgaatttttcgtcgaggattttctgtcgggaaacgaaaaacgcggcgtcaaaacgctgtcgggcggcgaaacttttctggcgtcgcttgcgcttgcaatcgccatttcgggagaactcagcaaaaacaagaactacgacttcttttttatcgacgaggggttcggcacgcttagtcccgacgctctcgacatggtgacgaacgctttggaaaagctgtcccgcgacactcttgtgggggttatcactcaccgcagcgaacttatagagcgtattccttcggttatacgggtggaggcggcggacgcggatacgggcagtaaaataatctttccgtga

SEQ ID NO: 1445 - DNA, 1248 bp, unclassified Firmicutes
gttaccggctgcataaccgccgtaatcgtgcgcggatacaataaaattcttcagaagaagtacaataaaatccgccagggtaacgtggaattaagcacttacatacaggaaaacataaacggagtcaggattatacgttgttttgcgaccgaagccgacgaaaccaaacgttttgaaaaacgcaatgcggcattccgcgacaactacgtcgaccttgcgcgaacaagcgccaaatattccatgatatttaccttccttggcgaaacggtaagcatcatgtccataattctgggtatcttcctttccgtaaaaggcaatctcagcgtaggcgaattcgcgactttcacctcttattgctttaccattaactccaacattgtctttatggcagggcagataggaaatattcagaacagcgtggtgtgcgcaaaacgttattttgagtttgcagaccgtcccgaggctgtcgtggacaaggaaaatcctttgcccgtacccgaaaaaccgacgatttcgttcaaaaacgtatccatgagttttgacgacggacaaaaggctttggaccaaataaaccttgaaattccttacggcagaagagtgggtatcatgggcaaaacgggctcgggcaaatccgtgcttatgaaactcatgacccgtctttacgactgtacggaaggagagattctgcttgacggcgtcaatatcaaggatatgtccgtagacgaagtgcgcagaaaatattctttcgtcatgcaggacgtcttcctgttttccgaaagcgttgccaacaacattgccctttacgacgaggacgcatccgacgaaaaggtcgttcattgcgcccaaatggcttgtgcggacaattttgcgaccaagcttgccgacggttacgataccatcgtgggcgaaagagggcttggattaagcggcggacaaaagcaaagagtgtcgattgcgcgcgctcttcttaaggacgcgcccgtcatacttctggatgactgcacttccgcgctggattacgaaaccgaaaaggaaataaccgcaaacctgtttaaaaattacggcgacaggacaatgatagtggcttctcaccgtgcgggcagcgttgcttactgcgacgaaattatttacctcgaggacggtaagattgtggagcgcggtacgcacgaagagcttatcgccatgaagggaagatactatgatatctttaccgagcaggaatcgcttcgagaggaggagattaactga

SEQ ID NO: 1446 - DNA, 1854 bp, unclassified Firmicutes
atgaaaaaatacgaaaatgtttcctttcgcgacgtggatttgaaggacggattttggcttaaaagatacctgcttaacaaaaacgtatcgcttgaaagcgtcaaaaaccgctttgaggaaacagcccgtttcgacgcgttaaggttcaattatctgaaaaacggcaggaaaccgcatattttttacgattcggacgtcgccaagtggatagaggcggtcgcctacattatggaaaaagaccgcgattccatgcgcgaaaacgaaaagtttattgacgaacttattgactgcatggcaaacgctcagcgcgacgacggatatctcaattccacttttcagcagattactcccgataaaatattcagaaaccgcggaaaacacgagctttattgcgcgggccatctcatagaggcggctgtggcatacgacaaggcgacgggtaagcataagttcctcgaggtcatggaaaagtattgcgattgtatttaccgtgcgttcattaaggaaaagacggcggctttcgtaactccaggtcacgaagaaatagagctggctttaatgaagctttaccgttatacgggcaaagaaaaatattttgaaatggcgcggttctttcttgaaaaccgcggaaaacacgacgagcaatatgtttatctggataaccgttacgccagtcaggacgatacggatatctataatctcaaggaggcggtgggacacagcgtccgcgcgctttatctttacagcggggtggcggaccttgccgaagagacgggcgacgaaaagctttttaaggcgcttacaagcgtttttgacgatattgtaaacagtaaaatgtatgtgaccggcggagtaggctctactttccgctccgaaagttttaccgtaccttacgatttacccaatatgaccgcttattccgaaagctgctgtgccatagcttttatactttttgcgctgcgtatgcgtaaaatggaccttaatcccaagtacggacatcttatcgagcgcgtcatgtacaattctctgctttcgtccaccgaccttacgggcaaggcgttcttctacgaaaatcctttggaaatcgcgcttgaggaatacggcagggaagtgtccgcgtctccgacagacaaagaaagattgcccattacccaaagacttgaggttttcgggtgttcttgctgcccgcccaacatcaacaggttttttgcagagcttggtgacgtaattgcgtttgcaggcaacgaaacgctgtatatagagcaatatgtttcttccgatgtcaatacttctttaggcagggtggaaatccgcgaaaactatgctttaagcggtaaagccgaaatatcatctcaaaatttcagcggcaaaaagctggcggtgcgattgccggaatggagcaataaactcgtcgcgacgtcgatgggtaagcccgtaaaatacgaagtgaaagagggttatgcttatttcgacgcggagaaaagcttttcgcttcagctggatttcggcataaaagcggcttttgttgccgcaaatcccaaggtgcgcgccgacgcgggtcgtatcgcattaacctacggtcccgttgtctattgtctggagggggttgataacggcgaaagattaaaccgcatttccgtttctcccgaggcggcggaaaaagctaagaaggaaaaagatttccacggtttgtattccgtaaaattggaaggttttatcgacaaagcagagtccgcactttattttcctgcttgcgacagcgatagggagaagaaaagtcttaagttcataccttattttgcgtttgccaatcgcggcgaaagcgatatgcttgtctgggtgcgtaaagcctga

SEQ ID NO: 1447 - DNA, 2349 bp, unclassified Firmicutes
atgaacgtcagcatatctataaaaaattctaaccccgtggatgcggcgaaagcggaagaattaagccgtcttttcgggcttgacgacaaaatcgtcgagcttttgatttcacgcggaattaatactgctgacgctttgaaaaaatttctttatcccgataagtccatgttctatgatccctttaagatgaagggaatgcgcgaagcgactgatagaatacgtaaagctatcgacaataaggaaaaggtaataatttacggcgattacgatgctgacggtgtttgtgccgccgccgttttgtcgttgtttttatcatcggaaggattggacgtatttgttcatattcccaaccgaataagtgacggctacggtcttaacgaagaaacgctggaaaaaataatcgaaactcatacgcctgatcttatcgttacttgcgattgcggaatttcgggtgttgaagaagtcaggtttgctttggaccttggggtggacgtgatagttaccgaccatcacgaggtgtcgggcctcgttcctgagtgcattgtcgtcaatccgaaacaggaagattgcgattacccgttcgatatgctttgcggtgcgggcgtagcgcttaaagtcatacaggctttgggcggattagataaaatgctggagtatacggaccttgcctgcgttgccacgattgcggatttggtgccgcttacggacgaaaaccgcttaatagttcagctcggattaaaaaagattaacgacaagaagaaccttggtctgacctttttgttcgacgcgttgggattggaaaacgtcaacagcggagatgttgcgtataaagtcgcaccccgtataaatgctgcgggaagaatgggcgacgcatatcgggctttcgagcttctgaccacagttgacgtaaaacgcgccaaacagattgtggatgagatagaagaagacaaccttcgccgcaaggaaatgtgcgacgaaatgtattccgaggccgtcgaggatcttaactctgaagatcttataaacaatcgcgccataatattaagccatccttcatgggaaaagggcattacgggtattattgccgcgcggcttgcgggcgaatataaccgaccagtgtttatacttgtaaaatcgggcgatacatacaaaggcacctgccgcagtatcgacggaataaacgtacatgaattgcttgtcggttgccgcgactcactggtggaattcggaggtcatgcacaggcggcaggtttttcaatagctcccgaaaaaatagacgagttccgcaaatcggtaaacgattatctcaaggcttttcccgacgacctttttatgcctaaggcttattacgacgctgaaattacgcccaaagaagtcaattacgaatttgtaaaatcattggaactgcttgagcctttcggaaacggaaacaacaaaccgctttttaaaatggagcttgacaatctgaagattgcgccctgcaaaagcaatcagtcgcatatttcaataatgtccgattcgggattgcagatttttgcgttcaattattctaagctttcttatcagctgatgtcgcagggtaaaaaagtaatcgttaccgaacttcagacaagtaactacggcgggaagcaaatcaaaggtatcatgaagtgttgcgcgccttcgtctttatatataaacgaagcggtgtgcgagggattcaagtataatttacttaaatacgttccgcaaagtaaatgcgattattcagtgtatgacgagcaatatctcaataagatttccggcaatttatacggtactttaataattgcgcttgacaaggattcctataacgaatttgttgaaaagcatgagcttccgtttttcaaagaatttatgtacgccacgtcgcgcaacaattattcaaggataatcgtcgcgccctcttttgagcaggggaatctttgttttgcgaattacgatcatattgtgtttttacgcgcgccgcttaacagcggcataatttcctatctcaattccgttacgaaagcggaaattctgttgcccgaaaaatgcagtgaaaattacgaggtaagcgtagaccgaaaaatttttgcagattatttcgaatcaatgaagaaactgcaaaatctttccttttcgggatttaacgcttatttccgtcagttaataaaaaacaaacctgattgtaagatgagtcagtttatgttttgtcttgatgtgttcgaggaacttggttttgtaacggttgaaaacaatccgtatcggatattgttcaacagcggtaagagggcggacttaaacacgtcggctatttatacacttataaaggagaagattgaagaataa

SEQ ID NO: 1448 - DNA, 1395 bp, unclassified Firmicutes
ttgactgatttcgagcaacttttacaggcggtcatgcctaaaattgaaaaattgagtatattggcaaaagaatctactataatagataacagtttttattataaatttgatgtcaaacgcggcttaagggatattaacggcaacggagttcttgcgggccttacggatatatccgacattgttgctttcaagcaggacgaggaaggcaatgccgtgcttgacgcggaaggaaagaaaattccttgcgacggaatcttgagatacaggggaatagacatcaacgatcttgttgacggatttttaaaagacaatcgattcggatttgaagaaatttcatacctcttgttgttcggagagttgccttcccccaaaaggcttaaactttttaacgaaattttaagcgcgttcaggacgttgcccgtttcttttgtgcgcgatattataatgaaagcgccttccgtggatatgatgaacgggcttgcacgcagcgttctgacgttatattcttacgacgataagccggatgacatatcgatttcaaacgtattaaggcagtgtttgcagcttatttctcaatttccgttgcttgccgtgtacagttaccaggtattcaagcattatcacgactataacagccttataattcatacgcctttccctgaactctcgactgctgagaatattctggcccttatgcgtgccgacgggaaatataccgaattagaggctaaaattctggacttaatgcttgttttgcacgcagagcacggcggcggcaataattcgacttttacgacgcacgttgtttcgtcttccggtacggatacttattcagtggttgcggcatcgcttgggtcacttaagggccccaggcacggcggcgcaaacataaaagtagtcaaaatgtttgacgacatgaaagccaatattaaatcgcgttccgacggagacgttaaggattatctttgcaagttgttggataaagaggcgtttgataagtccggacttatttacggtatgggtcacgctgtttattcgctttccgacccgagggcgacaatcatgaaaaaatttgtcgaaaggctcgccgttgaaaagcaccgtgaggacgactatgagctttatgcgaaaatcgagcgtcttgcgcctgaaattataggagaaaaaagggcgatttacaaaggcgtggcagccaatgtggatttctattcgggatttgtaaactctatgctggatattcctatggaattatttactccgatttttgcgatttcccgcatagtgggttggtcagctcaccgtatagaggagctttccaataacggcaaaataataagaccgaattacaaatgcgtttccacagttaaaaaatacgtgccgctttcagacagataa

SEQ ID NO: 1449 - DNA, 1764 bp, unclassified Firmicutes
ttggacagagagtggattgaacaacttttatcgcgcgtaaatctggtgcagataatttcccgctatttaccgctgaaaaagaagggcaggacctattgggggtgctgtccgtttcaccatgaaaaggaaccctctttcgccgtcaacgaggacaagcagttttaccattgtttcggctgcaaggaaagcggcaacgcgattacgtttatcgaaaaaatggaaagcgtggattttatcgacgcggtaaaaatccttgccgacgaagtgaaaatggaaatccccaaattcaaaagcggcgaccacgaaggaataactcgcgaaaaacgcgaacggctttattcgcttatgagagaagccgccaaacactatcacgaaaatctgtcggctccgcgcggaaaaaacgcccgtgattaccttgaagcgcgcggtattacggggaatctcgttacaaggttcggtttcggggcaagctttgacggggaggaaataattacttatcttctttcaaaaggttacacgcgtgccgaaatgaaggaagcgggacttgtggagcagcgcggcgcagactggtacgacgtgttttacaacaggcttatgattcccataatcaacaatttcggcgaggtggtcgctttcggcgggcggcttatagacccttcgtcccatattcccgtcaaataccgcaactcttcaaacacgccgattttcgataaatccaaaacgctgtacgcgattaatcttctcaagaaaaagaaacagcgcgaaaaaatcgattacgtcatcgtgaccgaaggttacatggacgtcgttgcgctgcataaagcgggttttgacacggctgttgcttctatgggaacggcgctgactttttctcaggcaaagctgataaggaattattccgaaaacgtgtttatcagttacgacggcgattcggcggggaaaaccgcaactttgcgcggtttggacatacttcagtcggctgggcttaacgtgaaagtcgtttcgcttcccgaagggcttgaccccgacgatctgataaaagcgcagggcagggatgcttacgcccgattgcttaaagaggcggagcctttgcccgctttcaaactcaacagtcttaaaaagagattcgacatcggctctcccgacggaaaatccgcctacgccatcgaggcggtaaaagtcataaaatctttgcccaatcccgtcgagcgggaagaatatctttccatagttcacgatactacggggtactcgttcgacgcgctcagaaagcaggcagatttaataagcgaggacgaacccggcgaaaaaaatgcgcctgttattgacgaaggtaaagaagcaaaacctgaaacaaaacgcgacaaagcggaacttttcgtcattgccagcatcgcgcacggaatgccttacgtcgatttttccgaggacgtgtacacctatctcgattcggacacggacagacggatttacggttacgccgtggaaaagcacaaaaaaggcgaaaagccgtcggtttccatgctttacagcatagaggattcggcaagagtcgcggaagtcgcggattataactttctggagggcgacgacagggctaaatacgaaatgtgtctgactcgcttgaaaatgaaatacttatcggcggaaaagacgcggcttgccaaagagtacgacgaaaccaaaaacgttaaactcataatggaaatcgcgcggcttgacggcttgctcagaagcttgaaaaacggaggagagaatgactga

SEQ ID NO: 1450 - DNA, 1560 bp, unclassified Firmicutes
atgcaaaaaactgaaattaaaaaaccggatttaggcaccgggtcggtgggcaaactgcttgcaaagcttgcattacctgccgtagccgcacaaataatcaacatgctttacaaccttatcgaccgcgtatacgtcggacgaatcgcggtaataggcacggacgctcttgcgggattgggcgtttgctttccgataatacttatagtatcggcattcagcgcgcttataggcatgggcggcgcaccgcttgcggcaatacgcatgggcgaaaaaaagcgtgaggaagcggaaaagatttttaataacggcgtaatcctgttgcttatattcggcatagctcttaccgtagtcctgctgttgttttcgcgtcagcttttagtgcttttcggctcgcctgcctccagccttccctacgcggacgcttaccttagaatttatgcaacaggcacggttttcgtaatgcttgcgcttggacttaatccgtttatttccacgcaagggtttgctttcatgtcaatgattaccgtggcgataggcgcagtgcttaacatagcgcttgacccgctttttattttcgcgtttaacatgggagtcaggggcgccgcgcttgccaccatactttcacaagcggtttcgtgcgtatgggtggtattgttttttgtatccaaacgcacatccatcaagttaaaaccgtctttcttcaagctgcagccttccgtcttttttcccatgctggcgcttggagtaactccatttataatgcaggcgacggaaagcgcggttcaaatagttttcaacgtgcaacttcacgcgtacacgggcggctccaaagactacacggcggcgctgacgattatgatgagcgtaatgcaggttatatcgctgccccttaacggactgggcacgggcgcacagccgcttatttcctataattacggagcgggaaatatggcgcgcgtcaaaaaaacagtcaaatatctgtttttaaccgctttgacagtctgttttatagtatggctatcctgccttaccgtaccttttatttatgcgtccatattctcggcaagcgcggaagtcaccgccatcgtcaacgactatatgcccatattcatgatgggctccataatgttttgcgctcagttcgcacttcagaacgcgtttctcgcgctgggacaggcaaaaatatcgatgttccttgcgcttttgagaaaagttatactgcttataccgcttacgtttattctgccgctgattttaggcgtaaaaggcgtcttccttgccgaaggcgttgccgaccttactgcgggaacaataacgggattagcctttcttttgtcgtttaagggaatattgcttagacgcgaggcttttttatccgctcaagccgaaagggccaacgcggcagcgagcgtaacgggggacgtaattccgatgaacgcgcaaaacacgccctctgtttccgccgaagaattatcggagaaaactttagcggaagaaagcttgtcaatcggcgaaaactccgaagcgcaaaacacagacacggagaataaagcggaatga

SEQ ID NO: 1451 - DNA, 1497 bp, unclassified Alistipes
atgagcgaaaaagtatatatcttcgacaccaccctccgcgatgcggagcaggttccgggatgccagctcaacaccatagagaagatcgaggtggcgcggcagctcgaaaaattgggtgtggacatcatcgaagcgggctttccgatatcgagtccgggagacttcaactcggtggtcgagatctcgaaggcggtaacgcgccccgtcatctgtgccctcacgcgcgccgtgaagaaggatatcgacgtggcggccaagtcgctggagttcgccaaacgcggccgtatccatacgggtatcggcacctcgacataccacatctacgaaaagctgcgcatgacccccgaaacggtcatcgagcaggccgtcgatgcggtgaagtacgcccgtcgtttcgtcgatgacgtggagttctacgccgaggatgcaggccgcaccgagaacgagtttctggcccgcgtggtggaggccgtaatcgcggccggcgccactgtcgtaaacatacccgacacgacgggttactgtctgccgagcgagtacggcgccaagatcgcctaccttaagaacaacgtccccaatatcgacaaggccgtcatctcgacccactgccacaacgatctgggcatggccacggccaacacgctggctgccgtcgagaacggtgcccgccagatggaggtgacgataaacggtctgggcgagcgtgccggaaatacggccctcgaggaggtcgttatggcaataaagtgccacaagaatctcgacttcgaggtaggtatcgatacgcggcagatcatctctacgagccgtcttgtgtcgaacctcatgcgtatgcccgtacagcccaacaaggccattgtcggccgcaacgcctttgcgcactcgtcgggaatacatcaggacggcgtgctcaagaaccgtgagacgtatgagataatcgaccccgaggatgtcggagtagaccagtcgagcatcgtcctgacggcccgcagcggccgcgcggcactcaagcaccacctcgcagagataggctacacgcccgaaggcgatgagctggacgagatataccagcgttttctggagctggccgacaagaagaagatggtcactacgcgcgatctggaggtactcgtgggtacggccgcctcgcgccgccgcatgagcatacagctcacggggctgcaggtcgtctgcggcaagacgagcataccgaccgctaccgtacagatcagcttcgacggcgacaccttcaccgagactgctaccggaaacggtcccgtcgatgcggccatcaccgccgtcaagaacatcaccaagcgtcgcgtccatatcgaggagtacctcgtgcaggccatcacgcgcggcagcgacgatatgggcaaggtacacatccagatctcgcacaagggcaagatgtatcacggcttcggcgcctcgaccgatatcgtaaccgcatcggtggagtcgttcatagatgcaatttcgaaaatagcataa

SEQ ID NO: 1452 - DNA, 1413 bp, unclassified Alistipes
atgatctcattgaaaacatacataccatattacaaggagaatctgcggctggccatgcccgtcatactgtcacaggtgggacagatcaccgtgcagcttgccgacacggccatggtaggatggtacggaggcgacgcccccacgccgctggctgccgtatcgttcggcacaagcatattctacatcatattcatctcggccatgggtctggccttcggtctgacgcctcttgtgggtgaacacttcgcacgtggagaccaacgccacgctgcgcacctgcttcagaacggcctcgtactcttcacacttgccggaatcgccacatcggccctactcatcgccgtacggccgctgatgcggtggatgggggccgtgatgataggctcaggcggcgatgcatccgtctccgaagtcatcgaggcggccctaccatattacgatacgctcatctggggtatgatccccgtaatcatcttctgtaccttcaagcagttcctcgagggcataggcaacacccgcattgcaatggtggtgatcatatcgtgcaacctgataaacatattcctaaactgggtcctcatcttcggcaagttcggcatcgaacccatgggtgccgtcggcgccggtgtcgccaccttcgtggcccgatgctgcatgtgtgtcatgatcggcggatatgtcctcctgaatccccgcttcaagagcttcatacacgacttcgaccgtgcggcaatacgtctgcgcacgatgtgggagatacttaaagtaggtattccgatagccttccacatgttcatggaggccagcgcattcgtcgtcaccaatattctcgtgttgtcgttcggtgcgcacgccatcagcgcataccagatatgcaccaacatgatgcaggtgacgttcatgatagtcgtggccataggctcggccaacacgatcctatgctcgcacatattcggccgcggcgacttcgaccgcctgcggcgtacggtatattcggcctaccatctcggactcgtgtggtgcatcacggccgccgtatgcttcgtcgccttccgctacaccatacctgcactcttctcgtcaaacctgcaggttatagaacttacgggaacactgctcatattcatatcgctcttccagatacccgactgcctgcagacgctctccataagcgccctgcgtggtctgcaggacgtacgcgtcatcatgcccatcgtattcgtatcgtatgtgctgataaacattccggccggatacctgctcgctttccccgccgggatgggtgccgaaggtcttattctgggtctcatagccggacttacgtgctgtgccgtgctgaccatacgccgcctgcgccgcgacatggtctcactcgaaaaacgcatagcatcatcctcgacgaagaccatctga

SEQ ID NO: 1453 - DNA, 687 bp, unclassified Alistipes
atggaaattaagaaatcgccagaggcagatcttcagaacagaaaaggtctgttttttgaaatcggtttagtcattgcccttgcggcggtgctcggagccttcctctacactccgaaggagtaccgcatcgagcaggtggtatcgaacgtagtggtcgaggaccagcagatcgtcgaggtgacgcgtcaggagcagaaaccgcctgagcagcccaagaaggtcgagatgcaggtggttaccgacattctcgacgtggtgaccaacgacaccaagatcaccagcgacatcaacttcgacgagttcaccgaggatatggagatcacggcagctcccgtcgaggtcgaggaggaggttatcgaggaggagacccccttcatccgtgtcgagaagatgccttcgttccaaggcggtgacctgaatgctttccgtaactgggttcagggcaagctccactatccccagatcgctcaggagaacggtatctcgggacgtgtggttctgtcgttcgtgatcgagaaggacggtacgcttaccaacatcgaggtgctgcaggcacccgaccgttcgctgtcggaggaggccgtacgtgtgctcgagacctcacccaagtgggagccgggcatgcagagcaacaaggccgtgcgtgtgaagtacacgttgccggttgatttccagattcacaactaa

SEQ ID NO: 1454 - DNA, 1479 bp, unclassified Alistipes
atgtcaaagaaaatctcaagagctgactttctgaagacctctgcagctggtctggcagctatgactgttgttcccggcaacgtaatgggttcagccttcggacacaaggccccctcggacaaacttaacatcgcaggtgtaggtatcggcggacgtggatcggccgtgctggacgacctcaaggaggagaatatcgtagccctctgcgacacggactggaactatgccaagggtacgttcgaccgtttctcgaaggcacagcgcttctgggactggcgcgagatgtacgacaaggtcgcaaaccagatcgatgccgtaatgtgcgctacgcctgaccacacgcacgcacttgttgctgccaacgccatggagctcggcaagcacgtatattgcgagaagcctctgacccactcggtatacgagtcgcgtctgctcaccaagctcgctgccaagaacggcgtggctacccagatgggtaaccagggatcgtcgggcgaaggcgtacagaaggtgtgcgactggatctggaacggcgagatcggcgaggttacccgtgtggatgccttcaccgaccgtcctatctggccgcagggtctgatgcgtcctacgcaggttgaccccatacccgagaccttgaactgggatctcttcctcggatcggccccctatcgtccctacaacaagatctaccagccgtggaactggcgtggatggtgggacttcggtaccggtgctctgggcgatatggcctgccatatcctccaccccgtattcaaggctctgcagctgggataccccacaaaggtacagggctcgtcgacggcactgctcaccgactgcgctccgcaggctcagatggtaacatacgtattccccgagcgcggcaagaaggacaaggtcaagctgcccgaggttactgttacgtggtatgacggaggtctgacgcccccgcgtcccgaaggactcgagcccggcaagaacctcaacgacggtggtggcggatgtatcttctacggcaccaaggatgtcctcatctgcggatgctacggtgtcaatccctacctgctgtctggccgtgtgcccaacgctcccgcacgtgcccgcaaggtcgagctctcgcacggaaaggactgggttcgcgcctgcaaggaggacaaggctacccgcgtgaagtcgaattcggacttctcggaggcaggtcccttcaacgagatggtcgtaatgggtgttctgggcgtacgtctgcagagcctcaacaagaccctcgagtgggacggcgcaaacatgcgcttcaccaatatcggcgacgacgagacgctgcgcatcatgatcgaggacggattctcggtacacgacggtcacccgactttcaacaagacctacaccgaccccatcaacgcaaagcagttcgccgaggagatgatcaagcacaactatcgcaagggttgggacactttgctccccgccatgcccaaataa

SEQ ID NO: 1455 - DNA, 942 bp, unclassified Alistipes
atgacgcttatggccggagaagaagcactttgcggcgtggttctgcgcgccacgggaagcctctacgaggtgttgctgggcgaacgtacggtctcgtgccgcatacgcgggcggctgcgcctgaaaggggtgcgatcgacaaatcccgtcgtcgtgggcgacatcgtgcgttgcgaacgcgacgagacgggggagaccgtcatcgccgatatcgagccgcgccgcaactatatcatacggcgcgcgtcgaacctctcgaaggagtcgcatatcatcgccgccaatctcgatcaggcgctgctcgtggccacgctcttctcgcccgagacggctccggagttcatcgaccgttttctggttacgtgcgaggcgtacaaggtgcccgtgacgatacttctggccaaggccgatctggcgcgcacggcgcccgaggctatggctgcattccatgatacgtacgagcgtgcgggctaccgcgtcatcgacgtctcggccaccgagggcgagggcgtcgacacggtgcgggatctgctgcgcggacgcacgacactgctgtcgggtaattcgggcgtgggcaagtcgacgcttgtggcggcggttgagcgtacggccgaggtgcgcacggcggagatctcgcgcagccaccacaagggccgccatacgacaacattctcgacgatgtatccgctctcggaggggggatacataatcgatacgccgggcataaagggattcggacttattgacatagacgatgcggagctggcgcactacttccccgagatgatgcgttggctgcccgagtgccgctactacaactgttcgcatacgcacgagcccgattgtgcggttatcgaggctgtggagcgtggcgacatagcgatgtcgcgttacgagagctatctgaaaatactggacgaggatgacaaatacaggaaatag

SEQ ID NO: 1456 - DNA, 1770 bp, unclassified Alistipes
atgagggcttcaaatacactctatgaacttcttgaaaacagcataaaagagtataaggacaacatcgccttctcgatgttcggaggggagaatgtgacctatgccgaggtcggactgcgagtggccatagtacagcagatgctgctcgatgccggtctgagcgccggcgacaaggtggcgatactgagcagcaacatgcccaactggggtgtctgctatttcgccgttacgacggcaggcatgatcgctgtgccgatccttcccgacttcaccgaggcggagctcgacatgctcatacgccattcggaggccaaggcgctcttcgtgtcggacaaactgtttaccaagctgtcgaaggagactgtggcgatgctcgacatcgtcatccgcacgaagaatctcggtatcatatcgcagcgcacgacgggcaagggaacgcgcaccgtgccgcgtcccgatgatctggccgtcataatatatacgtcgggtacgatgtcgcggcccaagggcgtgatgctcacacactacaatctggcgtcgaacgtcaacatgatgtacggcctgttccccatcgacgagaatgactcgatgctctcggtactgcctctgtcgcacacatacgagtgtacggtcggcatgctctatccctttgccgtcggaggaagggtcacatacctcgagaagccgcctacggcttcgattctgctgccggcgctgcagtcggtgcggccgacgtgtctgctgatcgtgccgctcataatcgagaagatataccgcagtcagatatatgccaagtttacctccaacgccttccttcgcaaggtctacggcaacgatttcctgcgtcggcagatacaccgtatagtgggccgccgtctgatgaaggtcttcggcgggcgtctgcgcttcctcggcatcgggggcgcgaagctcaatcctcaggtagagcagttcctcatcgaggcacgtatgccatacgccataggatacggccttacggagacggccccgatggttgcgggtgccgtaccggccatgccgcgaaaggtggggtcgacgggattgcctatggtgggactgcaggtgcggctggacaacatcaatcccgagacacggcagggtgagatcgtgatcaactcgccgtcgatgatgcgcgggtattacaagaacgaggaggctacggccgaggcctttaccgaggacgggtggttccgtacgggtgatctgggttatatcgacgaggatggcttcatcttcatcaagggccgtttgaagaacatgatcgtgggcccgagcggcgagaatatatatcccgaggagatcgagtcggtgttgaataccaacgcctatgtctcggagtcgctcgtgacgcagcaggatggccatcttgtggcgttgatacatttcgacaaggaggcaatcgagaaactcaaggacgagctgatggagaagtgggagatcacgcgtgaggactggcaccgcaaggtgggcgagtggaatgccaagaaggaggagatcaagcaggagatcatgcgttacgtcaactcgaaggtgaataagttctcgcgtattacggaggtggtcgaggaggacggcggcttcgagaagaccccgacacacaagatacgccgcttcaaatataacggcagcaataacgccaagacaggcgaggcatcgccctcggctgcaacagagacggctccggccgaggagaagggttcggagagtgccgattcctcttcgggggcggagacgcggggtgacgcctga

SEQ ID NO: 1457 - DNA, 2463 bp, unclassified Alistipes
atgaaaatagcattcaagaatttcattacgacgctgcggcgttacaagatggcctcggtgttgaacatcgcgggcctgacgctggccttcacggcattctacgtgatgatggtgcaggtgacctacgatctgggctacaaccgctcgatcagagatgccgaccgcatctggacggtgaatgccaactggataggcggcggattctcgctgatctcgccgcgcggccccttcgaggcggcgctggcgcagtcgcccgaggtcgagggcagcgccatcattacgcgcaactgggaggggcccgtgtgggtgcagaagtcggagttcagcttcaccgaatatgcggctgtgatggactatatatcgctgccgtcgctcgacctgctgggcttccgcacggtggagggcgaccttcggcagatcgagaaccccaatacggtgatcctgcccgagtcgctggcgcggctctacggagtgcatgccggcgaccgtatcttcacgagcgacaccaagcccggggagaaaccgcgcccctcgcacgagtggaccgtggtgggtatatacaaggatttcgccgacaacacgcttatgggcgagcctcgtatatacagctacttgggcgacagggacatgaacgacacgtcgcaatatggctatatctgtatggtaaagatgcgtgacgggtccgtgcccgacagcttcaagaaggcgtgggacgacaacatgtaccgtcagcgcgtggcacgtgtgcgtgatgacgatagtgcgcagagtgccgaaaagggcgacggtgaggatgccggcggcacgacagccgccgagaccgatgccaaatacgaatacctgcgcagcgatgtgcgtttgacgaggctgacggatgtctatttcgacacctcgctcggttctggctcggaccacgatcatggctcgaaatcgacgatgctgacgtgtctgggcgtagccatcctcgtggtggccatagcgctgataaacttcgtcaacttcttcttcgcgctgatccccgtgcggctgcgtgccgtcaatatctgcaaggtcttcggggcctcgacccgtacgctgcgctggagcttcctgttcgaggctgtgggacttgtggtgtgcgcgctgctgctgacgatgtaccttacgatcgtgctgcccgataccttcgtagcggagtatgtctcgcggtcgctctctttgaaggataatctgacggccgtgctgctgctctttggcataggcgtggtggcagccctcgccgcggcgctgtacccgtcgtactacatcacctcgttcaacgcctcgctcgccgtcaagagcggcttcgccggctcgggcgcgggtcgccgcctgcgtcttgttctggtcggggtgcagttcaccgtctcgatagcccttatcgtggtggccgcctgcttctggctgcaatacaggtatatgatcaattacgacataggaatcgaccgcgagaacctgatgtgtttcaatctctcgtacaaggacggcgacatgtatcccgtattggcggaacgcatgaacgagatgcccgagatcgtcggcgtgacggcatcggtggatgccgtggtgggagacggctcggccgaggtgatacgcatgaagtacgaaggccgcgatctggagctccacttccgatatgtgcgcagcaacttcctcgacgtgatgggcataaggctcgccgagggtgaggacttctccgacgacatggacaacgccgccaccaagtatgccatcatgtgccgcagtacgtgcgacgagtacggattctatccgggtttcgtggtgatggcgggaactacgccgatatgccgtgttataggtatcatggatgacgtgctcggacagcctctcgactcgaagcagagcaatacggtctactgcaccacgtcggaggatcagtggatgggcgacgtatatttccgcacggcggcgaatgtcgacatcccgcggctgtgcgacaagatccgcgccgtggccaaggagataaatcccgacagcgaagagttggatatcgagttcgtggacgaacatctgcagcggctctacgagaagacgcagcgcagcgccactatcatcgggctcttcgccctgctggccgtcgtcatatcgctgatgggtgtcttcggtattgttctcttcgagacgcagcaccgccgccgcgagatagcgctgcgccgcgtgatgggatcgtcgatcgagggcgtagtgtggttgttcgggcgccactacttcgctatcttggccgtatgtttcgccatagcggtgcccgtggcgtggtacgtggtgagcgagtggctcaacaggttcgcctaccggatcccgacgccgtggtgggcctttgcggcggcattcctgctggtgacggcgctgacgctgggcatagtcgtcgtacgctgccgccgcgccgcgagcgagaatcccgcacgcgtgctgggcggcgagtaa

SEQ ID NO: 1458 - DNA, 1242 bp, unclassified Alistipes
atgcttgttcttacgttgattctgctgaccatatcggctctggtttcggggtcggaggtggcattcttctcgctcacgcccaaggagttgcaacgcatgtcgcagagttccgactcgcgtgacgggctgatcgtctcgctgctgtcgaatgtcgaccgtctgttggcgacgatcctcgtgacgaacaatctggtaaatatctgtatcgtaatactctcgtcgaacgtgatgagttcgctgtggcacttcgcccgttttgagttccttttcaagacggtgcttgtgacgttcctgctgctgctcttcggcgagattctgccgaaggtgctggcgcagacggctcctttgaagttcgcgcgtgcggtggcatatccgatcaaggtattcagctggctgagttaccctgcggcatacgtgctcatacgcacgggtggccgtctgagccgtctggcgacgcacaatgtcgagatctcgatggaggatctggccgacgcggtcgaccttacgcgtacatcctcgaacgaggagcacaagatgctctcgggcatagtcaatctggtcaatacggaggtcgaggagatcatgcgcccgcgcatcgacatcatggcgctcgacatgagtgtggactacgacgaggtgaagcgtgagatcatcgagtcgggatattcgcgcataccggtctatgacgaggatctggacgacatcaagggtgcgctttacgtgaaggatctgctgccttatatcaaccgcggcaaggacttcgagtggcagaaactgctgcgcaagatatatttcgtgcccaagcacaagaagatcgacgacctgttgcgggattttcaggagaacaagatacacatagcgatcgtggttgacgagtacggcgccacgcaggggctcgtgtcgctggaggatatcctcgaggaggtcgtgggtgagatcaccgacgagagcgactcggaggagacattctaccaccgcatcaatgccaatacatacctcttcgacggcaagacccatatcgtcgacttcgagcgtgtgctcgacatggatgacgacgctctggccgacgttcaggggcgtgccgagactttggcgggcctgatgctggagctcaagcgcgaccttctgcgcaagggagacacggtcgagacgcacggcgtgcggctgacggtggagaagatggagggccgccgcgtcgacaaggtaaaggttgttgtgaacgatggcggaagtgaaggataa

SEQ ID NO: 1459 - DNA, 1128 bp, unclassified Alistipes
atgaaacggaaagctctgttcattgatcgtgacggcacgatcatcgtcgagcctgtggaggatatgcaggtcgactcgctcgagaaactggagtttgtgccgggggcgatctcggcgctgcgctcgcttgcggcgctggactacgacatggtgctggcatcgaatcaggacggtctgggtacggcatcctttcccgaggagaccttctggccggcgcaccgcaagatgttgaagacattggcgggcgagggggtgatattctcggacgaacttatcgaccgttcgatgcctgaggataatgccccgacgcgcaagccccgtacggggatgttcggtcgctatatggacgggagttacgatctggcgtcaagttacgttataggcgaccgcgctacggatgtcgagctggcgtataatctcggtgcgcgtgcggtgctgttgcaacggcccgaagatggtgagcgcatgctggcaggaaagccctgcgcgttgagttgtgtgctgatgaccgattcgtgggccgatgtggccgagttcctgcgccgcacggagcgtcgtgctgtggttgcacgccgcacgtcggagacggatattcgtgtcgaggtcgatctcgacggcaagggtgagagccgtatcgatacggggcttaaattcttcgatcacatgctggatcagataccgcaccattcgggtatgtcgctgtcggttgcgtgccgcggcgatttggaggtggatgaacaccacactgtcgaggatgtggccatagctctcggagaggctatatatgacgctctgggatcgaagcgcggcatcgaccgttacgggttcgtcctgcctatggacgagagccgtgccatggtgttgatcgacttcggcgggcgtatcgacttttcgtgggacgtacccttcactcgcgagtatgtgggcgacgtgccgaccgagatgttcagccacttcttcaagtcgttgtgtgctgccatgcactgcaatctccatgtgcaggcccgcggcgagaacaaccaccacatgatcgaaggggtgttcaaggcctttgcccgcgccctgaagatggccgtgcggcgcgatgtcttcagcagcgaactgccttcgagcaagggggtgctgtaa

SEQ ID NO: 1460 - DNA, 1683 bp, unclassified Alistipes
atggatacgaatacacagacaaccgagcccaaagagaagctcaactttctggaggagatcatcgaagagtcgatcgccaaaggcgaaaaacgcgttcagacacgttttcctcccgagccgaacggctacctgcatataggccacgccaagagtatctgcatcaacttcgggctggccaagaagtacggaggcaagtgcaacctgcgtttcgacgacaccaaccccgtaaaggaggataccgagtatgtcgactcgatcaaacgcgacatccagtggctcggcttccaatgggccgaggagcgttacgcgtcggactacttcgaccagctctacgagtgggccgtggaactcataaagaagggtctcgcatacgttgacgaccagtcgcaggaggagatacgcctcacgcgcggaacaatttcggaaccgggcaaggagtctccgtggcgcaaccgtacggtcgaggagaacctcgatctgttcgagcgcatgcgcaacggcgagttccccgacggggcaaaggttctgcgcgccaagatcgacatggcgcatcccaacatgctcttccgcgaccccataatgtaccgtatcatccacgcagagcatcaccgcacgggcaacaagtggtgcatctatcccatgtatgactacgcacacggacagtgcgactcgatagagcacataacccactcgatctgtacgctggagttcgacgtacaccgtccgctctacgactggttcatacaggctctgggcatatacccctcgcaccagtacgaatttgcgcgtctgaacctcacctataccatgatgtcgaagcgcaaccttctcaagctcgtgaaggagggtgccgtgatgggttgggacgacccacgcatgccgacgatctgcgccctgcgccgcaagggttacacccccgcatcggtgcgcgcgtttgccgagatggtgggcgtggccaaacgcgacaatgtaatcgatctgggcaagatggagtattgcgtacgtgaggacctgaacaaggtagccgagcgccgtatggccgtgctcaaccccctgaaggtcgtgatcaccaactgggaggagggcaaggtagagatgcgcaacgccgtgaacaaccccgaagatcccgaggccggaacgcgtgaagtacccttcacgcgcgagatatacatcgaccgcgatgacttcatggagaacccgcccaagaagtatttccgtctgagcccgggcggcgaggtgcgtctgcgctactcgtacctcatcaagtgcaacgaggtgataaaggacgctcagggcaatatcgtcgagctgcactgcacctacgacccaatgtcgggcgaaggttcgtcgagcgacggccgccgtgtcaagggcgttatccactgggtatcggctccgaccgccataaaggccgaaatacgtctgttcaaccccctgttccgcaccgaggatccgttcgacacgtcggaggggcagcagtcatgggaggacaacctcaaccccgactctatgatcaaggtgacgggatatctcgagccctcgctggccgatgcgcccataggacgcacctatcagttcgagcgcgtgggatatttctgccccgatacggactctacccccgagcaccccgtattcaaccgtacggtgacactcaaggattcgtgggccaagatgaataaatag

SEQ ID NO: 1461 - DNA, 954 bp, unclassified Alistipes
atgaaattcagatatataatgactgctgcggctctgctcggtctcgttgcctgcaacgagaacaaggttttcgagaaggagcagtataagaatgtcttcggtttcatcagtgacaccgaaaacatgaacagcaaggttttcagtcttcacaagaccgagtcggaaggttatctggccttttcgatgggcggcacgaataacattacggaggatgtgacggtgaacatcgtcgaagatcccgagttgatcgagacgtacaaccgcaacaactacgatcaggaggttgccaagtatgccaagcccatgcccaaggacaagtatgagatcacgtcgatgcagtgtgtcatcaaggccggagagacgggaggcgtcatacccgttaagattcgtcctgcggggctttcgcccgacacgacctatctgataccggtgcgtgtcgatacctacgatcgttgtgagatcaatcccgagaagagctatcttctctacaaggttcttatcgagaaccgttgggctgtcggtgacggaacgacgagctatacgcttcgcggcaagcgccgcattctgggtgaccagtcggagctctcgatgcccggaacaaagattctcttcccgctgactgacaagcgagtacgtacgatggtcgggaacgaggcctatgcggccgacgaggagacgctctatcgcggagccatgatactcgaaatcgccgacaacggcaaggttaagatccttccgtatcgcgacgtagaggtcgtgcagctcgacaatgaggatcccgagtatcccaacaagttctttatcgaggatgacggattcaacacctacaagaccttcctgttgtgctaccagtacacgttcgagggtgtcacctacgtgatgaaggaggagttgcgtctgcagttcaatcccgacgatgaggaagactatgaagatacccctgttgaagaataa

SEQ ID NO: 1462 - DNA, 1017 bp, unclassified Alistipes
atgaacaaagtaatgatattctgccagacccgcgacggcgccctgagcgaggtgagtctggaacttcttaccaaggggcggcgtctggccgccgagactgcaggtcaactcgaagccctcatcataggcgacaatacatcccttgcagccgaggaggcacgccgatacggtgccgtgaagatattctgcgccgaggatgcgcgtctgaaggattacctcacgctgccctacgtccgcatagccaagcacgtcgtcgaggccgagcagcccgacatattccttgccggcgccacatcggtgggccgtgacatggcaccgcgtcttgcagccgagatcggatgcggacttacggccgactgcacggctctcgaactgggagactgctcatacaagggcaatgaatacaaaggtgtgttgaagtgcatacgaccgagtttcgttgccaaccagctcacgacaatcatatcgcccgcaacgcgcccgcagatggctaccatacgcgagggcgtcatggccaaggagcctgtcggcagcccagtcgagagcgagcgtatcgacatcgacactaatgcactgctcaagcaggaggattttgccgtcgagatcatcagcaagacagcgcgcgagcgcggtgcagacctcaagtcggcaaaggttatcgtcgccggaggctacggcatgggcagcgccgagaacttcggtgtactgttccgtctggccgagatgctgggcggtgaggtaggcgccacgcgtgccgccatcgacgcaggatatgtcggcggatacgagcgcatgatcggacagacgggaataaccgtacgtccgaaactatatatcgcctgcggcatatcggggcaggtacagcacaccgtaggcatggaccattcggcctgcatcatatcgataaactgcgacgcggaggccccgatacaccgtatcgccgactacgccatcgttggcgacgccgtgcagacggtcgagcgcatcatggcacagatcagaaacaacagacgttag

SEQ ID NO: 1463 - DNA, 1011 bp, unclassified Alistipes
atgaaacacgtgatagtcataggcggcggtatcgccggcatgcagtgcgccgtggagctggcgcgtggcgacgtgcgggttacgcttctcgagaaactcaacgacacgggcggcaaggtgcgaaactggcataaactctttccgacacttacgccggccgaggaggttctcggcggattgaaccgtgcggtcaagggctcggctaacatcgaggtgcgtacgggctgcgaggcgtcggaggtgacgccgcagcgggtgcgcctctcgacgggcgaggatctggagtgtgatgccgtggtggtggctacgggcttcactctgttcgatgcccgcgtcaaggaggagtatggatacggtatatacgacaacgtgatcacctcggccgacctcgagcagatgttcaacacgggcaaggtcgcgctcaagaacggggcggcgccgcgccgcatagccttcctgcactgtgtgggttcgcgcgacgagaaggtgtgccagcgccactgttcgaaggtgtgctgcgtgacgggcgtcaagcaggccatggagatgaaggatctcttccccgcggccgacgtcttcaacttctatatggacatacgcatgttcggcccgggatacgaggagatgtaccgcgaggcgcagcagcgttgtaacatacacttcgttcgcggccgcatctcggaggtggggcccacgatcgacggccgccttcagatcaaggccgaggatacgctcacaggccgtccgttgaagatcggggtcgacatgttggtcctgttgatcggcatgcgtgccaacgacatgaatgccgtattggagcagcggtgctcgctggcgcgtcaggcgagcggtttcatgcagccgcgcgacgagttcctgcacaacaccgagagcggcatcgagggtatattctatgccggggcggttacggcacccaagtgtgtgggcgaatcgctgaacgaaggtgtcacggcggcgcgcaaggccatcgagtggcttgcggcaagatag

SEQ ID NO: 1464 - DNA, 1365 bp, unclassified Alistipes
atgagactgagaaatctcttttttgcgctggcggcgtcgataggcgttgcggcggcgccggctggggcgcaggagatggcggattcggtagtgtccggtccgttgatgttgacgctcgaacaggcgcttgacatagcgctgagcgagaatccgacggtcaagatcgccgatcagaccgtggaggtgaaaaagtatgccaaacgcggcacctatgccggcctgtggcccgagatcagtgcctcggccacctacaaccgctacatcaagaagcagacgatgcacatcatggaccagacgatgaccgtcggtacgagcaatatctatcagggcggtttttcggctacgatgcccgtggtgaacgcacagttgtggaagtcgctcaagatctcggccatggatgtcgagctggccgtcgagcaggcgcgcggctcgcgaatagacatgatcgagcaggtgtcgaaggccttctatcaggtgcttctggcgaaggattcatatactgtatacaagcgcgtctacgacaacgccgtcgagaaccacaagatcgtgaccaagaaatacgaggtgggatcggtctcggagtatgagtttctccgctcgaaggtgaccgtatcgaacgccgagcccgacgtgctcaacgctgagaactcgatcgtggtggcgctgtggcagttgaaggcgctgctgggcatggatctcgacatagatatcgactgcgcgggatcgctggccgactacgagtcgatgatgacctcgcacttcgacatggagttcaaccccgagcgcaacagcgagatgaagcagttggagattcaggagcgtcagctgcagaagacgctcgagatgcagcgtgcggccaacctgccgacgctggatctctcggcaagctacaacttcacggccatggaggatacgttcaagttcaaccagtatacgtggaatccctattcgtatgccacgctgagcctcaacattccgatctttgccggcggcaagcgccgtgcggatatccagcaggcgaagctcaacctgagcaacatgcagcttcagcgcgagaatacggagcgtacgctgcgcacctcgataatgcagtatgcaagcaacatgcagaccaatctgaagcagtacaactcgtcgctgtcgagcgttgcggaggccaagcgcggctatgacatagccgtgaagcgctacgaggtcggtgacggcacgctggtcgagatcgacgactcgcagctggcctacacgcaggccgagctgacgcgcagcacggccatatacgactatctggtcaatcaggtgtcgctcgagaagatacgcggaacctatatgatggatgacgaggcgtcgacggcggatgccgagtag

SEQ ID NO: 1465 - DNA, 1059 bp, unclassified Alistipes
atgtcaacatttcgacatacaatacaggccctcataacggtattcgcaaccatcacgtgctcatccggcgccgcggccgcgacaccgtatccggagctggattccgtaatatgcgctctgatgaggcgatatgaccttccggccgcaagcatagccctcatgcgcgacgaccgcataatctacaccgccgcatacggcgttaccgacaccctgcgacatacgccgacgaccatacgcacccgtttccgcatagccagcctctcaaagcccgtcaccatggccggcatattgctgctggcggcacatgggcggctgtcgctcgatgaccgcgtcttcggcgagggcgccatcctcggcaccgactacggacccgtaccccgaggctcgggcaaagacctcataacggtacgcaacctgctcgaacacaaaagcgggtgggagaacatccccgacgacccgatgttctccaacgccggcgccacacaacggcagatcattgcccgcatgctggcggcacgccctctatccgcacctgcaggcgaaaaatacagctactcgaatttcgggtacctcgtcttgggacgcataatcgagaaggtgagcggcatgccatacgggaaattcatacgccgccacgtgctgcgcccctgcggcatacgccgcatgcgtatcggcgaggcccatggagacaaaccccgacacgacgagccgcaatactgcctgctgcccgaagagaccggccaatcatactacctcgacatacggcggatggattcccacggcgggtggatagcctcggccgccgacgtggcccggttcatggcgcgtatcgaccgcaatccggccgtcggggatataatacccgactcgctcgcgtctcagttctatttcgggttcgagcgttggatacataccggctccctgcccggcacggcggccgtaatgatacgcatcgacgacaggtattcattcgtgctgctctcaaacaaacgctcctacgacgaacgattctgggacgatatgtcgcaaatacccatccatgccataaccggccgctga

SEQ ID NO: 1466 - DNA, 1095 bp, unclassified Alistipes
atgaaaaccacagctttcaccaagtatcacattgcaaacggcgccaagatggccgagtttgcgggttacaacatgcccatcgagttctcgggcataaatgacgagcacatgaccgtgcgcgagaaggccggcgtgttcgacgtaagccacatgggcgagatatggatcaagggagacaaggctacggccctgttgcagcacatcacctcgaacgacgtatcgaagctttacgacggcaaggtgcagtattcgaccatgcccaacggccgcggcggcatcgttgacgatattctggtctaccgtttcagccctgagaaatatatgttgtgtgtcaacgccgccaacgtcgagaaggattggcagcatatatgcgccgagggcaaggcattcggcatggagccgggccgcgaactggaaaacgcctcggacaagatcgcacagctggccgtgcagggacctctggccatgaagatcgtacagaagctctgcgacgagcccgtcgaggatatggcatactacaccttcaagcagacacgcgttgcgggttgcgacgccatagtatcggctacgggatacaccggatcgggcggctgcgagatatacatgtacaacagcgacgccgacaccgtatgggacgccctgtggaaggcgggcgtagagtacggtctcaagaatatcggtctgggcgcacgcgacacgctccgtctggagaagggattcgcactctacggcaacgatatcgacgacactacctcgctcatcgaggctggtttgggttgggtcaccaagttcgccgagggcaaggacttcatcgaccgcgagctgctcgcacggcagaaggccgaaggcgtggagcgcaagctcataggattcaagatgatcgaccgcggcgtgccgcgccacggatacaagattgccaacctcgaaggcgagcagatcggacacgtgacgtcgggcaccatgtcgcccatgctccatacgggtatcggtctgggatatgtcaagagccaatatgccgccgtaggcaccgtcatcgccatcgtcatacgcgaccgcctcatcaaggccgaggtcgtaaaatatcccttcgtataa

SEQ ID NO: 1467 - DNA, 936 bp, unclassified Alistipes
ttgagcatagcggtaaccatactcggctcatcgtcggccaagcctacggccgaccgtcacccctcggcgcaggcggtgaacgtaaacgagcaatactatctgatggatgccggcgagggtgtgcagcagcagctcgtgcgtgcggggatcaaccccctgaagctgcgggcggtattcatctcgcacctgcatggcgaccacgtctacgggctgctgccgctgatctcgacgctcgggctctacggcaagcgcacgccgctgccgatatatgctccgcggcccttcggcgagatactcgaggcgcatctccggtacttcgacacggcgctgccgtacgagccacaatggcacgaggtcgacaccacggcccaccgcatcgtcttcgagaacgactcgctggaggtgtggtcgctgccgctgcgccaccgcgtacccacggccggatatctcttccgcgagaaggagcccgcgctcaacgtcagcaaatatgccatcgaacgctacgggctctccgtagcgcagatcgtggcggcaaagcgcggcgaggatcttgtcggggcagacggggagccgataccaaacgaccttgtgacataccgtccataccgtcccgtatcgtatgcctactgttccgacaccaactactcggcgcggctggcttcgatggtcgagggcgtagacatgctctaccatgaggccacatacgccgccgacgagaggcgcacggcacgcgatagggggcattcgacaaccgtcgatgcggccaacgtggcgctcaaggcgcgggcgggaaggctccttatagggcacttctccacgcgatacaaggatctcgggccgctcctcgaagagagccgcgccgtattccccgcaacggacctcgcccgcgagggacagacattcaccgttaccgaacagcgacatgacaagatctga

SEQ ID NO: 1468 - DNA, 1362 bp, unclassified Alistipes
atgtcgaataatccacttaacgacggcgcggtgtatgacgcccgtttgctggggaaacccaagatgctggctctgggcctgcaacacatgttcgccatgtttggcgctacggtacttgttccggccataacgggcctctcggtctcggccacactgctctttgcgggtctgggcacgctgctcttccacgccatcacacgattcaaggtgccggcattcctcggctcgtcgttcgccttcatcggcggctatgctactgtcaccgagatgggtacggcgcagggtctcacgacggccgaagcgctgccttatgcctgtgtcggggtattctttgccggtttgctgtatttagtgctggccggattgttcgccatgttcggtgcgcgccgtgtgatgcgttacttcccgccaatcgtcacgggccccattatcatatctatcggcctgatactttcgggttcggccatcaccaactgtatggctaactggtggatcgcgctgctggccatcgccattatcatcgtggccaacatctggggccgcggcatggtccgcattgtgcccatattgttgggcgtggtcggttcttatgtagtggcagccctttgcgggcaggtggactttacggccgtgcgcgaggccgcatggatcggagtcccgttccacatgaaggatacggccttcgccgtcttcgccaaccccgactgggggcttctcgtctcggccatcatcaccatcatgcccatagctctggccacgatggtggagcatataggcgacatgtgtgccatatcgtctacggttggacgtaatttcctcgccgacccgggactgcatcgcacgcttatgggcgacggtctggccacctcgatagcgtcgctgttcggggcgcctgcaaataccacatacggcgaaaatacgggcgtgctgaaccttacgaaagtgttcgacccgcgcgtgatacgtcttgcggccgtcttcgccatactcttttcgctttcgcccaagtttgcggcgctggtgagctcgatgcctacggctaccatcggcggcgtgtcgctggtgctctacggtatgatctcggctgtgggtgtgcgtaacgttgtggacaacaaggtcgactttacggcctcgcgtaacgtcatcatcgcggccatgatcctcgtgctggccataggtatcaagtacggcgccaacgatgccgtctcgctcggatttacctcgctgtcgggtctggccgtagccgctatcgtgggtattgcgctgaacgccctgttgccgggaaaggattacgtcttcggccgcaactcgaagggcgacacgtcggtcgatttcgaggtcaaccgcgtcacggaggagtga

SEQ ID NO: 1469 - DNA, 1110 bp, unclassified Alistipes
atgaaaaccgttcgactacttacagcagtttttctcctgtggacggtgccggcactcgcgcagaccgaggtcaacaggatttacgacgcctccgagatgatggacaacatcgaggtggcaaagagcatggaggtattcggcagagccctctcgtcgtattcgcagagctacctcaccaactacgagttgggatatgcctactaccttcaggaggactacacccgtgctggacgtatcttcagccgcctatcacgcgacatgtctgtcgacgacaggctgtatcaggtatggggaaacagctacgccgaccgcggaaacgaccgcaaggccgagaagatataccgccgcggactcaaggcattcccccactcgggagccctgcacatggagctcggagccctcgcattcaaggacaaacgctacgacgaggccctcatgtacttcgagcgcggcatagagctcgacccctcgtatcccgacaactactggcgtgccgccggaatatacctcagctcgcccgaatcggtctgggggatgatctatggcgagatatatatgaatatggtgtgcaacggcgaacagaacatggaggtgagccgtctgctggccgaggcatacgactcgaacatctggcacgagaagaacgaccgcgggcaggatctcatatacataagtttctcggagaacaactccatctggtacgacgagaccctcaaggtgatgcgcttcccgtacggcgtggccgtatatgagcccacgctgggcaatgccgtagtcaaggtggggctgccgccattctcggtcgacgagctctgccgcatacgcgacatcttcgtcgacgaatacttctccgaaccgaacgactacggatacgtatatcccaacctgctattcgaccgccagcgccagatcaagcaggcgggacacatggaggcatacagccgttggatcctgcgcgggagtgaccccgaagccttcaatgagtggtgtgccgacaacaaagagcagtggcgcgccttcgtcgagtggttcaactcccacgaactcaccgtcgacgacgaacacaacttccgcagctggcaatacaccgccaagctcccagacaaataa

SEQ ID NO: 1470 - DNA, 864 bp, unclassified Alistipes
atggtcgccatgccggagcaggcggccgcaaagaaaaagaagatcggcattcagctctactcggtgatgggagccgtacagaaggaccctgcgggttcgatcaagcgtctggccgacatgggttacaacgtggccgagcttgtgcagtggggcggcgacaccaaggtgttcggacttgcgcccgcggagttcaaggccatctgcgaccgtaacggcatggagatcgtctcgacccacacgggtatacaggaggaccccgcaaaggaggatgaagtgattgcgcgctggcgccagatcttcgagatacagaaggcgtgcggcggccgttatgtcgttatcccgagctacggcgtcgactacacggagaagggtgtgcggcagatgtgtgactacttcaaccgtatcggcaagatcgcatcggagtacggtctcaagctgggctaccacaaccattcgggcgagttcgccaaactgaaggattcggacaaggtgatgtgggagtatcttgtcgagcataccgacccgagctacgtattcttcgagttggacgtctactggtgcaccaagggtggcaaggatcccgttgcctacctgaagaagtatcccaaccgtgtgcgcatgctccacgtgaaggatgacttcgttatcggtgccagcggcacgatcgattttgagtcgatcttcaagcagttctatgccaacggcatgaaggactatgtggtggagatcgagatcccgggatggctgcgcgaggagcataacgccgcaggcgagaagctctcgcaggatgagatcatggagcgcatgttcgatgccgccaagcagagcgccaagtacctctcgaaggccaagttcgtgaagtga

SEQ ID NO: 1471 - DNA, 576 bp, unclassified Alistipes
atgaaaaagattctactctacctatcgcttctcgccttcgcggcgacggcactgggctgctcgccccaagccaaatggaatcgtgaacagaagaaggccatgaacgaggctctgaatgcatatcgtcagatggtctacctgcaggatctgaccgatccagagttcgtggtatttgccgacgacgtaaccagcacgctcgaagaggcattccccgtctacacgaccttcatcgagatgcctgccgtcaacgacaccgtcgagttctacgtcataaccaccatcgtcgacgagctcaatgccgatgcgcacaacatgcgtcacctctacccctaccagtatcttgtaagtcagggcgttctgcccgaatggctgacacacgaccagcagaaggcattctaccagtgctttgcccagaaggtcaatgcacaatactcgaccatggaccagttcttcgccgccattctggccgacacgtccgattactcgcagctggcactgttccagcagcagtgcgccaacgatctgttcgactgggtcgtggaggtggatgagcaggtcgagatcacggaggattga

SEQ ID NO: 1472 - DNA, 2334 bp, unclassified Alistipes
atgtgcggcggggagctgcacggcgaagagatcgaggtgcgcggcgtcacggtcgactcgcgcagttgtgcctacggtgcggatgtgatgtttgcggccatgcgtggcgcaaaccgcgactcgcacgaatatgtggcccagatgtacgaccgcggtgtgagggccttcatggtggagcgccttgaggcgcgcatgccgcatgaaggggcagggtatatcgttgtggataactcggttgaggcgttacagcgtctggcggcggcacatcgtgcgtcgttccgcggcgtgatggtgggcattacgggatcaagcggcaagaccgtggtgaaggagtgggcggcatgctcgctgccgtcggcggtgcgttttctggcatcgcccatgagctacaactcgcagttgggtgttgcgctgtcgcttcttatgatcgagggcgacgaggatgtcgcgctgatcgaggccggcatatcggagcgtggtgagatggagcgtctggagcgtatgatacgtcccgatgtggttctcttcacatcgataggggaggcccatcaggcaaatttctcgtctctgcgcgagaaggtggaggagaagatggtgctggcccgcaatgcccgcacatttatataccacagtatgtatggcgatgtggctgcggctctggggtcgctgcctgcggcgtgccgcgtcgcggatgccgcatcggaggatgtatccgagctgccggcatgcaacgaggcgttgcgtgtggatgctcaggaggtaaagagcctctgccgtgagttgggatacggtgtgccccgtctgtcgctcggcgacgccgccatgcgtatggaggtcaaggagggcataggcggctcgaccgttatagtcgatacctacaattcggatatcaattcgctggctctggcattggatacgctgcgcgatgcggcggctgcgggggtgtcgacagccgtgatatacgatatcgctcacagtggcatggatgaggcggaactgtacggacgtgtggcccgcctgatacgcaacgcaggtgtggatcgtgtcatcggcgtcggagagcgtatcggcgcccatgccgatgccttcgacggcgacaaacgtttctacgatacggccgagcagatgttgagtgcgttgacacatgacgatgttgcgggtcgggcgatcctgctgaagggcgaccgccgttcgcatttcgacaaggtgtgccgtgcgttggagcgtcggtgccatacgacggtgctggaggtgaacctcaatgccatgacgcataacgtcaactacttccgtcggttcctgccgatgaatcaccgtctggtggcgatggtcaaggcccacagttacggtacgggcgacgccgaggtggcgcatctgatgcggcatctgggtgtggattacctcgccgtagcatttgccgacgagggaataacgctgcgcgagcgaggtgtcacgatgcccgtagtggtgcttaatgccgatgccgcgtcgttcgacaagatgatagcctactcgctcgagccggagatatacagtttccattcgctcgacgacttcattcgctgtgccgaccgttacggtgtgcgcaactatccgatccacatcaaactcgatacgggcatgcaccggtggggttttctggaggatgagatcgaccgtgtggccgaaatactgatttcgtcgccgcaggtgcgtgccgcaacgatcttctcgcacctctcgtgcgcggatgatcccgcacaggatgactttacgcgcgggcagattgcgctgtttgaccgcatgagccgccgcctgtcggatgcgctgccatacaagcccatacgccatacggccaactcggctgccatagagcgtttcccggaggcgcatttcgacatgtgccgtctggggctgggactctatggctacggatactgtcataacgacgaattggaacccgtggcgacgttgaagacgcgcatcgtgcagatacgccgccgcagtgcgggcgaggccataggttacgggcgttcacagcgtctggagcgcgacagcctcatagctaccgtccccataggttatgccgacggtctggaccgccatctgagcggcgggcggtggtcgatgctggtggcaggacggcgtgccccgattgtgggccgtatatgcatggacagctgtatgatcgacgtgacggatatcgagggcgtacgcgagggcgacgaggcggttgtcttctcggcggcggcaggcaatacgcttgaggatatggcccgtgtgctgggaacgatctcatacgagatcatgacctcggtggcgatgcgtgtgaaacgtatatatacgcgtgagtga

SEQ ID NO: 1473 - DNA, 1500 bp, unclassified Alistipes
atgtttaacatgacggagaatatattgctcgtatgggcgctgctgctctacgttgcggtgatagccggaaaggtggcctatcgtttcggggcgccggccctgttgcttttcctcggcgtgggtatgatgttcggactgcacttcctcaagttcgagtcgttcgaactgacgcagttcataggtatgatcgccctctgtataatcctgttttcgggaggtatggataccaagttctcggagatacgccccattctggctccgggtatcgtgctggcgacgcttggtgtggtgatcacggcggcagtgacgggtgtattcatatatttcttctcgtcgtgggtggggttggccatgtcgctgcccgtatcgttgcttctggcgtcgacgatggcctcgaccgactcggcatcggtattctcgatcctgcgtaccaagaaacagggcctgaaggagaatctgcggccgctgttggagcttgagagcggtagtaacgacccgatggcatacatgctgaccatactgctggtgacggtcgccacatcggccggcggcgacgtgaatctgggacagagtattctgaagtttgtcgtgcagatggtggtgggtgcactgctcggatacggtatcggacgtctgacggtctttacgataaaccgcatcgacatcaagaacaacatatcgctctattcggtgctgctgttggcgtcggtattcttctcgttctcgttcacctcgctgctgtggggcaacggctatctggccgtatatattacgggtctcgttgtcggtaactacaagatcgcccaccgtggcaaccttacgaccttcatggacggattcacgtggctggcgcagatcgtcatgttcatcaccataggattgctggtcaactccgatgagctgatgcgtcccgaggtgttgatcctcggcggggctgtggctctgttcctgatgttcgtggcgcgtccgctggcggtgttcttgggtctgctgccgttccgcaatttcagtcgtcgggcgcggatctttgtttcgtgggtgggcctgcgcggcgccgtacccataatcttcgcgacatatcccattgtcgcgggcgtcgagaacggacgtctgatcttcaatgtcgtattcatggttacgctcatctcgctgcttgtgcagggtactacggtgagcggcatggccaatcttctgggtctggcgttcgaggagaaggagccgctgttcaagatgggtattcccgacagtataaagagcaacttcaccgagatcgaggttacggcctcggccctcgagggtggctcgacgctgcgtgatatcgaacttccggataatacgcttgtggtgatgatatgccgccacggcgaatatttcgtgccgcgcggaaatacctcgctcgaggtcggggacaaacttctcgtcgtgtcggatctcggcgacaaggagctgcagaaggtctacgatacgctcggcataaaggatgtggtgaaattgcagtag

SEQ ID NO: 1474 - DNA, 957 bp, unclassified Alistipes
atgcaaatcgccctcactctgatactcgccctgctggccgtcgccgccctcgccacagccatgcgcgccatcgtcatagcccgcgccgcggcatggatggatatggtcgccataggcgccacggacagctgcgaatcggccggatatgtcggatgctcggtcgtatgcaccggggtggagaacatgcagcagatagagagcctgctcgatgtcgaatatgaccgttacgagaccatagtcgtactcgacgcccgcgccgccggcatcacgttccgcgccatcgtcgcacgctacgacctcatacgcgtcgacgccgacccttcggacgagttcccctcggcgcgcatacgctcactcttccgttcgcgcacgcgcagcatgcggcgcctcaccctcgtcgaccgcgccgccgcctcgccctacgacgatctggacgccggcgccagcgtcgcctcctacgactacatccttcccgtcggacgcgacacctatctcatgcccaacgccatcgagaaggcggtcatagccatagcctcgacgcccgatacgcccatcgccgcgctgcactccgtctccgacgaccagtgctacgttttcaaccgcgagacccttatcgcccaaggcggattctcgcctcatcttctcggcggcatacgcagcggcgaagtgcgccgcacgttcgtgcccctcatataccgcacgagcaacacacggcgcataaaaattgttacccgcctaacaattttaatccttatggcaacgttacttacaatagagactgtcacgctcggcgcacgcctcgccacagcctcggcggcggccgtggcgatggctctggcaaatgcggcatacgcccgtacggctctgggcaggtacaactgtttcgaaaagtcaattttatgttacatagatcgtatgttttccattttgggcaaacgaaaatttactatttcataa

SEQ ID NO: 1475 - DNA, 2091 bp, unclassified Alistipes
atggcgctgttgtcgctgttgccgcggcaggcgtcggcacagctcgacgccgcggctctggcacgtgcgcagcgcaacggcgagaatgtctctttaggcggcgtcaacccctacgatacgggtaccgacgaggggcaggagaagggcgactcgacacgtacgcgacgcataaagcggccgctggagtcgtatctgttcaacgactcgatccgcgcgctgcccaatttctcgtggaccgtggaccgcgacctgaacagcgtcaacatcatgccgctcgacacgcttatcgacaactggcgcatagactattcctattacctgaagggcgtgggtgacatgacgctcggcggactggggcagtcgaccatgccgttcaactacttcgaccgcgcgcagggtcccgacttcaagttcgcacgcgcctacgatgcctatacctaccgtatggacaatgtgccgttctacaactcgaagacgccctatctgaacctgacatatcttgagtcgggtcagaaacgttaccgtgaggagcacttcgagatcaccacggcgcataacgtctcgcccacgacggggttcaacgtgagctacaaggcgcgcggcacaaagggcctgtacgagtggcagaggacgatagaccacaacctttcggtggcattctcgcatacgggcaagcgctactcgatatatgcggccttcatcaacaaccgcatacgccagcgcgagaacggcggcgtcgtaggcacatgggccattgtcgatactgtattcgaacatccgtcgggcgtaccgatgaagttggccgaggccgaagccgagaactcctaccgcaacaactccttcttcgtgaagcagtcgtatgccataccgcttcagcccgtgaccgactacgacttctcgatagcgggcctttcggcagtatatataggtcatgtgttcgagtacaacacgtggagcagactctacaccgacaagtatgccacctacaccaacgaccgcggcagccgcgacgagaacggcgagtatgtccccacgacggagacatactacaaggattggttcatctcgccggccgagtcgcgcgactcgatacgcgaaagggttttgtcgaaccgctttttcgtggaggcgcagccgtgggaccgtaacggcgtggtgggagtgctggacggcggtatcggtatcgacatgtatgcctatacgcagttcgcgctcaaggattacgccgcaggcaagtacggtgtcgaccgccgtacggcgtggtatgcctacggcgccgtgagcggcaagatacgtaaattcgccgactggggagctgacctgaagttctacccgtcgggttacaggagcggagacctcgccctgaacgcccatgtggcgcttacggcgaagttccgcggtcatccggttaccctctcggggcggttctcgcaaacgagactctcgccctcgtattgggaggagaacctattctcgaaccactatgtgtggtccaactctttcgataaagagaatgaaacccgtttcgaagtatcgttggagattcccgattgggcgctcgaactgagcgcatggcagggcgtggtgtcgaacaaaatatattacggcgccgacagccgcgtggcacaatcgggagcgacgataagtctgacgagtttgtacgcccgcaaggatttccgcctcggcggattccatttcgaccacagggtattgttgcagtggagtacgaatcaggaagttatccccgttccattgtgcagcgcctacttgtcgtattattacgatatgtgggtggtgcgcgatgtgttgcgcctgcagatgggtttcgacggacgttacaacaccaagttttacgccccgtcgtataatcccgcacttgcggccttctacaaccaacgcgacgtgcgattgggaaattatccctatatcgacgtgttcgtggcggccaaatggaagagaatgcgcatattcttgaagtaccagcacgcgaatgccggtttgttcggtaacaaccagtatttcaccgttgccggttacccgctcaatccgggtatgttcaagatgggcatctcatggggattctatgattag

SEQ ID NO: 1476 - DNA, 1722 bp, unclassified Alistipes
atgaaacgcacggcgctctacataacgtttcttacactgctctcttcgcttttctgctgcacgccccgcacacatacgggatttatcgttgacagccactttgtcgaggaccatcccgacagtgccatgacactgctgcgcgggatcgacacgcagcgcctcagccgccgagatcgtgcccaatgcctgttgctcaaagggttggctgaagcttatacgggagatactacggccagcaaagagacgttggaacgtgccatgcaatatttcgaccgtcacggctcggcccacaaacaggccgccgcgtggtacacctacgccaaggcatacatgcaaaccggcaacctcgaggaggccatacgcggatatactcagtccgccataatcgccgaaaacgctctcgccagaggctgcaaccacgacgacttgatatccgaatatacgaagatgctgcttgttaccgtctaccacactctgggacttatatacttcgagcagggatacgacgccgtggaaccctttgcgaaggccgtagaggcggccattgctaacggcaacgcggagcaggagggatacagccgattcatgctttcctcggcctattgcgccaacggcaattacaggcaggccatcgagacgatggagccgctcgtcgaggcggccgataccatctcgttccgatatttcgcacaacagatccgcctgcaaaacctcatattccacacctatcttggcgactggacgcacgaacagcttctggaggcacgccgcggcatcgacctcgacgttatccgtaaggctccgctcacatacggacgcgccgctacggatgatacgggacgttcgttctatgacatagcctcggccatcatcttccaacaggaccgtcagttagactcggcccgatactacatagagaaggcacttgacagccgtgacacgttccatcaggggaatgtcggcctttacgctctggcagcaggtatataccacgaccgcggcgacgacgcccgcgcatacgaattcatgcagcagtatgcctcggtgaaggattcgctatccgaggagcagcgcggggcgcatgtagccgagctcgaacgacgattccgcacggccaatgaggtggcgctgcgtgaagcatcgctgcgctaccgcgtgtggatcgccatattgggtgcactgttggtcatcgtagcggctgtgtgggctcttgtcggctaccgccgcaaactgcgccgccgcaacgagcaacttaacgagtcgcttgcactgctcgactcgtaccgcgagtcacacgacagcctgacgtcgcgtctcgacgcctcgaatgcccgcgaagcggccgtaaaacgcctgctcgaaggacgtgtggccgccgtgcgcgacattgccgccacatgctacacatacggtgacggcgagcgccttacggccaagatgcgcgaattggcccttagtcccgccatgcttaacgatgtggtcgacatggctgacctatacagcgaccgcgccgtctcgcgtctccgcgagcagttccccgactggacacgacgaaactacgacttcgcggcgttggtcatagcaggcttctcgccgcaggagatatgcgttatgctgggcatgtcgctcaacggcgtctatacgctcaagtcgaagctcaagcggcgcatagccgaatctcacgccacggaccgcgatacgctgttggcattcttcgcatga

SEQ ID NO: 1477 - DNA, 513 bp, unclassified Alistipes
atgaaaggatttcacgaagtcgatcccgcacagatcaacgacaacttcatacatgacatcggcagcgactggatgctcatcacggcaggcgaccacgtgcgccacaacgccatgacggcatcatggggcggcgtaggcgtaatatggggatttcccgtcgccgtcgccgtaatacgtccccagagatataccttcgggcttgtcgagcagagcgatacgctcaccctatcgttcctgcccgagcagtaccgcgaagcgctcaaatattgcggttcgcactcgggtcgcgacgaggacaaactccacaatgcgggccttgcggtggagttcaccgacaacgatacccccgccatcgccgaggcgcgtctcgtactggagtgccgcaagctctacgccgacatgatcaagcccgagaacttcatcgaccgcagcctcatcgaacgatggtatccgtcggccgactttcacaaggcatacgtgctgcgcatagagaaggcatacgtcaaggattga

SEQ ID NO: 1478 - DNA, 1233 bp, unclassified Alistipes
atgaaagaggctattgcaattctcacgggcggaggtccggctccgggcatgaataccgtcgtcgccagcgtcgccaagacattccttgcaaaaggttatcgcgtaatcggtctgcattacggttattcgggtcttttcaaccccaatccccgtcacgaggatctcgacttcttcaaggccgactacatcttcaatcagggcggatcgtacctgacgatgagccgtttcaagcccacggacaaggatttcgaggagaatttcaaccttgcgttcttccagcagaacaacgtcaagctgcttgtaaccgtcggcggcgacgataccgcctctacggccaaccgcatcgccaaattccttgaagccaagcactaccccatcgcaaacatccatgtacccaagacaatagacaacgacctgcccctgcccgccggcaccccgactttcggttatcagtcggcaaaggagggcggcaccgtcatcggccgcgccgtctacaacgacgcccgcacctcggcaaactggttcgtcgttgccgccatgggccgctcggccggccacctcgcattcggtatcggttcggcctgccactaccccatgatcgtcatccccgagatgttcaacaagaccgaaatcaccgtcgagaagatcgtcaacatggtcgtatcgtcgatcatcaagcgtaagatcatgggcgtcgagtatggcgttgcgatgatctcggagggtgtattccacgccctgagcaacgaggagatcaagaagtcgggtgtacacttcacctacgacgagcacggacaccccgagctgggcaaggtatcgaaggcacacatcttcaacgagatgcttgagaacaagctcaaggagctcaagatcaaggtcaagacccgtcccgtagagatcggttacgaggttcgctgccagacccccatcgcatacgatctggtatattgctcggagttgggtatgggtgtctacaagctcttctcggagggcaagaccggatgcatggtatacatcagtcaggagggttatgtttcgcccctctacctgaaggatcttcaggatcccgccacgggcaagattccgccccgtctggtcgacatcaactcggacaagattcagcaggtgatcaaccacatcatgaactacatcacccccgcggattacgaggctgccaaggcctacgttcccaatcccgaggcttacgatttcaagaagattctcaactggtag

SEQ ID NO: 1479 - DNA, 1848 bp, unclassified Alistipes
atgttgcgtaaaatactattcatagcggcgttattcatcgccacggtgctgctcatggcgctccaaaaaccactcttcctgctgtggtacgccccgctcgcggccgacgcctcggcctcggagctgctcgccgtgtcgtggcacgggctgctgctcgactccacaacggcgggatatgtctgtgtcgtgccgcttctggtgatgatagccacggtgtgggttcccctctcggagcggacagtacgccgtgtactcaatatatatttcgcagtcatatcggtcgccgtcgccgtcatcgtcgccgtcgatctggctctgtataaatattggggcttccgcctcgacgacaccatcctgttgtatctcaagacgcccgaggaggccgccgccagcatcacttggagcgacgtgtggccgcagatgatcgtcataaccatctatacggcgcttatggtcttcgtctaccgacgtctcataacgctatataccaacgacagcctcacgctgtggcgtcgcataggctcgacgctgatattgctcttcggcggcggcctgctctttctggccatacgcggaggtacgggcacctcgcccgcaaacgtgagcaaagtatatttcagtgaccgcatgatcctgaaccatgccgccacgaaccccgtattctcgttcctctcgtcggccgtgcagtccgatgacgggctttacgactacgaatacttcgacgaaccgcagcgtgccgccctgttcgaccctctgcgcggaggtgccgccccctcagaccgcatgcccgaactgctcaccacgacacgtccgaacgttgtgctgatccttctcgagagtttcggccgcaccatcaccgacgaggttgtcgacggcgagcaggtcacaccccacctcaacggcttcaagcaggagggtctctggttcgagaacatctacgccaactcgttccgcaccgaccgcggacaggtggcggtcatgagcggatatccggcacagcccgtcatgtcgatcatgaagctgccgcacaaggcccagacactgccgtcgatagcgcgttcgctgcaggccgagggctatgccacgacgttcacatacggcggtgacgccgacttcaccaatacggtctcgtacctctacggcacgggcgtggagcgtataaccgaccaacgcgacatgcacctcgacgtggcgcccgcacagtggggatatgccgacgacgttgtctgcccgctcttcgcccgtcaggtcgagcagctcgccgccgacggacgccccttcttcgctacgctgcttacgctcagctcgcacgaacccttcgacgtaccctaccaccgtctcgacaacaagatcctcaatgccgccgccttcaccgacgaatgcgtggcccgcatgatcgactcatggcgcggcaagcccctgtgggacaacctgctcataatcctcgtcgccgaccacggcataggctatcccgagggtctggaggcgggatcggtggcacggcagcgcataccgatgctgtggatgggcggcgccgtgcgtgagcccgccgtcatagagacctacgcctcgcagagcgatctggccgcgacgctgctcgccgaaatgcatatcgacacctcggcgttcaccttcagccgcaatatcctcgaccctgcgcagccgcacttcggattctggaccttcaacaacggcttcggcatgatctccggatgcgggcacgtaatatacgactgcacgggcgagaaggtcgtcgagcgcacgggggacgacggctgcgtcggacgcatgaccgacgagggcaaggccctgctccagacaatacataaagacatacgcgaaagatga

SEQ ID NO: 1480 - DNA, 759 bp, unclassified Alistipes
atggcaatgaagaacgaaatggagaagcagggcgtatggcttttccgattcagaggcacgctgcccctgattattctggtgttgggcgtatgcgaatacatcattacccgcatcgacaacccgacctacgtcatcaacggcgcctcgtcgccgcaactcatacactatgagattctctgcttcgtagtttcgctgctcggacttgccgtgcgcgccttcaccgtgggctacaccccggcaaacacctcgggccgcaacgtcgccgagcaggtggccgaccagctcaacaccacgggtctctactccgtcgtacgcaacccgctctacgtcggcaacttcctcatgtggctgggtatcgccatgctcacgatgaacctctggttcatcatctcgttcatactcctcttctgggtatattacgagcgtataatcttcgccgaggagcagttcctcaccaataagttcggttcggtctacaccgattgggccgataagaccccatgcttcataccccgactcaagggatacgtggcacccaaactgccattcagctggaagaaggtgatcaagaaggagaagaacggcctgctggcactgctgctcgtattctggatgatggacgtgatcggcgatttggtctcgggcgtaacaccccgtatcggagtgctcgcgatagcctcgatggccatgctggtcatataccttatcctcaaatatatcaagcacaagaccaccctgcttgacgaggagggccgataa

SEQ ID NO: 1481 - DNA, 684 bp, unclassified Alistipes
atggaagagtttgtagcccgaccggccgtcacgaccgtggatgctccgcatgttgtcgaagcgcgtttcatgcgcaatatcgaacgtctgaccgatgcggagatcatgcccgtcatgcgcgactggctcgtcagctgtcccatcgcctgcgtcgactggcccgaatatccctatgcgccgaaggtgtcgttccgcgtggctcattcggacgaatgtctggccgtgatgttcgaggtcgaggaggagcatgtgcgcgccgtgaccaccgaggataacggtcccgtgtgggaggacagctgcgtggagttcttcgtggccgaccccgtgggggacggttacttcaacttcgagatcaactgtataggcaccgcccttgcggcgcacagatattcgcgcaacgacgcccggcacttcgacgaggtgcgcatgtcgcgcatacggcgcataacgtcgctgccgcacgcctcgatcgatgtgcggggcgagggccagcgttggtggctcgtggaggtcatacccttcgagctgctgggtctgggggaggctccgcggcggctgaaggccaacttctacaagtgcggcgacaagtgcgcgcaacctcacttcctgagctgggcgcccgtacacacgccgcagcccgacttccaccgtcccgaatttttcggggagatagtgctgctctga

SEQ ID NO: 1482 - DNA, 639 bp, unclassified Alistipes
aaaatttatatgacaaataaaaatgaaaattgggagcgcttggagagcgtgatacgttgggcgaacatgaccataaactatttcgggcgttacatcggtttgtcgcgttcggagaacctctaccagatcaaggccggcaaaaacgggatatcgcagaatctggcccgccgcatagcggacaagttccccgaaataagcgtcggatggctgcttacgggtgagggcgagatgctggtcagcgccgtgtcgtcggggcagatcccttttttcgatgtcgatgtacagggccgttctctgctgcgactcgaggagttggagccggagtgcggcatggtgatccccgtgatagaggattgtgactgcgccatgcgctgctacgatacggccatgagcggtgaaataatgccgggaacgatcgtattcctgaaaaaaatagctgtcgaggcgattattcccggcggtacttatgtcatcggaagtcaaaattatatacttttgcgtaaggtacatcccgcggccgaagccggggagcgcgtgctgacgctcaaggcggcaaacgcgggatacgacagtgtccgcatagcggtcgacgatgtggagtgtgtctaccgtgttgtggcgcagttgcgtctgtgttga

SEQ ID NO: 1483 - DNA, 1530 bp, unclassified Alistipes
atgactgaaaagatattgatcatagacttcgggtcgcagtacacgcagctcatagcgcggcgtgtgcgcgagctgaatgtctactgcgagatccacccctacaaccacctgccggcgttggacgactcggtgcggggtgtgatcatgtcgggaagccccttctcggtgcgcgatgccgcggccccgcgcatagacctcacacccgtcaagggacggctgccgctgctgggcgtatgctacggtgcgcaatatctggcgcacttctacggcggcgaggttagccccgcccccagccgcgaatacggccgcgccatgctcacggtaaagcgtgcggacgaccctctgatgcagggactgccatcacctacacaggtatggatgtcgcacggcgacaccatcacccgcgtacccgccggatatgaggtcatagccagcaccgacgatgtcgagatggcggcctaccacatcgcgggcgagcagacgtggggcatacagttccaccccgaggtattccactcgacagacggcacgcacctgcttcgcaacttcgtcgtcggcatctgcggatgctcgcagtcgtggacctcggagagtttcgtcgagacgacggttgccgagctgcgccagaagatcggcgacgacaaggtcgtgctcggactctcgggcggcgtcgactcgtcggttgcggccgtgctgctgcacaaggcaataggcgaacgcctctactgcatcttcgtcgactcgggcctgctgcgatgcaacgagttcgaggaggtgctcgaatcatacaagggcatgggcctcaatgtcaagggcgtgcgcgccgcagaccgttttctgggcgatctggcgggcgtgaccgacccagaacagaaacgcaagatcataggccgcgacttcgtcgaggtattcaacgaggaggcccagcgcattgaggacgtcaagtggctggctcagggtacgatatatcccgacgtcgtggagtcggcttcggtcaacggccccgccgccaagatcaagtcgcaccacaacgtgggcggcctgcctgaacacatgaacctgaagatcgtcgagcccctgcgcctgctcttcaaggatgaggtgcgccgcgtgggccgtacgctcggcatcagcccgctgctcataggccgtcaccccttccccggccccggtctcggaatacgtattctgggcgaggtcacggccgagaaggtcgccgtgctccagaaggccgacaagatcttcatcgacatgctccgcgaggccgacctctacgacaaggtatggcaggcgggagttatgctgctgccggtacagagcgtgggcgtcatgggcgatgaacgtacctacgaaagctgcgttgcgctgcgcgccgtaacatctacggacggcatgacggccgactgggtacatctgccatacgattttctggccaaggtgtcgaacgagataataaacaaggtcaacggcgtaaaccgcgtagtctacgacatctcgtcaaaaccacccgcaacaatcgagtgggagtag

SEQ ID NO: 1484 - DNA, 1230 bp, unclassified Alistipes
gtggcccggcattggcgcagagtccaaaaacggcaactggcgcagcatagtaaaacaccccagacgaaaacggcaacagccgttaagtgcaagaaagggaaaagccgccgggaaggaaaaaataaaaagaaaagaattcaacaaaccgacaaaacacaaccaatttattttatggaagagaagataaggaatatactttcgggtgtgatccaccccgagacgcagcaggatatcgtctcgtcgggcatcgtggagtccgtatcggccgaggggggcaaggtgctggtgaagctctcctttgccaaggcgcacgatccctttgcggcgcgtctgcgcacgcaggcacagcagatgatcgagcgggcgctgcccgaacttaaaggcaatgtgaccgttgtggtgaaggaggcggcaccgcggccgcagccccagccgcagcgtgagagcacaacgcgacaggtgcgccacatcatcgccgtagcctcgggcaagggcggcgtgggcaagtcgaccgtgacggccaatctggccatcgcgctgcgcaacatgggttacacgacgggcatcctcgatgccgacatatacggaccctcgcagcccaagatgttcggtatcgagggctacgttcccgacgccgtgcagaaggatggcaacgactatatagttccggcgcagagcatgggcatcgagcttatgtccatcggtttcttcatacggccggaggatgcgctgatgtggcgcggggccatggccaccaacgcgctgcggcagctgctgcaccagacgctgtggggcaagctcgactacctgctcatagacatgcccccgggaacgggcgacatacacctgacgataatctcggacctgaagatggacggtgcggtcatcgtctcgacgccgcagcaggtagccgtggcggatgtggtgcgcggtgttcagatgttccgccacccgcaggtgaacgtgccggtgctgggcatcatcgagaatatggcgtggttcacgcccaaggagctgcccgacaaccgatattatatcttcggccacggcggggcgaagcgttacgccgcggagtgcgatgcgccgtttctgggcgagatacctatcatacagtcgattatggagggttcggatgatggccgcccctcggcggcaaccgatcccgatgttgagaagtactaccgcgaagttgcgcagcacattgttgacaacaccccgaaaaagtgttga

SEQ ID NO: 1485 - DNA, 1020 bp, unclassified Alistipes
atgaaggtgagaaacatattgattctggcaatggtgatgttaatggcggcgccgatgtcggccaagcccaaataccgcaagggattcctctaccgcgaaggccgtcagcttatgctcaacggcaagccataccgctgcgtctcgttcaactctttccagttgtgcggctgcggccatgactacgaactcttcaccgacgagcagaccgaggcgctcttcgcatcgctgcccgacaacaccattgtccgcacgtgggccacacccgccttccaccaccgcacggactatcttgtgcatctggccaagaaatacgacataaaactgatactctcgctgggtgacggccgcagcggctgcggcgacttcgacggcgcccccgacggtgacggcagcggcaagacgcaggagtggtacgagagcggcttccgcgacaaatacctgcctcacgtcatcgagatgaccacgcgatacaaggattcgcccgccatagccatgtgggagataatcaacgagccgggcgaggccgactgggccaccatacgcgacttcctgcacgaggtcgcggccgtaatcaagcagcacgaccccaaccatctggtcgagagcggcacatttgccggatgggcatacgaaggctacgagaattatcgggccatgcacgacagccccaatatcgacgttggcaacctgcacgaatacgactatgattatcaggagtcgaataccatcgagtcgccgcacttcgagccatgcctcaaggcgatgtacgatctggacaaaccgctgatcataggcgagacgggcatcgagagcggtgacagctgccgcacctcgcgtgagcgccgcgtcgaggccatgcgcgagaagttcgacgtctacatagggatgggtgcaagcgtggttctggtgtggaacctcgcgcgcgaggcccgcacgtgcggctttaccttcgggctggacgacccgctgctcaagatgataaacgaatatcagctaaccatagactccaaggccgaataa

SEQ ID NO: 1486 - DNA, 1158 bp, unclassified Alistipes
atgtacgtacaatcaatcctcgacaccgatctctacaagttcaccacgtcgtacgcctatttcaagctctttcctcaggccgagggaacattcgtcttccatgaccgtgacgatacggtctacgaccagaactttgtggatgacctgcgtcgggccttcgacgagttgggccgcctcgccctcaccgacgaggagttcgactacatggtagccaactgccgcttcatcccgcagaactacttcgagtggctgcgcggcttccgcttcgaccccaaacgcatctctacgtggatcgacgagcacggacacctccacatcgaagcctcggacttcatgtacaaggtgaccctctacgagatcgccgtgctcacaacggtctcgacactgcgcaacagcacccacgcggccgacatgagcggcgtgatgacacgcctgaaggagaagatcgccctctcgaatgccgagcacctgctcttctcggacttcggcacgcgccgccgcttctcgttcgaggtgcaccgcgccgtcatggagtatatccgccgcgaggcccgatactgcgccggcacgtcgaactgctatctggccatgaagctcgggatgaagatgataggcacctatccccacgagctgcccatgttcattgccgccgtcaacggaggcccgcgtcaggcaaactatctggccatggagcactgggtcaacgtatatgacggttacctcggcatagcccttactgacagcttcggctcggaggtcttcttcaagaacttctcgaagaagcacgcctcgctcttcgacggcgtgcgtcaggattcgggcgacccgctgcgtttcatcgacatggccgtggcccgctaccgcgaactcggcatcgaccccatgaccaagaccatcatcttcagcgacgcgctcgacttcccccgcgccgccgagatacagaaggcgtgcgaggggcgcatacgctgctcgttcggtatcggcaccaacatcaccaacgacacgggttacccgccatgcaatatcgtgatgaagctctcgacatgccgcatgaacgacaaacagcagacccgcaagtgcgtaaagttatccgacgtggagggcaaggccatgggcgatcccgccgagatcgaactctaccgccgcctgctcgaataa

SEQ ID NO: 1487 - DNA, 1089 bp, unclassified Alistipes
atgtacctcaagaaactcgtattgataaacttcaagaacatcgcgcaggccgaaatcactctctccgagcgcctaaactgcttcgtgggggacaacggcgcgggcaagacgaacgtgctcgatgccgtctactacctctcgatgtcgaagtcggcgctctcgatgaccgacggccagagtgtgcgccacggcgaggatttctttgtcgtcgagggtacctatgccggcgattcgggctcgaatgatacggtcaactgctcgttcctgcgccgcagcggcaaggtgctgaagcttaacggtaaggagtatgaccgtatggctgaccatgtgggacgttttcccgtcgtgatggtctcgccgcaggacagtgtgctgataaccgatgcggcggaggaacgccgccgttatctcaatgccttcctgtcgcagcttgaccgcgactatctggcctcgcttatgcgttacaatgcggtgctggccgagcgcaaccgtttccttaagagctcctccgacgaacagatgctccagatatacgatatgcagcttgccgaccatgcggcccgtatctatgagcgccgcagggatattatcgaccgcatgcggccgcttgtggcggagttctaccgacagctgtcgggtgaccgcgagcaggtggagatagagtatcgctcggagcttgcgtcggcgtcgatgggggagttgctgttggcctcgcgcgagcgcgacatagtaaacggattcacaacgtcgggcgtacatcgtgacgacatgtcgctgcgtatcggcggctacccgctgcgcaagtacggttcgcaggggcagcagaagtcgtttctcatgtcactcaagttggcgcagtaccgtatccttacggaggtgtgcggcgagcggccgctgctgttgctcgacgacctgtttgacaagctcgatacatcacgtgtggagaacctgctgacactggtcgcaggcgacggcttcggacagatattcataaccgactgcaaccgctcgcgtctggagacgattctgtcgcgcgcaggcgagaagtatgcgctctttacggtcgagggaggcgacatacggtcatga

SEQ ID NO: 1488 - DNA, 1179 bp, unclassified Alistipes
atgaaacagtatgatttcgacaagattgtggatcgtcacggcaccaacagcctaaaatacgacgccctcaaggagcgttacggccgcgacgacctgattccgctgtgggtcgccgacatggacttcgaggcccccgactttgtcatcgacgccatgaaacgacgcctcgaacaccccatattcggatacaccgtcgagtatgacggctattggaacagcatcatctcatggctgcggcagcagcacggctgggaggtcgagtgcgagtggatgcgttacatccccggcattgtcaagggcatcggtatggtaataaatgtcttcacacagcccggcgacaagatcatcatacagccgcccgtctatcatcccttccgtctcgttcctctggccaacggccgtgaggttgtgtacaacccgctcaaaagctcggacggcgaacatttcgagatggacttcgataacctcgaaagcgttatcgacgagcgttgcaaggtgttgattctggccaatccccacaaccctatcggcatcacgtgggaccgcgacacgctggcccgtctggccgagatcgccgcagcgcacaatatccttgtcgtctcggacgagatccattgcgacatgcccctttacggacatacacatacgccctttgccatggcttccgacacggcggcacattgcagcataactttcggcgcgccatccaagaccttcaacatcgccggcatcgtaagttcatactcgataatacccgacaaggccatacgtgagaagttctactcgtggcttgctgccaacgagttcgacatggccacgatattcgccatgacggccaccgaagcggccttcacacacggtgaggagtggcgccgccagatgctgcgctacatcgagggcaacgtcgacttcgtggccgactatctcgaaaaatacataccgcaagtgcgtgccgtcaagccgcaggcttcatacctcgtatggctcgatttctcgcgtctgggtctcgagcacgaggcgttggccgacatgatcatcaacaaggcgcgccttgccatgaacgacggcgccatgttcggcgtcgaggggcggcagcacatgcgcatgaacgtcggctgcccgcgttcggtcattgccgaggccatggaccgtttgaagaaggccgtggatgaactctga

SEQ ID NO: 1489 - DNA, 2511 bp, unclassified Alistipes
atgatcaccacaaaacgtgtaaaaggtcttcttgccgccggcatctgtattgtttgctgtgcggcgttgagccgttgcagtggcacggcctccgataccgaaggcggagaggctctgcagccggtaccattccagagagtgaagatagaggacaatttctggctcccgcgcctcaagacgcagaagcatacgctcgtgccctttgcgctgggcaagaccgaaccggccgtggagaatctccggcgtgtcggggcatatctgcgaggagagaagaccgaaggtctgctgccgttggcacgttacgtggcttccgacctgttcaaggtgatggaaggggcggcttacctgctcaccgtcgagcccgatgaggagctggagcgtcgcatggatgagataatcgatatcatcgttgcggcacaggctcccgacggttatctctacgaatcgcatatcatggggtcggccatggtaaacagcgccgatggtggtacgggtgacaaaccctattcgtgggttgtgcacagccacgaactctacaacatgggacacatgtacgaagcggctgtggcatattatcaggccacgggcaaacgcaagtggctcgacgcggcggggaagagcgcccgccacataaatcacgtattcttcgagggcgaccctgcctataacgacggcaagccggtgaatcaggctcccggacatcaggagatcgagttggctctggtgaaactgttccgtgtgacgggcgattcgctctatctcaacatggcaaaacgttttctcgacatacgcggcgtgacgtaccgtcccgacggtgaaggggtgatggctcccgactatgcgcagcagcacatgcccgtgcgcgagcagcgtacggccgtggggcatgccgtgcgcgccacatacatgtactcggcgatggccgacgtcggtgccctgacgggagatacgacactgcgtccggcgctggagtcgatatggcacgatatagtcgaccgcaagatgcacattacgggcggtctgggtgccgtgcccggcatcgagggtttcgggcccgattatgtcctgccgaacaagaacacctacgacgagacatgtgccggcgtgggaaatgtgtttttcaactaccgtctcttccttatggagcgcgacgcccgttatgtcgacgttgccgaggtggcgttgtataacaatgttctggcgggcgtgaacctcgccggtgaccgtttcttctatgtcaatccgcttgaggccgacggccgcaaggcattcaatcaggggcatcgcggccgctcgccgtggttcgggacggcgtgctgcccgtcgaatctggcacgtctgattccgcaggtacccggtatggtctattcgcagaccgatgacgagatcttctgcgccctgtacgcgggctgctctacaacgctgaatatggcgtgcggcgatgtcacgctgacgcagcgtaccgaatatccgtttgatggcgatgtcgagatcgaggttacgccctcggtcgacggggccgagtttacgttgtggctgcgtgtgcctacgtggtgtacgggcgaagggttcgtcccgggtgagttgtaccgttatgatgacggggttaagtgtcgggccgaggccagtgtgaacgggcaccgtgtccgtgcccgtgccgtgcgcggctttgtacccgtacggcgcaagtggcatgctggcgacaaggtgctgctgcggcttccgatgcctgtgcgcagcagcgctgccgatgagcgcgtcgaggacgacagggaccgtcgctgcatcacgcgcggcccgctggtatattgtgccgagacggcggacaacagctatcccgtgagtgaatattttgtccgcggcggcagtattgagaccgattccgtctaccgtgcggcggacggtgtgctgaagggcatagtcgagatgggggttgaggccgaagcggtggctggtgacggaacgagcgctgcggagcttacgttgataccttattacgcttgggacaatcgcggtgacgacgccatgaacgtatggtttgcccgctcggaggcgacggcacgcgagtcggcgttccattttgcccgaaacatatcgggtgtcaaggcttcgtttacatattcgggcgatgacgaatatgccgtggctgacggtgccgtccccgacaactcttccgatacgaagatcccgcgttggacgagctggcccgagtgcggcaaggagcagtgggtcgaggtgactcttgcgaaacagatgacagttgagagcgtggccgtatattggtatgatgacggaggcggcgtgcagttgcccgtatcgtggtcgatggagtaccgttcgcagggcgagtggcacacgttccgtccatatacgaccgaccgtttcggagtcgagcgcgaccagttcaacatggtgcatcccgacgagcagatcacggccgatgccctgcggctgaagatcgttcccaaggcatctgccgccgccggtatattggagttggaggtgaactga

SEQ ID NO: 1490 - DNA, 672 bp, unclassified Alistipes
atggagagtcgagtaaaacttatacgcaaagaactcaagatgacgcaagagcaacttgctcagcatcttggcatcggcaaggcggccctttcgatgatcgagacgggcaagtgcgggctctcgatgcgcaacaagaacatacttgttcaagatttgaacgtaaatcccgaatggctcgaaacgggcaagggcgagatgttcaacgccgagcctgcctacacggccttccgcctgcgcagcgacaactcgctgcccatgcagagcgtgcccctctactcgatcgaggggacggccggtctggtgcccctgttcacggatcaggcttcgaacaagcccataaactacatacacatacccaacctgccaaagtgtgacggagcgatatacatcgtgggcgactcgatgtacccgctgctcaagagcggcgacatcgtcctctacaagcagctgcagaacatcgacgacatattctggggcgacatgtacctgctgtcgatagatctcgacggcgaggagtacatcaccgtcaagtatatccagaaatccgaccgcgaaggctatgtcaagctggtgagccagaacccccaccatgccgacaaggagatcgaagtgaaccgcatacgcgccatagcgctcgtaaaggcaagcatacgcatgaactcgatacgatga

SEQ ID NO: 1491 - DNA, 1962 bp, unclassified Alistipes
atgattataacgatgaaaaagattgtattgctattggcggccgtgtgttgtgccgtgtcggtgagtgcgggcgaaagacgcatcgcaagtcccgacggaagactcgaagtggtggtctcggacgacggaggccgcgccacgtacagtgtgacttatgacggtgaggtgttccttaagccctcgccgctgggactcaggaccaacgtcggagacttcactcagggcctgacgctgggtgaggagtcggagacgacggccgtggatgagacctacagccttaagaacatcaagaagagtacggtacactatgttgccaaccgtgtgcgcgtacccttcgagaaggagggcaagacggtatttgacgttgagttcagcgtcggcaacaacgacgtggcgttccgttacaatctccaccgtgcgggcgagccacgctgctgcgttgtggagagcgaggcgacgggtttccgcatggccgacggtacgacgacattcctctgccctcagagcggcgccatgggaggcttcgcccgtaccaccccgagctatgagaccccgtacacggtggacgatgcgatgggcaagaacggcttcggcgagggatattcgttcccgtgcctgttccgtaacggcgacaagggttgggtgctgatctcggagacgggtgtcgacagctattactgcgcctcgcgtcttatgggtgcggccgacggcctctacaccataggtttcccgcagcaggcggagttcaacggtaacggaacggcagctccgggcgtgacgcttcccggacgtacgccgtggcgtaccgtgaccgtgggcgccacgctcgccccgatcatggagacgacagtgccgttcgacgtcgtggagcgccgctacgagccttcgaaggattatgcggcggagtacggttgcggtacgtggagctggatcatcgccggcgacggcagcatgaactacgacgagcagcgccgctatatcgatttctgtgccgatatggggtatcgtactgttctggtcgatgctctgtgggatacgcaggtggggtacgaccgcgtggaggagctggctgcgtatgccgcctcgaagggcgtgggtctctatctgtggtacaattcgaacggctattggaatgatgccccgcagggtccgcgcggcaagatggacaacataatcgagcgccgcaaggagatgcggtggatgcagagcataggtatcaagggtatcaaggtcgacttcttcggcagtgacaagcagatggccatgcagctctacgagtcgattctggccgatgccaacgatttcggcctgctggttatcttccacggctgcacgctgccgcgcggttgggagcgcatgtatcccaactatgccgccagtgaggctgtgctggccagcgagaacatgaacttctcgcagggcagctgcgacgccgaggccttcaacgccacacttcacccctttatccgcaatacggtgggaagcatggatttcggcggcagcacgctcaaccgctactataatgcccagaatgcgccgcgcggaagccgccgtgtgacgtctgatgtcttcgcgctggctacggcggtaatgttccagagcccagtgcagcatttcgccttggcgcccaacaaccttcaggacgcgccggcatgggccgtggatttcatgaagaaggtgcctacgacgtgggatgacgttaagttcatcgacggctatccgggccgttatgtcatcatggcgcgccgtcacggcgacacgtggtatgtcgtgggcgtaaatgctcaggatgagaccgtcgagacgaagatcgaccttgcgcagctgggtatcgagggcgaggttacgatgtatgaggacaacgacaagctcgaaggcagcgtgcgccagacgaaggtgggcaagcgcggcgaggtggccgtgtcgatacccaagaacggcgctgttgtcataatcaagtaa

SEQ ID NO: 1492 - DNA, 1047 bp, unclassified Alistipes
atgatacgcaggatcttcattacgctatgcatcgccatgacggccgccgccatcggtacgccgtgcgtcatggctcagagtgtccgatacgacgtgcgcaagatatgggacaacgggtcgcattgcgccttcacctcgctcatacgtttcaagggacaatactactgctccttccgcgagggcgagacccacatcttcgactctcagggcaatgccgagggtaagatacgcatcctcacatcgcgcgacggcaaacggtggaagaccctgccgctgatcggcaagcagggatacgaccttcgggacccgaagctctccatcacgcccgacgggcgcctgatggtcatcgtcggaggctcgatataccgcaaccgccagatcgtggggcgcattccgcaggtactcttctccgaggacggccgcaccttcacccctcccgagccgatcgaactcgattcggcagcgtcgagcggcacggactggctgtggcgcgtgacgtggaacggcgatacgggatatggcgtcaactacgccatgcgccccgacggtgacgccgacatatacctcgtcagcacgaaggacggcatacattacgatctggtggcgacgctccccgtcgacggcttccccaacgagacgaccctgcgcatgctccccgacggtcgcatggccatgctggtacgccgcgataagggcgatacgatgggatactggggcgtgagcgaagccccgtttacggattggaaattcaagcgtatggagttccgcgtgggcggccccgacttcctccccttggacgacgggaacatcatcctcggctcacgcagctactatataccctcacacaacaagacggccctctaccggggctcggccgacggcgatttccaagaggtgctgctgctcccttcaggcggcgacacaagctatacgggccttatggtggagggcgataccctttgggtaagctactactcgtcgcacgagacccccaacgcgtcggtctatcttgcgcgaatacccctctcggtactcggcataaaataa

SEQ ID NO: 1493 - DNA, 1326 bp, unclassified Alistipes
atgaagattacaagagaacagcgtgatcagaatatctcgttactgaaggttctggtcgacgagaaggattatggcgaggctgtcgacaagatgcttcgcgactacaagcgcaaggccaacatcccgggattccgtccgggtatggtccccatgggcgtcatacgcaagatgtacggcaagggcgccgtggccgagcagtcgtaccgcaccgcctcgaacgccgtcttcgagtatctccagaaggagggcatcgactatgtgggtgatgtgatcccgtcggaggagcagggcgatttcgacttcgacaacaataccgagcatgagttcatcttcgagataggcgaggcccccgaggtcaacatagaactctcggagaaggacgagcttacgtactacaagataaagatcgacgagaagatgcacgcggccttcaaggacaactacctgcgtcgttacggccgtctggtcgatgtcgacgccgtagagaaggacgaggccctgacggttgtactcgacaacggcgacatgcgcatcgaggatgcctacgtgggccttatctcgatgagcgacgaggagcgcaagccgtttatcggcaagaaggtgggtgacaagatggaggtcgatgtgaacgagctctacaagaccccttcgcagcgcgccgccgtgcttcaggtcaaggagaacgagcttgagggtgtgaatcccaagttcgagctcgagatcaagcagatccgccgttttgcaaaccccgaactcaacgaggagttcttcaagatggccttcccctcgggtgaggtcaagaacgaggccgagttcgataccttcatcgacggccagatcgagacggagctcaagcgtgagtcggactacatgttcaccatccgcgtacgcaacttcatcatggagaaggccggtgtgaagatgccggaggagttcctcaagcgttggctctatgtgatcaacgagggcaagttcacgaaggaggagatcgagaaggatttcgcgggcttcgtcaagatgttcacgtggaactacctgcagaagcacttcatcaaggagggcaatctgaacgtaacggccgaggaggccgaggccgaagccaaggagtttgcacgtgcgcagttcatgcagtacggcatgccgtcggctcccgacgagatggtcgacaacttcgcaaagcagattctggcaaacaaggagcagtcgcagaagatctacgagaagctctacgaactcaaggtcgtcgactatgtgaagtcgaagatcaaggtcacgaccaagacggtaacgtcggaggagtttgccaaactggcgcaagaggagtaa

SEQ ID NO: 1494 - DNA, 744 bp, unclassified Alistipes
atgaaactgctacatatcatcctcgcgctgctcatgataccgtctctgtcgtggtcgaagatccccgacgaggacgatatcctcgaccgcacgctcgactcttcgtcgccatattactatccgtcgctcatgatgcgatacaacaacctcgacacgctcaccgaggaggactaccactacctctattatggttacacgtatcaggacagctacaagccgctggcaacgaaccgagccgtcgacatgctatacgaatcgctcatgggactcgatcccgatgccgtcaccgacgaggagatgcgcgaggtgatatccatctgcaaggaggcgatgaaggtcgaccccttcaaccccacggtgctaaacatgatggtcttcgcatacggcgcactgggcgacaaacagaaggaggaggcatacttccgccatctgaacggcatacttgagacgatcaagtcctcgggtgacggccgcagcgagaagtacccgatgcatataatcatgttctcgcatgcggtggatgtggttgcgtcgatggacctcacgggcaaacgcgccgagatcatcagccgcaatgtcgaattcataccgctgctgcaacccgtcaaggctcccgacggcaagaagatacgaggcttctactttgattacagccgtatctaccgcaacaagcccgatgacgtgaccttcaagcgcaagcgcacatggcagttcaacaacctcaagccgcgcgaatacaaatag

SEQ ID NO: 1495 - DNA, 1278 bp, unclassified Alistipes
atgaaacgtttggtttgttgtttgctccttgcggcagccgtcatcatcggcggcggacgttgccgtgccaataataacgaagtgggcgtgcgggttattgtcatagacgccggccacggaggcaaagccttcccgggcgccacatacggcggcgtgaaggagaaggatataaatctggccgtggcgctcaagctgggggcgctgatcgagaaggagctgccgcagataaaggtggtatatacgcgcaagaccgatacggcgttgggcaagacgctgaacgaggatctgacggcgcgtgccaacatagccaacaaggcgggcggagacttcttcatctcgatccatgccaatgcggttccgggcaaaccgtcggtggcgggtgccgagaccatcatcatgggcgagagcgagaaggagacgcgttacaacgaggatgccctctacaataacaacaaggacgagctgatagacatgtcggacgagaatacggcggctatggttcgggcctatatacagaatcttcagttcacgtacggcgagtacagcgagatgatggcgcgaatcatgcagtcgcactatgccaaggggggccgcaatgcgcgccgcgtgaaccgccagctgctgaaggtgctctatgccacggatatgccgagtgtgctgacggagctcgggttcatgaccaaccccaaggagttggcctatatgaactcggagaaggggcagaaccagtatgcgcgcattctgtgcgatgcggtcaaggagtatgtgggctacatcgacaagttgacggatgcggcgacggcggcgcaggcaggcggcgaggcggtcatgcgcgggcagagtgcggccgagtcgttgaatgccgcgacaaaggcgacggacaggacttcggcggcagaagcagaaaaggaacagagcgtgaagagcggtgagagtgagcgcaaggcagagactgcgacgcaggccgtaaacagtacggaaaagacggctgcgaagagcgggacgaaatctgcggccgcggcggaaaagaatagttcgcgcagcgggtatgccatccagatcatggcttcggacaaacgcatatcgtccgacgacaggcagttcggggcgtatcgcggcaaggtcgaatgttatgagggcgcgggcgctctaaaatataaatattgctacggcgaattttcgacgcgggcggaggctcagcgcaaccttgcggccgtgcggcgtacgttccgcgatgccttcgtggtgcgttacgagaacggacgcatagcgaaataa

SEQ ID NO: 1496 - DNA, 1035 bp, unclassified Alistipes
atgaaaaaggtacgtttcggtgtcgtaggcaccaacttcataaccgactgggtgatagccggagcgcgtgaggatgtgcgtttcgagcttgcggccgtgtgttcgcgtacgcgcgagcggggcgaggagtttgcccgcaagcatggcattccgcacgtattcacatcgctcgaggagatgacggcgggagatacggtggatgccgtatatatcgccacgccgaactgtatgcacgcacgtcagagtatctattgcatgagtcgcggcaaacatgtgctgtgcgagaagcctatggcatcgaatgcggccgaggcgcgtgccatgatcggggcgtcgcaacgatttggtgtgacgttgatggaggctatgaagagtacgcttagtcccaacttccgtgccgtgtgcgagaaccttcggcgcgtggggcgcgtacgccggtattttgccagcttctgccaatattcgtcgcgatacgacaagttcaaggagggaacggtgttgaacgccttccgtcccgagctgtcgaacggcgccattatggatatcggtgtctatgcgatatatccggctgtggtgctgttcggaacaccacggtcgatcgaggcgcagggtgtcgtgctgtcgagcggagccgacggtcagggcgctgtcaacatgctatatgacggcatgaacgccactgtgttatactctaagattgcggactcgctgcttccgtcggagatcgagggcgaacagggaaatatccttgtcgaccgcatccagaccccgaccgacgtgcgtttctatgctcgcactgcgcccgcatcgggccgaggcgcaaggcccgaacccgaacagttgagtgttgcatcggcccatgacgagtattattacgagattgcggagtttatagatcttgtactggcgggggaggtgtcgtcgcgtgtgaacagccatgcggcgtcgctcgcggtgatggagatcgtcgacgaagtgcgccgccagatcggcgtacactatcccgctgacgataacccgatgttggagatgtag

SEQ ID NO: 1497 - DNA, 1338 bp, unclassified Alistipes
atgagaagattcagacaattgctcgtattgttgttcgttgccggatgcgtgcactccgcatcggcacaacgccgctaccgcatgcatgagcgcaaatcccaacctgccgtatatcttattgccgtcgaacaggacggtacgctgtacgaagcgtatgccagaggccgcgccgctgacgacatcgtggtggacttcgcgcagacacgccgtacgggtttccagcaggtagtcgaccctcagttcatattcaccaccaaaaacaacagattctcactcggtatcggcggttacatcaaccttcgcacgagctatgacttcatgggcgccgtcgacaatatcgacttcatcccctacgacatacccctctattccgactacgccaaccgccaacgcgtgatgatggatgccaccacctcgcgtctgttcaccaaggcggtgatcaactccccgaccataggtcccatcatagcctttatcgacatggacttccgcggcggtgccgagttcagctatacgccccgtctgcgttcggcatacgtctcgctgctgggattcaccgcgggtcgagacatcacgaccttctgcgatctggacgcctcgcccacgacaatagacttccaaggccccaacgcctataacttcaacttcgccacgatgctgcgatacgaacattcgttccacgaccgccacttcaagatgggcgtagcggccgagatgcccgtcgtgagtggcacctatgacgagaacttccgtcccatatcgcagcgcgtacccgacatacccatgtatttccagtatgcatggggagagaaccgcacgagccacttccgcgcatcggccgtgctgcgaaacatgtatctgaacaacgccgtcaccgacaaaaacacgagtctcctcggatggggcgtacaggccagcggccgcatcgagacctgcccctacttcaccgtcttcttcaacggcgtatacggcaagggcataacgccatatattcaggatctcacgggcagcggtctggacttcacacccaacccgatgaatttcgaacagatacagaccatgcctatgtggggctggcaggccgcggggcagatcaacatcataccctcgaaactcttcgtttcgggcggatattcgaccgtacgtgtgaacatgtgcaacggatattacgccaccaacgagtacaagcgcggcacctatatcttcggcaacatattctacaaccttacgcgcaactgcatcctcgcggcagagtatctgcatggctcacgccgcaacatggacgacgcccacaatacggccaaccgtctgaacataatgatacaatacaacttctga

SEQ ID NO: 1498 - DNA, 1125 bp, unclassified Alistipes
atgaagaaaaggatcatctggattgcggcggtgctcatcgtcgtgatcgtggcggccacgctcttcggccgcggcggcaagagccccgaggtcaactacgagacgcaggtcatcgccaccgacaccataaccctctcggtgacggccacgggtacggtcaaccccgtgaacaaggtcgacgtgggtacacaggtctcgggcatcatatccgacatatatgtcgatttcaactcggaggtggagcagggccagctcatcgcgcagctcgaccgctcgacgctcgaggccgaaaagtccgtagccgaggagtcgctctgcgccgcggagctcgactacaagctccagaagaagaacttcgagcgtcagcgcaacctcttcgagcagagcctcatctccgacacggagtatgacgatgccgagacggcctatctgaaggccgagagcagctaccgtcaggccaagctgtcgttggagcgcgccgagataaacctcggctacacgcagatctactcgcccatcagcggcgtagtgctgtcgcgcgccgtcgacgagggacagaccgtagcgtcgggatactctacccccacgctcttcaccatagccaacgacctgcgccagatgcaggtcatagccaacgtcgacgaagccgacatcggcgccgtgaacgagggccagcgtgtcgatttcaccgtcgacacatataccgacgacaccttccacggtacggtgcggcaggtgcggctgcaatcgaccaccacatcgaacgtcgtgacgtacgaggtcgtgatcgacgccccgaaccccgacctgaaactcaagcccgggatgacggccaccacgaccatctatacgatggagcgcggcggggtctttgtcgtgccggcaaaggcgctgcggttcgtaccttcggacataacggcacagcagcgtaaggagctgcccgcacagcatgtctacgtgcgcggcggcgacggcacgctcaccgtgcgcgaggtgacgacgggcatatcaaacggcgtgcagaccgaggtcacgtcgggactcgccgcgggcgactgtatcgtcgttgggctcgccgccgccgacaatgacgaaggggatatttcggtcagcatatcaatgtag

SEQ ID NO: 1499 - DNA, 606 bp, unclassified Alistipes
gtgaaaatcgttatttttgccgaaaatatcgcctgtattatgatggaaaaggaagtggaagcggtgcttgaggtgctgcgacgcgggggattgatcctctatcccaccgatacggtgtggggcatagggtgcgacgctacggacgagaaggccgtggagcgcatctacgaacttaaacgcagcgtcaacaaacactcgatgctggtgctgtgccgcgatgccgacatgatcgtgcgttacgtcaacaaggcgccgggcatagccttcgaggttctggagatggcgaccaagccgctgacgttgattctggagggggccgttggtgtggccccgaacctcatccccgagacggggacgctgggtgttcgcgtgcccgaccacgagttctgccagcagctgctgcggcggttcggcaaaccgatagtctcgacctcggccaacatctcgggtgaggagaccccgaaggggctcgacaaggtgagccgcgagatcatcgacggtgtggattatgtggtgaatccgcgcgtgcagggacaccccacgggcaagcccagctcgatcgtagccttcgggccgcgcggcgaggttaagatcatacgcaagtga

SEQ ID NO: 1500 - DNA, 1341 bp, unclassified Alistipes
atgctcaccgagagatttcaggcatacgtacgcgacaacgagctcttcacgcgtgaggacaagatactgctcacggtatcgggcggcgtcgattcgatggtgctcatgacgctctgcttcaactgcggctacaacgtgggtgtggcccactgcaacttccagctgcgcgggcaggagagcgacgaggacgaaacgatggtactcgagacggcccgcaagtacggcatcgcatgctacaacaaacgtttcgacaccgtaggcgagatggagcgcacgggcgagtcgatggagatggcggcacggcggctgcgatatgcatggttccacgatctgtgcagggaatacggatacacggtcatagccattgcccaccatatcgacgactcgatcgagaccttcttcatcaatctgctgcgcggcacgggactgcgcggcctgacgggtataagcaatcaggtggggcatgtcgtgcggcctctgatgttcgctacacgccgcgagatcaccgagttcgccctccagaaacacatccccttccgggaggattcgtcgaaccgctcgacaaaatatctgcgcaacaagatacgtctgggactcataccccgcatacgcgagatcaacccgcgcttcaccttcatcatgcgccgcaacatcgaccggctggaagatgcccagcgcttcatcgacgcggccatcgacaacatattccgcacggccgtaaccgagtcatcgggcgtatatacgcttcatgtcgaccgcatcggcgagcagagcacccgcgaattcgtcatctacgagatactcaacacccactacggattccgtggagatacggtcgacgccctctgccgcgccctcgacagcggcagctcgggcaagcgcttctattcgcgcaactatacggccgtagtcgaccgcggcaccgtagtcgtagcccccatcgacgagggtgacccgtgcgaagtgaccgtcgagaagggtcagcaccgcgcctactgcggcaactcggccctctacttcgaggtgtgcgatgtggacagtctggccacatactccgcccccgagaatatcgcgctgatggatgccgacaaggtggagtacccgttgacgctgcgccgctggcacgacggcgacgccttcacccccttcggcatggacggccgcaagaaggtgagcgactatctgatcgactgcaaggtgccgctgcccgaaaaacaacgtcagttcgtgctcatctcgggcggccgcatagcatggctcgtgggacgacgcatcgacgatgccttccgtatcaccgactccacggagcgtgtgctccgcataacgcgagaaatcatatag

SEQ ID NO: 1501 - DNA, 4539 bp, Dorea formicigenerans
atgaacgggcaacagcgacagaaaaatgctggcttgtatcgtccttcgtttgaacacgataactgtggtattggagcaatcgtcaatatcaagggccagaaaagtcacgataccgtggcgaatgcattaaagattgtggaacaattagaacatagagcgggcaaagatgccgaaggtaagacaggtgatggagtaggaattctgttacagatttctcacaagtttttcaccaaagtctgtaaacctttcggcatctttttaggctctgagagagattacggcgtaggtatgtttttcttccctcaggacgaactgaaaagaaatcaggcaaagaatatctttgaagtgattgtggaaaaagaaggaatggaattcctgggctggcgagaagtaccggtacatccggatgtgcttggaagtcgtgcagtagagtgtatgccatgcatcatgcagggatttatcaagcggccggaaaaggttgaaaaaggaattgacttcgacagacgtctgtatgtggtacgccgtgtctttgagcagagcagcgatgatacttatgtagcttcactgtcaagcagaacgattgcttataagggaatgtttctggtagatcagttacgtctcttttttgcagatcttcaggataaggattatgaatctgccattgcactggttcattccagattcagtacgaacacgaatccaagctgggagagagcacatccgaaccgttttattgtacacaacggcgagattaatacaatccgtggtaaccgggataagatgcaggcaagagaggaaaatatggaatctgaagctttaaaaggagaacttcacaaagtccttccggcaatcaatgccacaggttctgactccgctatgcttgacaatgccattgaatttatggtcatgagtggcatggaacttccgctggcagttatgatttctattccggagccgtgggcaaataataagagcatgtcccagaagaagaaagatttctatcagtactatgcaacaatgatggaaccatgggatggtccggcgtcaattctgttcagtgatggagattgtatgggagcagttcttgatagaaacggacttcgtccgtccagatattacattacagatgatgatcagttgattttatcatctgaggtcggagttatggatattgcaccagagaaaatcatagtaaaagaaagacttcgtccaggtaaaatgcttctggtcgatacggttcagggacgtgtcatcggagacgaagagctgaaagaaatgtatgcggacagacagccttatggtgagtggctggacagcaatttgattgagcttaagaatctgaaaattccgaatcagttagtaccgacctacaaaccagaggatcttaagagacttcagaaagcatttggttattcttatgaggaagtagaaacttctatcaaaaatatggcactcaacggtggagaaggaactgctgccatgggtattgatataccacttgcggtactttcggataagcatcagaacctgttcaattattttaaacagttatttgcacaagttacgaatccgccgattgacgcaatccgtgaggaagtggtaacatccacgactgtatacatcggagcagacggaaatcttctggaagaaaaagcagaaaactgcaagatgctcaaggtcaataatccgatccttacaaatgttgaccttctgaagattaagaacatgaaacaggatggattcaaaattgcagagattccgactatttattataaaaattccagtctggaaaaagcaatggattacctgtttatcgaagtagatcgtgcaatccgtgacggagcgaatattttgatcctttctgaccgtggtgttgacgagtatcatgtggctatgccgtcacttctggcattgtccggactgcaacagcatctggtgcgcacgaagaagagaacttccgttgcaatcattcttgagactggagagccaagagaagtacatcattttgcgacattacttggatatggagcatgcgcagtcaatccatatcttgcacatgagacaatccgtcagcttattgatacaggtatgctgcagaaagattattacgctgcagttgatgattacaatcacggaatcttaagcggcattgtaaaaattgcttctaaaatgggtatttccacaattcagtcttatcagggagcaaagattttcgaggccattggattaaaagaagaatttattaacagatattttacagatacagtcagccgtgttggcggcatcggtattgaggagattgcacaggattatcttgcaagacattctcaggcatttgatccacttggactggaagtagatctgacactggacagtctcggacaacacaaatccagaagctgtggcgaggaacatctgtacaatccacgtacgatccatatgcttcaacagtctacaagacttggcaattatgaaatgtttaagcagtacacagatatggtaaatgaagaaggtgcccacattaatctgcgaggtcagcttgattttaattatccgaagaaaggtattccgattgaagaagtagagagtgtggatgaaatcgttcagcgattcaagacaggtgctatgtcctacggatccatttccaaggaggcacatgagacgcttgcaatcgccatgaaccgtctgcatggtaaatccaacagtggtgaaggcggtgaagaaatcgagcgtctggatacagaaaaatgttctgcaattaagcaagtcgcttccggacgatttggtgtaacgagcagatatcttgtcagcgcaaaagagattcagattaaaatggcacagggtgcaaaaccaggagaaggtggacatcttccaggaggaaaggtctatccgtggattgccaagacaagacattctacgccaggtgtcagcctgatttcaccaccaccgcatcacgatatttactctatcgaggatctggcacagctcatttatgactgtaaaaatgcaaataaagacgcaaggatttccgtaaaacttgtatctgaagcaggtgttggaactgtcgcagccggtgttgcaaaagcaggagccggactgatcctgatctctggatatgacggaggaaccggagcggcggctaagagctctatccacaatgcaggacttccttgggagcttggacttgcggaaacacatcagacattgatccaaaatggactgcgtgaacgtgtccgtattgagacagatggaaaattgatgagtggtcgtgacgtggcaattgcagcaatccttggagcagaggaatttggatttgcgacagcaccacttgtaactatgggatgtgttatgatgcgggtatgtaatttggatacatgtccggttggtgtggcaacacagaatccggaacttcgcaagaacttccgcggaaaaccggaatacgtcatcaactttatgagattcatcgcacagaatctgcgcgaatatatggcaaaattaggtgttcgtacgattgatgaactggttggaaggactgaccttctgaaagtcaaagaagtgccgacatctgatcgtgcagcaacactggatttaagccagatcctgcaaaacccttatgagggaacaaagacaccaatgacttataatccaaagaagatttatgatttcgaactggagaagacgctggacgaaagagtccttgtaaaagaactgcttccggcacttgaaaagcatcagaagagaagcctggaagtcgatgtcacgaacaccaaccgtacatttggaacaattttcggatcagaaattacaagaagatatccggaaggcgtagaggaagacagttatgtgatcaaatgtaccggagcaggcggtcaatcatttggtgcatttattccaaagggtctgacactggaacttgtaggagacggcaatgattattttggtaaaggtctctcaggcggaaaactgatcgtgtatccaccgaagggtgttacatttaaacacgaagagaatattataataggaaatgttgcactttacggagcaaccagtggtaaagcttttatcaatggtgtggcaggtgagcgttttgcagtccgaaactctggcgcaaaagcagttgtagaaggtgttggtgatcatggatgtgagtacatgaccggcggatgcgttgttgttcttggcaagactggaaagaactttgcagccggaatgagcggcggtgtcgcttatgtactggatctgaacagtgatctttataagaatattaataagcagatggtaaatattgaacgagtaacttcgaagtttgaaatcaacgagttgaaagaaatgatcgaagagcatgtggcttatacgaattctgagagcggaaaagaaattctggatcactttaccgattatctgccgaaatttaagaaaatcattccgattgattacgagaaaatgctttctactatcgttcagatggaagaacagggcatgagcagtgagcaagctagaattgaagcattttacgcaattaaagaaggaagaagatag

SEQ ID NO: 1502 - DNA, 3192 bp, Dorea formicigenerans
ttggcaaaatgctacgtccccaacaaggaggatattatgtataagaaggtttcaacagacatgaattttgttgaccgggagaaggaaacggagaaattctgggaagacaatcacatttttgagaagagtatggaggaccgtgagggctgtccacagtatatgttttatgatggaccgccgactgcgaatggtaaaccgcatatcggccatgttttgacacgtgttatcaaggatatgattcctcgttaccgtactatgaaggggtatgaagttccgagaaaggccggatgggatactcacggactgccggtcgagctggaggttgagaaggctcttggtcttgacggaaaggatcagattgaaaaatatggtgttgagccatttatcaaaaagtgtaaagagagtgtgtggaaatacaaaggtatgtgggaggatttctctaatactgtaggtttctgggctgatatggatgatccgtatgttacttatcacaacacatttattgagtctgagtggtgggcactgaagaagatctgggataaaggacttctttataaaggatttaagatcgtgccttactgtccgcgttgtggaactccgctgtctgcacaggaagtggctcagggatacaaagacgtaaaagagcgttcagcgatcgttcgttttaaagttaaagacgaggacgcatatattcttgcatggacaacaactccatggactctgccatctaacattgcactttgtgtaaatccggaagaggattatgcgaaggtaaaagctgctgacggatatacttactacatggctgttgcccttcttgatacggttcttggtaaacttggcgatgaggagaatggtgtaaaggcttatgaagttcttgagacatacaaaggtcaggatcttgagtacaaagagtatgagccgctttatcagtgtgcttatgactgcgccgcaaagcagaataaaaaagcattttatgtaacatgtgatacttatgtaacattgacagatggtaccggagttgttcatatcgctcctgcatttggtgaggacgatgcgaaagtcggacgtaaatatgacatgccatttgttcagttagtagatgaaaaaggtgagatgggcaagacaactccattcgccggattattcgtgaagaaggcagacccggaagtgttaaaagacttggacggacgaggacttcttttcgatgcaccgaagttcgagcacagctatccacactgctggagatgtgacacgccgcttatttactacgctcgtgagtcatggttcattaagatgacagcagtaaaggatgatctgatcgcgaataataatacgatcaactggattccggagagtatcggtaaaggacgttttggtgactggcttgaaaatgttcaggactggggcatcagccgtaaccgttactggggaactcctctgaatatctgggagtgtgagtgtggatgccagcattcgatcggaagtattgaagagctgaaatctatgtctgataactgcccggatgagatcgagcttcaccgcccatatattgataatgtgacgatcaagtgtccgaaatgtggaaaagagatgcaccgtgtaccagaagtgatcgactgctggttcgacagtggatccatgccatttgcacagtatcactatccatttgagaatcaggaactgttcgagaaacatttcccggcagatttcatctcagaggcggtagaccagactcgtggatggttctactcactgcttgcgatttcaactctgatcttcaacaaagctccttataagaacgttattgttcttggacatgttcaggatgagaatggccagaagatgagtaagtccaagggaaatgcggtcgatccgttcgatgcactggagaaatatggagcagatgcgatccgctggtatttctacattaacagtgcgccgtggctgccgaaccgtttccacggaaaagcagtgacagagggacagcgtaagttcatgggaactctgtggaatacttatgcattctttgtactgtatgcgaatattgatgaatttgatgcaacaaaatatacattagagtatgagaagctgtctgtcatggacaaatggcttctgtcaaagctcaactctgcgattaaagcagtagatgaggatctggcaaactacaagatcccggaggctgcaaaggcacttcagagctttgttgatgatatgagtaactggtatgtaagacgcagccgtgagcgtttctgggcaaagggcatggagcaggataagatcaatgcttacatgacactttacacagcactggtagagatctgcaagactgcagctccgatgattccgttcatgacagaagacatttaccagaacctcgtaagaagtattgatgcaaatgctcctgagagtatccacctgtgtgatttcccgaaggtaaatgaagcacacatcgacaaagagcttgaggagaatatggaccgtgttctgaaactggttgttatgggacgtgcctgcagaaatactgcaaatatcaagaaccgtcagccaatcggacagatgtatgtcaaagctgattttgagctttccgagttctttgatgccatcgttgccgatgaattgaatgtgaaaaatgtaacatttacacaagaagtacgtgactttacgtcctattcttttaaacctcagctaaagacagtcggaccaaaatatggtaaactgttagggggaatcaaaaatgtactcagcggactggatggaaatgctgctatggatgagctgaatgcaaatggttgcctgagatttgaggtaaatggtgaagaagtagtcctgaaccgtgaagatcttctgatcgatactgcacagatggaaggatatgtatctgaggatgacaacggaatcacagttgttcttgatacgaacttatccgaggaacttctggaagagggattcgtgcgtgagatcatcagcaaagtacagacgatgcgtaaggaagctgatttcgaggtcatggataagatcgtgatcacatatgaaggaagtgagaaggcagaaactgtatttgcgaaaaatgctgatgagatcggagctgagacactggctctggaggtgaaaaaagcgacacctgcaggttatgtgaaagagtggaagatcaatggtgaggcagtaactcttggagtagagaagcaataa

SEQ ID NO: 1503 - DNA, 4578 bp, Dorea formicigenerans
atgagtaaaccgttctttgaagtattccctacgttaaaggcaggggaagatatacgtaatatgttcgaaggagcgcaggtattaaaagtgacgaccaactctgaccggacatttttaagagtacatatagtaagccgtcatctgattcagaaaacattggtatacgagatggagcacctgatcaagaaccagcttttcggaagaagtgccgtgcaggtagagattcgagaaaagtatgagctgtccggacagtacacgccagagaatgtgatggcggagtatctggacagctttcttgcggagctggatacaagaagtgttgtagaacgcaatatgctgcagaatgcgaaatgtacctttgaagaaggaaatattctttgcatgcagttaatcgacactgttattgcgcaaggaaaaaaagattctctgacagattatttaaaaggtgtgtatgcagaccgtttcggattgcccattgagattcgtgtcatgtataaagaaccaaaagaaagtactttgaaatacaatgatatgcgtctgcagcaggaagtagacagtatactggatcaggttgaggctgtacagaagcaaaaagaggaaaaaaagcaggaaaaaaagcaggaaaaagaagcaaagtctggggaaaaagaaacatctggaagcggacaaggtggaaaaaattccggagacggaaaaaattctggcagtcctgcaaaaggtggattttcaaaaggcagtggattccagaagggtggatttcgtgataagaaggtgtttgtgaaatctgcgaagatggatcttgatgagtcaggtttgatttacggacgtccatttgacgatgagccgattgaactgtcaaccgtgattggtgagatgggagaaattacatttcgaggaaaagtcattagctttgatacaagagaaatccgcaatgaaaagaccattgtcatgtatgcagtgacagactttactgatacgatcatggtcaagatgttcgtgcgtaatgatcaacttgcagatgtactggctgaaattaaaatgggtgcattcctgaaaattaaaggcgtgaccaatattgataaatttgacggcgaacttgtcatttcttctgtgtttggaattaagaaaatttctgattttacagaagccagaaaagacaatgcggtagaaaagagagtggagctccactgtcatacgaaaatgagtgacatggacggagtttccgaggtcaaagatcttgtaaagagagcacatgactgggggcataaggcaattgcgattacagatcatggtgtggtacaggcgttcccggacgcgaatcattatattgagacactggataaagacgatccatttaaagttatttatggtgtggaaggatatctggtcgatgatttgcaggatgtggcagtcaatgagaaaggtcagtctttaaaaggaacctatgttgtattcgatctggagacgacaggatttagttcggtaaaagataagattattgaaattggtgcagttaaagttgagaatggagaaattacggataagtatagtacatttgtgaatccgaagattccgattccatttcgaatcacacagcttacaagcattactgatgagatggttatggaatcaccggagattgagacaattctcccacagtttctaaagttcgtaggagatgcagtgctggtagcgcacaatgccagttttgatgtgagctttatcgaagaaaattgcaggcagcagggcatagaaccggattttacttctgtagatacggtgggacttgcccgtgtattattaccgacactttcaaaattcaagctaaacgttgtggcaaaagcactgaatatttctcaggaacatcaccatagagcagtggatgatgccagagttaccgcagagatttatgtgaaatttattcagatgctggaagaacgtggaatcgagacactggatcagatgaatcattttggcgcgcacaacgcggaagcaatccgtaagatgccgtcttaccatgtcattgttctggcaaagaatgatattggacgcgtgaacctttatacattgatttccaagtcacatctggagtattttggacgtcagccgagaatgccaaagagcgaagtgttaaaatacagagagggtctgattattggaagtgcttgtgaagcaggagaattgtatcaggcaatactgggagaaaaatctgcagagcggattgccagaattgttaatttttatgattatctggaaatacagccacttggaaataaccggttcatgattgatagtgatcgtgtggagaaggttcaaagtgaggaagatttacgtgagattaaccgtgagatcatccgtcttggagaacggtttgataagccggtcgtggcgacctgtgatgtgcactttatggatccggaagatgaagtgtaccgccgtatcattatggcaggaaaaggattcaaagatgcagatcagcaggcaccgttgtatttgcatacgacagatgaaatgctggaggagtttgaataccttggttcagcaaaagcaaaagaaattgtcattgacaatcccaatatgattgcggatatggtggaaaaaatatcaccagtccgcccggataagtgtccaccggtcattccagattcagataaaacgcttcgtgaaatatgttataacaaggcacattctatgtatggagatccgcttccggagattgttacagagcgtctggaacgtgagcttaattccattatttccaacggattcgccgttatgtatattatcgcacagaaattggtgtggaaatccaatgaggacggatatctagtaggatcccgtggttcggtaggatcttcctttgttgcgaccatggctggaattacagaggtaaatccattaagcccacattactattgcccgaagtgccactacagtgattttgaatccgaagaagtacgggcttacgcagggggctgtggatgggatatgccggataaggagtgcccggtgtgcaaaaccaggcttgtaaaagatggatttgatattccgttcgaaacattccttggatttaaaggaaataaagagccagatatcgatctgaacttctcaggagattatcagagtaatgctcataaatatacggaaattattttcggagccggacagacgttccgtgccggaacgattggtacgttggcggataagacagcatttgggtatgtaaagaactattttgaagagcggggaacaagaaagagaacttgcgaaattgacaggattgttcagggatgtaccggtatccgcagaagtaccggacagcatccgggaggaattattgtacttcctcacggggaagatatcaactcattcactccggtgcagcatccggcaaatgatatgacgactgatattattacgacacattttgattatcattccatcgaccacaacttgttaaaattggatattctgggtcatgatgatccaaccatgatcaaggcacttgaggcatatatcagttcgcctgctatggaaaatgagtacaatgagacggatcatccatttgtagcaacagatatccctctggatgatcagggggtaatgtctttattccatgatacatcggcacttggaatcacaccagatgatatcgggggatgtccggtaggatgtcttggaattccggagttcggaacggatttcgtaatccagatggtagtagatacaaaaccacagacactttcagatctgattcgtatttccggattgtcccatggaacggacgtatggctgaacaatgcgcaggatctgattaagagcggtaaggcaaccatttctacagcaatctgtacccgagatgatattatgacatatctgatcaacaaaggactggatagtgaggaatccttcacgatcatggagcgagtgcgtaaaggtaccgttgcaaaaggaaaatgtaaagattggccggagtataaaaaagatatgttggaacatgatgtgccagagtggtacattggttcctgtgagaaaattaaatatatgtttccgaaagcccatgcggcagcctatgtcatgatggcatatcgtatcgcctattgtaaggtaaattatccgctggcatactatggagcatattttggaatccgtgcagatgcattttcttatgaaattatgtgtcagggcaaggaaaaactgcaatactatattgatgattatacaagacggtctgattctctcagtaaaaaagaacaggatacaatgaaggacatgcatattgttcaggaaatgtatgcgaggggatatgagtttctgccaatcgatatttatcgcgcaaaagcaacaaaattcagcatcatagacggaaagctgatgccaccgttttccagcattgacggaatgggagagaaggctgcagaagcggtggaggaagcggcaaaagatggtccatatctgtccaaagatgattttagaaaccgtacgaaagcaagtaagacggttgtagattacatggcagatttaggacttttaggagaccttccggagtccaatcagttgtcattatttgatctttaa

SEQ ID NO: 1504 - DNA, 4245 bp, Dorea formicigenerans
atggttcaaaacgacatttacactctcggtattgacatcggttctactacagttaagattgctgtattagaccaggacaacgaagtactgttctccgattatgaaagacattttgccaatatccaggagactttatctgatcttcttggtcgtgccattcataaacttggtgccatccacgtctctccggtcatcaccggatctggcggactgacacttgccaagcatctgggggtacctttcgttcaggaagtcatagccgtatccacggctcttcaggactacgctcctcagaccgatgtagctattgagctcggcggtgaagatgctaaaatcatttattttgaaggcgggaatattgaacaacgtatgaatggtgtctgtgccggtggtacaggttcttttattgaccagatggcatctcttcttcagacagacgcttccggtcttaacgaatacgcaaagaattacaaagcactttacacgattgctgcaagatgtggtgtatttgcaaagacagatatccaaccactcatcaatgacggtgctgcaagagaagatctggctgcctccattttccaggcagttgttaaccagactatcagtggtcttgcatgcggtaaacctattcgcggacacgttgcattccttggcggacctctgcattttctctccgaactgcgcaaggcatttatccgtacattgaatctggatgatgagcacatcattgccccgaatcattcccatctgtttgcagccattggttctgccctgaactcaaaaaaggatctggacgtaccaatccaggagatgcaaaagcgcctggaaggcaagattaagatggaatttgaagttgaccgtatggaacctttgtttgcaagtgaagctgactttcaagagtttaaaaagcggcacgacaaggatcaggttcccatcagagatctggctacctataaaggaaaggctttccttggtattgatgccggatctaccactacaaaggcagctcttgtcggcgaagacggaacacttttatattccttctatcacaacaatgacggagatccgcttggtacaacaattactgcgatcaaagatatttacagcaaattaccagaggatgtacagattgtacactcctgctctaccggatatggagaagctctgatcaaagcagcccttctccttgacgaaggtgaagtagaaactgtctctcattactatgctgcttctttctttgagccggatgttgactgtattctggacatcggcggtcaggatatgaagtgtatcaagatcaaaaatcagaccgttgacagtgtacagctcaatgaggcctgctcctccggctgtggttcatttattgagacatttgcaaaatcactgaattattctgttgaagattttgcccacgaagctttatttgcaagaaatccaatcgaccttggaacacgttgtactgtatttatgaactccaaggttaaacaggcacaaaaagaaggtgctgaggttgctgatatttccgcaggacttgcatattctgttattaagaatgcgttattcaaggtcatcaaagtttctgatgcatcggaacttggaaaacatatcgtagttcaaggtggaacattctacaacaatgctgtccttcgaagttttgagaaaatcgcaggatgcgaggctatccgtccggatattgccggaattatgggcgcatttggtgcagctctcattgcacgtgaacgttatgtagaatgcgaaggcacgactatgctctctattgaggacattgaggccatggaatattctacaactatgacaaaatgtaaaggctgtacaaataactgtcgtctgacgattaatcatttcagcggcggacgtaagttcattaccggaaatcgatgcgaacgcggacttggaaaagcaaaatccgagaataagctgccaaatttatttgaatacaaattaaaacgttattttgattatgaaccattgccggaaggatctgcaaaacgcggtgtaatcggaatcccccgtgtattaaatatatacgaaaactatccgttctggttcacatttttcaatcagcttggattctctgtcaaactctctcctgcttctacaagaagcatttatgaactcggtattgagtccattccaagtgagtctgaatgctacccggcaaaactggctcacggacatgtacaatggctgatcaacgaaggtgtgaaacacattttctacccaagcattccttacgagcgcaatgaatttgcagactctgacaaccattacaactgcccgattgttacttcttatccggaaaatatcaagaataacattgatgccattgtaaatggagaagttgattttatgcacccattcctctcttttgccagcgaggatactatctcctatcgcctggtggaagaacttggaaagaaatttgatatttccgatcaggagatccagtctgccgtccatgcagcatgggaagaacttgtagcatgccgtgaagatatgcgtcgaaaaggggaggaagttatcaaattcctggatgagaccggaaacagaggtattgtactggcaggacgtccatatcacattgacccggaggttaaccatggcattccagaactgatcaattcttataatattgctgtgctgactgaggattccatctcccacttaaatccagctgagcacccactcaacgtgatggatcagtggatgtaccattcccgtctgtatgcagcggcaaactatgtaaaaacaaaagacaatctggatctgatccagctcaactctttcggttgcggactggatgcggtcacaaccgatcaggttgcggatattttaaataattcagataagatctatacatctctgaagattgatgaagtcaacaacttaggtgctgcaaggatccgtgtccgctctcttctggctgctatccgcgtcagagaacagcgaaatgacaaacgtacgattcattccgcagctattgaaaaagtatctttcacaaaggaaatgcgtgagaattacacgattctctgcccacagatgtcaccgatccacttcgaactgatggagtctgcatttaaagcttccggatataacatcgaagtccttccaaatgacaacaaacaggcagtagatgtggggcttaaatacgttaacaatgacgcatgttacccgtcccttatggttgtcggacagatcatggaggccatcctttccggcaaatatgatacacacaagattgctgtcatcatcagccagaccggtggtggctgccgtgcttccaattatatcggatttatccgccgtgccctaaaaaaagccggttacgaatatattccggttatttccatcaacttaagcggactggaagaaaatcctggatttaagatcacacccgctctcgtacttcgtggtatttacagcgtagtatttggtgatatctttatgaaatgtgtgtatcggttaagaccatacgaagctgttgcgggatctgtgaatgcaatgcatagaaaatgggtggaagtatgtaaagagtttgtctcttccggctatccttccagacgaaaattcaagaagttatgccagcagatcatcgaagactttgacaataatatcgaacttttagatgttaaaaaaccacgcgttggcgttgtcggtgagattcttgtcaaattccttccggcagctaataatcatctggtcgatctgctggaaagcgaaggggctgaagctgttgtcccagatcttctggacttcctgcagtactgcttctacaatcagaactttaaagtagaaaagcttggatttgcaaaatcaaaagcaactgctgcaaactggggcatcaaggtcatagactggttccgcgctccggctaccgaagcatttaagaagagcaaacattttaacccgccggcagatatccgtgatctcggaaagatggcttctgacattgtatctcttggaaatcagactggtgaaggctggttcctgaccggcgaaatgttagagctgatccacagcggtgcaccaaatatcgtgtgtacacagccatttgcctgcctgccaaaccatgtagtaggcaagggtgttattaaagagttacgaagacgctacccacagtcaaatatcgtagcgatcgactttgatccgggcgcaagtgaagtaaatcagttgaatcgaattaaactgatgctttccacagcaaacaagaatttagaggcgtaa

SEQ ID NO: 1505 - DNA, 3528 bp, Dorea formicigenerans
atgcgacttttcggtcaagttgtaattgcccgtgggattagagagaaaaaggctaattgcaaaccaataaaaaaagagaggaagaagacaatgaaacagttcaagaaagttctggtggcgaaccgtggggaaatcgccattcgagtattccgcgcgctcaatgagctcggaattgtgacagtcagcatttattctaaggaagacagatacgctcttttccgttccaaagcagacgaatcctatcccctgaatcctgataaaggaccgatcgatgcatatcttgatattgatacaattattaagatcgcactgaatgcaggcgtagatgcaatccatcctggatatgggttcctgtcagagaatccggagtttgtagatgcatgtgaacagaatggcattacatttattggaccttccagtgatattatgagagcaatgggagataagatttcttccaaacagattgccattgcagcagatgtaccgatcatccctggagtagatcacgcgatgaagtcttatgaagaggcagcgaagatcgcagacatggtcggatatccgattatgctgaaagcttccaacggtggtggcggacgcggtatgcgtattgtcaatgatccggctgatctggaaaaagaattcaatgaagcgagaaatgaatctaaaaaagctttcggtgatgatatgatcttcgttgagaagtatctgaaaggaccaaagcatattgaggttcaggtgatcggagataattacggcaatgttgtgcatctgttcgaccgtgactgctctgtgcagagacgtcatcagaaagtcgtagagtatgcgccggcatttaccattccagacgagacaagagagaagatttttgatgcagcaatccgtctttgtaaaaatgttggatatgtcaatgcaggaacactggagtttctggtagacagagataacaatccatactttattgaaatgaaccctcgtattcaggtagagcatacagtcagtgagatggtgacaggaattgatatcgtgcaggctcagatcatggttgcagaaggatatgctcttgattcagaggagatacatattaaatcgcaggaagatgttacatgtaacggatattctattcagactcgtgttacttctgaagatccggcaaataacttcctgccggatacaggtgagatgacagtatatcgttccggttccggtaatggtatccgtctggacggtggctgtgcatatgtcggagccgttgtatcaccacactatgacagtctgcttgtaaagattatttctcatgaccgtacctttgcaggtgcagtgagaaaatccgagcgtgcccttcaggagatgcgtatccgtggagttaagacaaatattccgttcctgatcaatgtgctgaaccacccgacattccagtccggtcagtgttacacaacatttatcgaggagacaccggagttattccgcctgacacacagcctgaaccgtgcgactaagatcattgagtttatcggtgatcgtatcatcaattctgacatgggtaagaagaaacagttcgataaccgtattctgccgacatttgaccatgataaaccggtctatggtgcaagagatgaatttttaaaacttggtgcagaaggctacatgcagaagattttaaaagaagaaaagctttatgttacagatacaagtatgcgtgatgcgcagcagtcactggtggcaacacgtatgcgtagcaaagatctgtgcggtgccgcttatgcgacaaatgcatttatgcagaacgcattttcagtagaggcatggggaggtgctacatttgatacagcgtaccgattcctgaaggagtcaccgtggaaacgtctgacaactttaagagagcgtatgccgaacacattgatccagatgttgcttcgtgcgtccaatgccgttggatacagcaactatccggacaaccttgtaaaagagttcattcagatttcagcagagaatggaatcgatgtattccgtatttttgacagtctgaactggatcgagactatgaaactgccaatcgaggaggcacttaagactggaaagatcgttgaaggtgcaatctgctatacaggagatattacaagtccgaacgagacaaagtatacattagattattatgtgaagatggcgaaagaactggagtctttaggatgccattctattgcgatcaaggatatggcaggacttctgaagccgctggcagcaaaagaactgatcagcacactgaagagagaacttcatgtaccattacatttgcatacacacgattccacgggaaatggtgtaagtactgttatgatggcggcagaatccggcgtagatattgtcgacctggcaattgagtctatgtcatcactgaccagtcagccgtctatgaacgcagtagcagaggcacttcgtggaacaagacgtgacacaggcctgaagccggaggaactgacagaattaagtcactactacagccgtgtgcgtgaagtatatgcaccatttgaaagtgatatgaaatctccaaacacagagatttacaaatatgagattccaggaggacagtactccaacttgcttgcacaggtaacaagtatgggatcaccggatgattttgaagcaatcaagggactttacaaagacgccaatgatctgcttggaaacatcgtaaaagtaactccaacttccaaggcagttggtgatctggctatctttatgtacaagaatggcctgacaaaagataatattctgacagaaggtgctggattatcctatccggattccgtcgtatcttatttccagggtatgatgggacagccgtatggtggattcccgaaggaactgcagaagattgtcctgaaagatattaaaccactgacagaacgtccaggtgcacttctcccggcagttgatctggatcagattaagaaggatctgtgcgagaaatatcattatgaggatcgctcagaagcagatatgtgcaagaaagcagtcagctatgcgctgtatccgaaggtatatgaggactattgcgaacactttgagatttacaatgatgttacaagattggaaagtcacgtatacttctatggccttagaaagggtgaggagacttacttgaagattggcgaaggaaaggaacttctgatcaaatatctggaagcaagtgagccggacgaggacggataccgaacattgatgttccaggtaaatggatctatccgtaacgtcaagattctggataagaaattggagatcaagacagatcgtaagcttaaggcaagcaagtccaatccgaaacagcttggagcaaatatcccaggtatcgtaggaaatgttcttgtcaaagagggagatccggtcaaagtcaatacaccgcttcttactctggaagctatgaagatggagacaatcgttgtatctacgatcgaaggtgttgtagacaagatttatgtaaaaccaggtgagacagtgcatcaggacgatctgatgatgtccttccagtaa

SEQ ID NO: 1506 - DNA, 3873 bp, Dorea formicigenerans
atggaaaagaacagaattcgtcccatgaaaagcggaaaaagctcacgaatgagttattccagacaaaaagaagttcttcagatgccgaacttgattgaagtgcagaaggattcttatgattggttccttaagtcaggattgaaggaagtatttgaagatatttccccaattacagattatagcggtaaattaagcctggagcttgttgatttcacactgtgtgaagatgatgtgaaatacagcattgatgagtgcagagatcgtgatgcaacttatgcagcaccgctgaaagtcagagtaagacttcataataaagagacggatgagattaacgagcatgagatctttatgggagatctgccgctgatgacacgtactggtacatttgtaattaatggtgcggagcgtgtaatcgtaagtcagctggtacgttcccctggtatttattatgcaattgcacatgataagctgggtaaaaagctttattcctctactgtcattccgaaccgtggtgcatggctggagtatgagacagattccaatgacgttttttatgttagagtagatagaacaagaaaggtgccgatcacagtacttattcgtgctcttggaatcggtacaaatccggagatcattgaactctttggtgaagaaccgaagattatggcaagttttgagaaagatgctgcaacaaactatcaggaaggacttcttgaattatataagaagatccgtccgggtgagccgcttgccgttgacagtgcggaaagtctgatcacaagtatgttcttcgacccaagacgttatgatctggcgaaagtaggacgttataaattcaataaaaagcttcttctcaagaaccgtatttcaggacatgttcttgcggaggatgcagtaagcccgattacaggcgaggtaatcgctgaggctggaacaaaggtgacaagagaaattgcagatcgaatccagaacggagctgttccgtatgtatggatcgacagaccggaagaagagagaaatgtcaaagttctttctaatatgatggtagatctgaaggaagttgttgacattgatccggaagaggtcggtgtaacagaacttgtttactatccggtacttgcaaatctccttgaggaaacagcaggagatatcgatgagctgaaagcggctatcaagagagatatccatgatctgattccgaagcatattacaaaagaagatatcatggcttctattaactacaatatgcatctggagtatggtcttggtaatgatgacgatatcgaccacttgggtaacagacgtatccgtgcggtaggagaacttcttcagaaccagtacagaatcggtctgtccagaatggaaagagtcgtaagagagagaatgacaactcaggatctggaaggaatttcaccacagtccctgatcaacataaagccagtaactgcagcggtaaaagaattcttcggatcttctcagctgtcacagttcatggatcagaacaacccgcttggtgagctgactcacaagagacgtctgtctgccttaggacctggtggtctttcaagagaccgtgccggattcgaggttcgagatgtacattattcccactatggaagaatgtgtcctatcgagacgcctgagggacctaacatcggtctgatcaactcactggcaagttatgcaagaattaacgagtatggatttattgaagctccatatcgtaagattgaccactccgatccggagaatccgcgtgtaacagacgaagttgtttatatgacagcggatgaagaggataactatcatgtagcacaggccaacgagacactggatgaggaaggacattttgttcataagaacgtatccggtcgttaccgtgaagagactcaggcttatgagagaaaagcatttgactatatggacgtatctcctaagatggtattctctgttgctacagctttgattccattccttcagaatgacgatgctaaccgtgcgctgatgggatccaacatgcagcgtcaggcagtaccgcttcttatgacagaggcaccggtagtcggaacaggtatggaagaaaaagctgctgttgactcaggagtatgtgtagtcgctgaggaagcaggagttgttgagcgttcaacatcagcagaaatccagatccgccaggatgatggaaaactgaaaaaatataaacttacaaaattccttcgaagcaaccagagcaactgctacaatcaaagagcaattgtattcaagggtgacagagtggagaaaggcgatgtgatcgctgacggtccgtctacatctaatggtgagcttgcattaggaaagaacccgctgatcggattcatgacctgggaaggttacaactacgaggatgcggttctcttaagtgagagacttgttcaggatgatgtatatacatctatccatattgaggaatatgaggcagaagcccgtgacaccaagcttggaccagaggaaatcactcgtgatatcccgggtgtcggtgatgatgcgcttaagaatctggatgacagaggaattatccgcgtcggtgcggaggtccgtgccggagatattcttgttggtaaagttactcctaagggagagacagagctgacagccgaggagagactgcttcgtgcaatcttcggtgagaaagcacgtgaggtcagagatacatctctgaaagtacctcatggtgagtacggtatcgtagtagatgccaaggtatttacaagaagcaacggcgacgagatgtcaccgggagtgaaccagtctgttcgtatctatatcgctcaaaagagaaaaatctctgttggtgataagatggccggacgtcatggtaacaagggtgtcgtttcccgtgtacttccagtagaagatatgccgttcctgccaaatggccgtccgcttgatatcgtgttgaacccgctgggtgtgccttcacgtatgaatatcggacaggtccttgagattcacctgtctctggcagcaaaagcacttggattcaacatttctacacctgtatttgatggtgcgaacgagatagatattatggatactcttgatctggcaaatgactatgtcaacttaagctgggaagagtttgaaaagaaacataaagaagagctgcttccggaagttctggattatctgtatgagaacagagatcacagaaaactctggaaaggtgttccgatttcacgagatggtaaagttcgtcttcgtgacggaagaacaggagagtattttgacagcccggtaacaatcggacacatgcattatctgaaacttcatcacctggttgatgataagatccatgcacgttcaacaggtccttactcactggtaacacagcagccattaggtggtaaagcacagtttggtggacagcgttttggagagatggaggtatgggctcttgaggcttatggcgcatcttacacattgcaggagatcctgactgtgaagtctgacgatgtaatcggtcgtgtgaagacatacgaggcgatcatcaagggcgagaacattccggaaccaggtattccggagtcattcaaagtacttctgaaagagcttcagtctctcggactggatgttcgtgtacttcgtgatgacaatacagaggtggagattatggaaacttccgatatgggagagaccagcttccgctcactgatcgaaggagatggaaaatatcgtcgtgatgaggaagacttcggcaaacacggttatacaactcaggagttccagggagaggaacttgtaaatgaggaaccggaagaggacgaagacgattacgattcagattatgacgacgatagttttgatgactatgatgacatgtcagatgatgaatag

SEQ ID NO: 1507 - DNA, 3540 bp, Dorea formicigenerans
atggcaagaaaaatgaaaaccatggatggtaatcaggccgcagcacatgcttcatatgcatatactgaagtagcagctatttacccaattacaccatcatctgttatgccggagcatgtagatgagtgggctacagaaggcagaaagaatatatttggagagactgttcaggtaacagagatgcagtcagaggctggtgcagcaggagccgttcatggatccttggcagcaggagcacttacaacaacatttacagcatctcagggattgctgttgatgattcctaacttatataaagttgcaggggagcagcttcctggagtattccatgtatcagctcgtgcacttgcaagtcatgcactttcaatttttggagatcactctgatgtttacgcctgtcgtcagactggtgcagctatgctgtgtgagtctagtgtacaggaagttatggatctgacaccagttgcacattgtgcagcattaaagggaaaacttccatttatcaacttctttgatggattccgtacatcacacgagattcagaagattgagacttgggattatgaagatctgaaagatctggtagatatggatgcaatcgatgaattcagaaaacatgctctgaatcctaatcacccatgccagagaggttccgctcagaacccggatatcttcttccaggcaagagaagcatgtaacccatactacgatgctatgccggcaatcgttcaggagtacatggacaaagttaatgctaagattggaacagattataaactgtttaactattatggagcagaggatgctgagaaagtcatcatcgctatgggatctgtctgcgatactattgaggagacaatcgattacttaagagcagccggagagaaagttggagttgtaaaggttcgtctttacagaccgttctgtgcacaggcacttatcgacgctattccggacactgtaaaatatatcaatgttcttgacagaacaaaagagccaggagcagaaggagagccattatatctggatgtcgtatctgcactgaaaggatctaagtttgatagtattccggttaattgtggacgttatggattaggttctaaagatacaacaccggctcagattgttgctgtatttaataatgttgacagaaagagatttacaattggtattgaggatgatcttacacatctgtcactggaagttggagctccgctggttacaacaccagagggaacaatcaactgtaagttctggggacttggagcagatggtactgttggagctaacaagaactctatcaagatcattggtgacaacacagatatgtatgcacaggcttattttgattatgattctaagaagtccggtggtgttacaatgtcacacctgcgtttcggtaagaagccaatcaaatctacttacctgattcacaaagcaaactttgtagcatgtcataatccatcttatgtaaataaatataacatggttcaggagttagtagacggaggaacattccttctgaactgctcatgggatatggaaggtcttgagaaacatttaccgggacaggtaaaagcttacattgcagaccacaatattaaattctacacaatcgatggtatcaagattggtaaagaaatcggacttggcggacgtatcaatacagttcttcagtcagcattctttaagcttgcagcaatcattcctgaggaagaggcaatcgaccttatgaagaaagcagcaaaagctacttacggaagaaaaggtgacaagattgtacagatgaactatgatgctattgatgccggtgcaaaacaggttgtagagattcaagttccggattcatggaaatcttgtccggatgagggactctttactccggaagtaaaagacggccgcgcagatgtagttgcatttgttaaaaatattcagtcaaaagttaactcacaggaaggtaataacctgccagtatctgcatttgttgattatgctgatggttctacaccttcaggatctgctgagtatgagaaacgtggtattgcagtagatattccggtatggaaatcagaaaattgtgtacagtgtaaccgttgtgcatatgtatgtccacatgcagttatccgtccggtagcacttacagaagaagagctcgctaaagcaccggaaggaacagaagcaatcgatatgatcggtatgccaggactgaaatttacaatgacagtatctgcttatgactgtacaggttgcggatcttgtgtcaatgtatgtccaggtaagaagggtgaaaaagctcttgttatggagaacatggaagcaaatgcaggttctcagaaagcatttgactttggccgtgagatcgaggtaaaaccagaggttgttgcgaagttcaaacctgcaacagtaaaaggaagtcagttcaagcagccactgttagagttctcaggagcttgtgcaggatgtggtgagacaccatatgcaaaactggtaactcagttatttggagatagaatgtatatcgctaatgctacaggatgttcttctatctggggtaactcttcaccatctacaccatatacagtaaacgctaagggacagggaccggcatggtctaactcactgttcgaggataatgctgaatttggttatggtatgttacttggccagaaggctatcagaaagagattaaaagcagaagttgagacaattgctgcaagcgataaagcatctgcagaagtaaaagcagcttgtcaggaatatcttgacacatttaactgtggagcatctaatggtgacgctacagataaacttgttgcagcattagatggttgtgattgtgatacatgtaaggacatcgttaagaacaaagacttcctggctaagaaatcccagtggatctttggtggagacggatgggcttacgatatcggatttggtggtgtagaccatgttcttgcaagtggcgaggatattaacatcatggtattcgatacagaggtttattctaacacaggtggacaggcttcaaaagctactaagacaggtgctacagcacagttcgcagccggtggtaaagagacaaagaagaaagaccttgcaggaatcgcaatgagttacggttatgtatatgttgcacagatcgctatgggtgctgattataaccagactgtaaaagcaattgcagaggcagaggcttatccgggaccatcactcatcattgcttacgctccatgtatcaaccatggtattaagaaaggtatgagcaaagctcagactgaggagcagttagcagtagagtgtggatactggaataacttcagattcaaccctgcagcagagggcgctaagttcacactggatagcaaagagcctaaggaagaaggatatcaggaattcctggacggagaagtacgttacaatgcactgaagagatctaatccggagaaggcagcaagactgttcaagaagaatgagcaggaagctatggagagatatgagtatctgaagaaacttgtaacactctatggaacagaagagtag

SEQ ID NO: 1508 - DNA, 3582 bp, Dorea formicigenerans
atgggagtaaaatggacaaaacagcagcaacaggtcattgatcttcgggaccgcaatattcttgtgtctgcagcagcaggttcgggaaagacagcagtgttggtagagcgtattattacaatgctgactgatgaggaacacccggtcaatgtggacgaacttctgattgtaacatttacagaagcagcggcaggtgagatgaaagaacgaatccggggtgccattgaaaaggcattagaagagaatccggaaaatgaacatctgaaaagacaggcgactttgatccacaatgcgcagattacaacaattcacagtttctgtctttccgtaatccgtgatcattttcatgtaatcgatattgatccaggtttccgtactgcagaagaaggagaactgaaacttttgcggcatgatgtattagatgaactgctggaagaaaagtacgcgcaaaaagaagagcggttcttgcggttttctaatgcctatggtggaagaagaaatgataaaaagctggaagaaatgattgagaaggcttacgattacagtcggagctatccagacggagagggctggcttgattcttgtgttgatgcatatagagtcgactgtgcagaagatctggaaaaaagtgattatggaaacaaaattgtaacttgggcgaaagcctacctggaagaagcaaaactattgaatgaacaggcaacgcaaattagtctggaaatagatggcccagctgtgtatgaagaggctttgaagctggatgctcagacaataagagagctcttaagtgcaaaaaattataatgagctgtctgggcgcatccagaatgtagagtggagcaggtttgcatcatgcagagataagactgtatcgaaagaaaaaatagaagcagttaaagattttcgtgagcaggtgaagggaattgtcagtggtctgaagaaagattatttttatcagaaaccggaagaaatggcagcagatatgcagatatgtcttccttatatggaagaattggtgggcctggtaaaatgtttttcgcaaagatttgacgcaaagaagcgccaggaaaatgttattgatttttcagatatggagcagtttgcacttcagatcctggcaaaaaaaacagaagaagggtttgaaccttctgaggttgcaaaggaatatcaggatcagttccgggagattatgattgacgaatatcaagatagtaatctgatccaggagacaattctgaccagtatttccggtgtttcgaaaggaaaatataatatttttatggtgggagatgtcaagcagagtatttatagcttccggctgtccagaccagagctttttatggaaaaatttgacacgtatgatttggaaaaaggaccaaaacaaaggattgatcttcataaaaacttccggagtcgaaaagaagtactggacagtgtgaattacatttttcggcagattatgaagcgaaatcttggagaaattgattacgatgacaaggcggcattgtatgtaggtgcagaatatcctgaaaatccggggtgtgaaacagaagtacttgtattaaatacagaattgaaaaaatatgaccgttccataaaagcctccaaacaggagatggaagctcggatgatcgcaagccggatccgcaggctaattgcagagcagaaggttctggataagaagacaggaaaactgcgtccggcaagatattccgatattgtcattcttaccagaagtgtgaaaggaattgctgacatattcgtacaggaactgaatcgggaaggaattccggcattttcaggtacaaaagaaggctattttgcgacgcaggaaatcggtgtgcttctggattatctgagagtgctggataatcggaaacaggatattccactggcggcggttcttatgtcggcattttgtggactgaacgaacaagaaatggcagtgatccgaagttctgaagcttttgaaattccattttaccaggcggtagaaaattatctggaaaacggagaagatacagtaatatgtgagaaactcaaacattgctatggaaaaatgaatgatttccgcgaaattgttccgtatacaccaatccatgaacttctacggagtattctgacacaaaccgggtatggtcagtttatttcggcaatgccgggaggcgcgcagcgtgcggcaaatgtagaaatgctgattacaaaagcgcaggcatttcagtcttccagctataaaggactttttcattttgtgcgttatattgagcagcttcagaaatttgaagtggattatggtgaggcaagtctggaggatgagcagtcagacacagtccgtgtcatgacaatccataaaagtaaaggactggagtttccaatcgtgtttgtagcaggaactggtaaaaaattcaatgtgacggatcttgccggacaggtgatcattcatgccagactgggagtcggtatggacgtggtagatttagatagaagaacgaaaattccaagtctggtaaaaaaagtgattcaaaaagaagcgaagcttgataatttaggagaagaacttcgtgtgctttatgttgcactgacaagagcaaaggaaaagctgattattacaggaacctgtgataatctagagacaaaaatggcaaagacactgacttttgcacagagaagtagtgctatccaatatctggactggatcataccggcacttgcatatataccagaagagataccggtcactttcgaagaagtgttgctagaagagattgtccgtgatgaggtggagacggaagtatccggaaaaatacaggaagaaatattacgaagatgggacacttcagcagaatatgatgcaaatgtaagacaggcattagaagaacagttcgcatatcagtatccttatccaaaaagtcatgccagaaagatgaaatttacagtatccgagctaaaaaaaatggcttatcaggcagaacttgacgatgaggaaaatgctttgggagaagtagtttttgaagaaccggaagttgtaccgcttcttcctaaatttatgacagaagaagaaacgctgaccggagctccgcgaggaactgcttatcaccgcgtcatggaacttcttgattttgaaaaaatgtatgataggcagacactggaggcagagataaacacatttgtagaacaagggcgaatgacgcgagaaatggcagattccgtccggacagccgatgtgttgggatttcttgatagttctgtgggaaaacgaatgagaacaagtgcagattgtggaaaactgtggaaagaacagccgtttgtacttgggataccggagcaggaattatataaagatgagccagaaggagactttgctcttgtacagggaatcatagatgtgtactttgaggaagaagacggactggtcgtactggattacaagacagacaaagtatataagatagaagaactggtggaaaaataccatgcccagctagattactatggcagggcactggaacagattaccgggaagaaagtgaaagaaaaggtgctgtactcttttactttgggcgaagcctgcagtttgtcttaa

SEQ ID NO: 1509 - DNA, 3405 bp, Dorea formicigenerans
atgtctttaaaattcgtatttgggccgtctggttcaggaaaatcttatcaattatatgattatgtgatccgggaatctgtaaagttcccgaatcgtcagtatattgtccttgtaccggagcagtttacgatgcagacgcagaaggatcttgtcatgcaacatccgaatcatggaattatgaatatcgatgtacttagttttgtgaggcttgcttaccgcatctttgaggagaccggtgggcaggcccttccggtgttggatgatgagggaaagaatctgattctgcgaaagattgccggtgattatgaaaaggatttaaaagtcttaaagggaaatatgaaaaagcttggctatatcagcgaagtcaaatcagtgctttcagaatttgatcagtacgatattggggaagaggaactgaggcagatgaaagcagcagcaggggagaattcaaggctttattataaacttcaggatctggaagttctgtatattggttttaagaaatatctggaagatagatttattacgaaagaagaactcctggacgcactttgccgtgtagtgaaaggttcggatattttaaaagaaagtacgattgttctggacggattcacaggatttacaccagtacagaaccggctgcttggagaacttcttgaagtatgccgggaagtgattgtaactgtaacaatggatgatcgggaaaacccgtacgtttataaacacccatatcagttatttgcactcggcaagcataccgtgacatcgttaatacagattgcggcagagagaaaagtgagtgtggaagaagctttgtgtctgtacgaacgtccactctatcgattctgtgacaattcggctatggagtttctggagagaaatatattccgctatagcaaagaatgttataaggaaaaacagggagcagttcgggtacatgtggccagaaatccaagagaagaagcgatgaaagctgcaggaagagttcggaacctggttcggacaaaaggatatcgttaccgggatatcggagttattgtaagcaatatggaggtgtatggtgatgacctgggacaggcatttgacctctacgaaattccggtgtttatggatcataagcggagtattcttttgaattcttttgtagaatatatccggagtcttctgaatatggtgaaagataatttcagttatgagagtgtatttcgtttcttaagaacaaatcttagtggttttacttatggtgaagtcgatgaactagaaaattacgtaattgcacttggaatccgtggatataagaaatggcaggagagctgggtccgccgcccgaaatatatggaagaagaaaaactggaaattctgaatcataaccgggttcgtcttgtggaaaaggtggacacgcttgtgtatgtattaagacaaaggagcaagacagtcaaagatgtgacgatggcgctttatgagtttatggtgagagaagaacttcagttaaaattgcagcgtcagtctgaagcatttcaagaggcaggagaacttgcgcttgccaaggaatacagtcaggtttatcgtattttgattgaactatttgataaattcgtagaacttcttggtgatgagaaggtgaccatggatgaatatctgaagcttttagacgcgggtcttgaagaagcaagagtcggagtcattccacctggaattgatcaggttgttgttggagacatgcaacgtacaagattaaaagatattaaagcacttatttttgtcggggcaaatgatacatttcttccgggagcattaataaggagtggtcttcttacagagcgcgacagggataagtttgcaacaggaaagatccatctgtcaccgggaggtaaagagaaagcgtacgagcagaaattttatctttacatgaatctgacaaaaccttctgagacattggatatttattacagcaaggtttccgcggacggaaaaagtatccgcccatcatatctgatccaggagatgcagagattattttcgggtctggaaatagaagacgaagaaaaacaggcattttctgcccaggagtggaccccaaagcttggtatgcaaaaagttatcagaggatttcaggacgggaacgctatggatcaggaatggcaggaattatattcctggtacaagagacagccacagtggcagtatcgtgtagaagaacttatgaaatcaggattttatacccggccggcagatggactgacaaaagaggtggctaagcagctttatggagaacattttcaggacagtattacgagaattgaacggttttcagcctgcgcatttgcgcattttcttacttatggactgcgccttcgagagcgtcagacatacgaattccaaccgctggatctgggaaatgtgtgccacagtgccctggagtattattccagaaagctaaaagaagagcatttgtcctggacagagatcgaggaagaaaaaagacaagaatacattgatgatagtgtggaacatgccatttccgactatgggaattcggtgctttacagttcggcgcgcaacgagtatatgattgagcgcatgaagcgtcttctgacgagaaccatatgggcgcttacaaagcagttggaagcaggagattttgtgccggtggcttatgaaatgcgttttgagaatggtaagattgaccgtgtggatctgtgcaaagacaaagacaaggtctatgtcaaggttttggattataagaccgggagcaaggcctttgatgtggtggctttatatcacgggctccagcttcagcttatggtctatatggacgcagcagtaaaaatgactcaaaaacattacccggacagtgaggtgattccggcaggtgtcttttattaccgtttaaatgatcctcttgtggagaagaaagtggttggagaggaagaagaaatctggcagaaagtactaaaagagctgaaagtggatggcgtgatgaatttgaaagatgagacactggagcatctggatcattgtcaggccggagaatctgctgttattcctgtgaaatataataaaaacggtagtctgtcaaaaaattcaaaagttgcatcggagcaggaatttgaagtgatgatgcgccatgccctgggaaaagtattaaaggtacatcgaaaaatattaagtggagaagttgcagcatttccataccggaggaaacaggagagtggctgtgattattgtgcataccggcatatctgtggttttgaccagaaaataccgggatacaaatatcgggatatttttgagatgacacagtcagaggtgatagcagccatggaagcagatgcagtcaaagagaacatgaatcgggacgatcatgaaaaggagcaggagaaaggaacgggctcatgggagtaa

SEQ ID NO: 1510 - DNA, 3768 bp, Dorea formicigenerans
atgagtaatgtaagaagagtgtatgttgagaaaaagggcagctatgatgtccagcagaaggcacttgcacatgagattcgcaattatcttggaatcaaagacgtagagtatgtgcgtatcttgaatcgttatgatgtggagaatgtatctgatgagacatttgaaagagcatgcaatggtatctttgctgaaccaccggtagatgtcctttggaaagaggaggctcctgttggttccggagacagtctgttttccgtagaatttcttccggggcagttcgatcagagagcagattctgctgttcagtgtatccagttcgtaaaagaggacgagcagccggtcatccgtactgcaacgacttatattattcatggtaagaatggagctattacagaagaagaacttcagaagattaaggaacactgcatcaacccggtagactcaagagaagcagcagaggagaagccggagacactagtgacaaaatttgatgagcctgctgatgttattgtatttgacggatttaaggatatggaagaggaagagcttaagaaattatatgattctcttggacttgcaatgacattccgtgacttccagcatatccagaatcatttcaaaggggaagagcaccgcgatccttccatgacagagatccgcgtactggatacttactggtcagaccattgccgtcatacaacattttcaacagaacttacagaagtttcctttggagacggagattatcgaaaaccgatggaagatacttacaatcagtaccttcgcgatcacagcgagatttttaaagggcgtgaggacaaatttgtatgtctgatggatcttgcattgatggctatgagaaagctgaaaaaagaaggcaagcttcaggatcaggaagagtcagatgagatcaatgcctgcagtatcgttgtaccgatcaaggtagatggcgtggaagaagagtggcttgtgaactttaaaaatgaaacacacaaccacccgacagagattgagccttttggtggagctgctacatgtcttggcggagcaatccgagatccattatcaggacgtacttatgtataccaggcaatgcgtgtgaccggagcagcagatccgactgtgtctatcaaagatacaatgaaaggaaagcttcctcagaagaaactggttcgggaggcagctcatggatatagttcttatggtaaccagatcggacttgcaactggtgcagttaaggagatctatcacccgaattatgtggcaaaacgtatggaaatcggagctgttctcggagcagcaccaagacgtgcagtaatccgtgagacttcagatcctggtgatatcattatcctgctcggtggacgtaccggacgtgacggctgcggtggagcaaccggatcttctaaagtacatacagaggagtctatcgagacttgtggagcagaggtacagaaaggtaatccgccgacagagcgtaagatccagagactgttccgcagagaggaagtcagcaaattaattaagaaatgtaacgactttggagccggaggagtttctgttgcaatcggagaacttgcagacggacttcaggtagatctggacaaagtaccgaagaaatacgcaggacttgatggaacagaaattgcaatttctgagtctcaggagcgtatggctgttgttgtagacccgaaggatgtagatgaatttatgggatatgcagcagaagagaacttagaggcaacaaaggtagctgtcgtaacagaggagccaagacttgtattatcctggagaggtaagaagatcgtagacttatccagagcatttttagatactaacggtgctcatcaggagacaaaagtagctgtagatattccaagccgcaaagacagtatcctcgtaagagaagaagtgacagatgtcaaagaaaagtggatggagacattaaaagatctgaatgtgtgctcacagaaaggtcttgtggaaatgtttgacggttccattggagcatcttctgtatttatgccgcatggcggacagtatcagatgacagagacacaggctatggttgcaaagcttcctgtactgacaggagactgcgatacggttacaatgatgagtttcggattcgacccgtatctgtcaacatggagtccgtaccacggagctatttacgcagtgacagagtctgtagcaaaaattgtggcagcaggaggagattacagtaagatccgtttcacattccaggagtacttccgccgtatgacagaggatccacatagatggagccagccattcgcagcacttcttggtgcttacagtgcacagcttggatttggtcttccttctatcggtggaaaagacagtatgtccggaacatttgagcatattgatgtaccaccgacactggtttcttttgcagtggatgtggcaacagaaaaagatattattacaccggagcttaagaaagcaggagataagcttgtatggcttcagatcccgacagacgagtatgatgttccggtttatgaaaaagttatggaccagtatggtaaatttactgctgatatccatgacggcaagattgtggcagcttatgcacttgacagacacggaatcgttccggctgtcagcaagatggcatttggtaatcgcatgggtgtaacattagatgcgagcgtagaggcaaaagacttgttcgcacctgcatttggagatctgattgctgaagttccggctgacaagctggatggactgacgattgattacacagtcatcggtgaagtgacagaagagcagaattttgaatacaaagatacaaagattgcccttgcagatgcccaaaaagcatgggagagtacactggagagcgtatttgctacaaattccaaagcagagggacaggacgagaagattgacacaggtctttttgatacaaaagaagtacatatctgcgaacacaagatcgctcagccgactgtatttattccggtattccctggaacaaactgtgagtatgacagtaagagagcctttgagagagcaggagcaaaaacaatcgtaaaagtattccgcaatatgagtgcttccgatattgtagattctgtcgatgtatttgaaaaagcaatcgcgcagtctcagatgatcatgttcccaggtggattcagcgctggtgatgaaccggatggttctgcgaaattctttgcaactgcattccagaatgcgaagatgaaagaggcggttgagaaacttcttggggagcgtgacggactggtacttggtatctgtaatggatttcaggctcttgtaaaactgggacttgttccaaatggaacaattacaggacagacagaggattctccgacactgacttacaatacaattggacgccacatttctaagatggtgtacacgaaagtagtcagcaacaagtctccatggctttccggagcaaagcttggcggagtttacacaaacccggcatctcacggagagggacgttttgttgcaagcaaagagtggcttgacaagctgatcgcaaatggacaggttgcaactcagtactgcgacccacagggaaatgtatctatggatgagacatggaacattaatggttcctatcttgcaatcgaaggtatcaccagcccggatggaagagtatttggtaaaatggcccattcagaaagacgtggacgttccgttgcaatgaacatttacggagaacaggatctgaagatctttgagtctggagtgaaatattttaaataa

SEQ ID NO: 1511 - DNA, 3333 bp, Dorea formicigenerans
atgctgatgaataattggggcggtgtcagccacaagatcatggagttccatgagtatgtgaatctgttcagtggtaagagtggctctggaaaatcaacagttatggatgccattcaagtcgttctgtacggaagtatttccgctacatttctaaataaggcggcggacgatgcgaagaaccgccgaagtgtgctcagttacctgcgaggtgcgcagaaagacggctcttacaatcgtgatggacaggacttctgctctcagatcgtactggagatatttgacaccggaacgaaggtgagcacttgtatcggtgttgcattcgaagttggaaaaaatgataccgatatccgaaagtatacatttttcagccactccgggaaaattccggaggacgagtatctgacggagaaaggtgtgccatatacaattgcaggactcagaaagcttgtggaaaagcgggtggattcttcggacaatcgtggacgaggtgatgtgaatcgtctttatccgtcaaaagaggcatatctgaaaacggtttatgatgtgatctttggatatgtggagccggggcgcatgatgaccatggaaaagagtgcgattgcccttcgcatgacaaatggaacgggtcagtttatccgtgattatatgttcccgaagagtaaggaggacacggtttcgaccatcagtgaccagcttggtgcgtaccgtgagatcaaagagcgtgtggaagacctggagaatcggatccatcttctggatgagatcagccggcagaatctggcacttcagacgacgcgggcggataagatccatgtggaacaggtgttaaaatatattgatattgaaagtttcaagacgaagattgaggcgagaagtcaggatcttatggatatcaatgagaagattcgtgccagagaaaaacagcagaatgagaataatgagaaaaagacacagcttacgaacgcacttgttgaggtagaagcggaactaaaatccagtgattatggtcagaaggagaaggagttgaagagtcttaaggagaccattaagcttctggcccgcaacagtgagcagtggcgcgaggttgtaaaaggacttgcccgctgggaggaagatgaagagatcagtgcctatgtgagcaatccggcacttcagaggattgatgagatcaagtcgggaaatgtttcaaaggaagcaattgagaagctaaagaaacaactaagtgacgcgctggagagcattaatgaagaagttgatgaaatcggtacaagaatcagtcagaaccgcaaggatttgaaagagaaaaaggaaatggtggaggatctgaaaaacgaccgcaaaccataccgaaaagagttaaaacaggcaaggcaggagttacagaaccgtctgagcacacaatatggaagaaccattcacgtcaacattttcgcagacctttttgatattacagatgagaagtggaaaaatgcgattgaaggtcgtatggggcgtgtgaaacacagtcttgtgaccgcaccggagtacgcccttgatgcagcgaaagtatttcgtaagcttcaatatcttggtgggattgatgaagtagatctgttagatacggccgcaattgtgaagtccgagccaaaagttcatgacaattcgatctatgaggctgttcatgcagaagaaccatacgtggaccagtgcttgcgccgttatctcggaagaattgccaaatgcgagacagaggaagaacttcgtgcctccggaaatggtgtgacagccgactgctattcctataataattacattttccgtcatctgaagaaaaatgattacgaaaaatatgcctgcattggaacgaaggtttctaaggcaaagcttcgtgaaatggaagatgaggttctgaagctgagtgaagaagtattgcaagatcagcagatgcagcaaagcctgaaagcagcccagggatttgagcggctgaaccaaagcatagatcagatcctgcatctggccggggcaggagaagagctgcaggcattttacgagaaacaggatcagctggagaaggaactgcgagagcttcgcgaaggaagcagaactgcggaactcaatcagcagaagacagaattagaagtaaaaatccaggaaattgagaagatatctgaacagcttcagaaagaaatactgggctatgccaagacacagggacaggcagagcaggagatcgtgaatttccagaatcgtatggatttcctgatgcagggatttgtactgaatgaagaactgcagactgaagtccaggaagcattaaagatacaatctgagcagacataccgacgtaagaaaagtaaagaatctgaagagctgatgaagcaggaagaggaagtacgtgatcttctgacccgtgcgagaaatcagttcaatcaggcatatccatcctatggcctgacgggcgtagaacacgaaaatgtttcttatgacaggattttgaatcaatgcagacaggactttgagccgaagtataaagatgaatttcagaaacagtatgatctgatctaccatacgcttcgtgaaaatgtaatcgcgacgatccacggtgaaatcaaagcggcataccgtcacaggaaagaaatcaatcgtatgctggcaaagattaaattctctgacagtatttaccagattgatattcttccggcagaaaatgaaaatggacagttctatgagatgctgatggcaccggaattggacagcaaagtgctggacgatgatggtttcgacggacagatcacgcttggcgaagacacattttatcagaagtacgagcaacagatcttgcgcctgacagagaaattcatgcctccgaaagacgaagatgccaagtccttaagtcagcaccgtcagcagatggagcagtacgtggattaccggaattatctgaccttcagtatgtatgaacgagtagaagatgaagatggaaatgtgaaaaaaaatgcggtcgatgacatggcagggcgtgattccggaggagaaggacaaaatccgaaatatgtggcacttctggctggatttgcaatgctttatatgcagcagacaaaccgcgattccaagataagactggtacttttggatgaagcattttccaaaatggacaaagaacgaagcgaagtctgcctgcactacgcaagagaactggaattacagttgattgtgtgcgtaccggacgagcggctgcagtccttgatccgaaatgtggacagtgtgtacggatttagaagatatcagaatcaggtaagtatgatgcatatcgataaaggagaatatctggatatgattgaggggaagatttga

SEQ ID NO: 1512 - DNA, 3291 bp, Dorea formicigenerans
ttgaaaaacaaaatccagaaattttcgaaagggaacttccggaccggtcgtccagaagttatatttgaagaaacgaatctggttctgataatcggtgaaggggaagtataccgggggagtttcataattaaaagtgagaatgaacatgtgatacggggcttagtttacccgtcttcttttcgtgttaagctcaaggattccggatttgaaggaaatccggcaagagtggaattcacatatgacgggcgtggtttaaaaccaggacacgtagaagaaggtaaattcacagttgtatgtaccggtggagaatatgaactgtcatttacggcaatcatagagaaaccttacgtgatgaccacctatggcaaggtacagagtacagatgatttcagaaagctggcagtaaaagattattctgaggcggcaagactattccgctccagagatttttatgccattttaaaatatgagaatgaacgtatcttttatctctatgataatatgcgcaaatggtcactggaagagcaggcaatggaagaatttcttgtaggaattaagcagaaggaatgtattttcctgacacttccgggagaaggaatgctctttgaggatattttggagtctacaaaaggtgttgtgactctgatgaaaaatacatggggttatgtgccaatccacattgagacggagggacgtttcttaaaggtgtccagacaggagatttctacagaagactttgtaggtaacaactatgaagttgaatactttgtacgcccggaattccttcatgtagggcgtaattacggcgtaatccgtttccagactccatatgagacgttaagctatgaagtagaagtgctgcagaatcaggaatatgatgagaatcaccatgtgccggagcttttgattgctcagatattgaaagaatatatcggatttgtggccggacggattgacttgaagacatgggtggacagcgcagtggaaaaaatgactgcggttcgaaggattgagacgcagagcgaattatatcaacttgtgcaggcacatatttacatgctgggtgaccgtatcgaagacgcaaaatggattcttgaaaattacaattataatcgttttgccattggtaaagacccgatcacgaattgttattatctctttctgacagctcagatccgggataataaagcgcatacagaccgtgtgctggatgaattggagaagacgtatatccggcatcaggattcatggcttctgctctatatgatcatccagatggatccaaagtacaagaatccatataagaagctggaagttctggaacagcagtatgagtatgggacagaggacgtgttattttatctggaggcatatctgtgctacaaggagaagccgattcttcttcgaaaacttggagaatttgaacttctggtactgacatttgcatcaaaataccgtcttatgacgaaggaactggccctttatgtagcgaattttgccagccagcagaaggcatttaatgagcgggtttatcggattttaaagcgcctctataatatgtacgaagagccgatgattctgaatacaatctgcactcttctgatcaaaggaaataagacatcatcggaatattttccatggtatcagaaagcagtggaggaagattttcggattgccagactttatgagtattatatgattgccatggacgagactcgtatgcgcggaccgcttccacggaaaatttatttgtattttatgcatggtaatacactggattaccggaaagaagcatttttatatgcaaatcttctgacttacagtgatgatcaggcaatgttcttaaattaccgtgagcagattgtgacatttacatgggagcagctcatgaaacgccatattacagaggcattgaagattctttataaacgtttctgcctgccagaggaaatggacgagaaacgaatgaaagctatgagagatatttgctattcttatgaggtttccacgaaagtgccacatatgcgctgcgttcttgtcattgaaaaagatggtgccgtcaggcaacgtatcccgtatgacgaagagaccggtgcaatcattcagctctacgataaagaatcccgaattgtgtgggagtccatggatggcagatattacacagattctattgcttacgagacaaaacggttattttacgaaccgagattcatggaaatgtgcaagaaatatgaggacgaggccggtatgtggaagaagactggcgaggtcgtggaagtgacttttgacacgttacgggaaagtggactgaccggtgcagatgagagaaaggtttttcgtctttgcagcgaaaaaatccgcgaggaagatccgggagaagatgcatttctcctttatctgacatttgaaatgttcaagaaacagcaatatgataaggcaacgctgacatatctgggtgaatatttctgtggtgcaacaagagatatgaaacgtctttgggaagttatgcgggaatatgagattccgtcctataaagtagcagagcgtattattacgcagatgctgttctcggaaaatatttttgatgaagagaaaattttcgaagattattatctgtctgacacagcatatttccggctgaaacaggcatatcttgcatttgtttccagagagtatattctctatggaagagaacttgaaacatgtgtatttcatattattgccagagaatgtgaccagaaagaagaacttccggatgtctgcaaagtggcacttttatgctattatgcgggcagtgattacccggcagacatagaagccgtcctgcatcagctcttacgggaaatgtgtgaaaaacagattatttttccagcgtacatgaaatacaaggaagagtggcttcgtgaagtgcagctttatgataagactatagtttcttatcaggcaaaagaaggaagtaaagtaaaattgttctataaaatcaagggttccggtaagaaaacacttggttatcattcagagatgcttgttccggtatttgagaatctgtatgtgaaacagtttgtactctatgcagatgaggaactggattattatatccaggagtctgatggaaaagagagcacaaatacagaaaagcagattatcagaaatgatcatgcaattttagctgggcgtttcggaagaatcaacgccatggtccagatgacaccggcaaaccgtaacaaggctatgatggagtatgaagaagaggatatacttgcaaaaaaaatgttcaaactttatgaataa

SEQ ID NO: 1513 - DNA, 3012 bp, Dorea formicigenerans
atgttaaagacagtcgtaaaaaaaggcagttaccaggattcagtagttctgatgcttctgacaaatgagctttcttcactggatggagtcaacaagattcaggttatgatggctacaccggcgaacaaagacatttttagggagagtggacttacaacagatgagttaatggacgctacagcaaatgatatggtagttgtagctgatgttaatgatgaagcagtacttgatgctgtaatggacaaagttgaggagttcttaaagaaacagtccacagcagcagaaggaaagaaaggttctgaaagtgtaaaatcatgggatgcggcactgaagaaaatgtccaatgcaaacctggcagttatctctattccgggagcatatgcagcattagaggctgaccgtgcactggatgagggactgagcgtattcatgtttagtgacaatgtaacaatcgaggatgagaaagctctgaaagagaaagctcattcaaaaggacttgcagttatgggtcctgactgtggtacaggaatcattcagggagttccaatcgcatttacaaataatgtagcgaaaggttctatcggaatcatcggagcttcaggaacaggtatccaggaactgacaacaatcatcgacagacttggtgagggtgttacaaacgctatcggtatcggtggacgtgacctgaaggctgaggtcggtggaatcacaatgatggatatgatcgatgcaatggaagacgacgatacagtgaaagtacttgtaattgtttccaaaccgcctgcaaaagaagtaagagataaaatctctgcaagactttctaactttagcaaaccagttgttactctgtttgttggagagaaaccagagtatcatgaggagaacttctatcatgcatacacactggatgaggcagctcgtcttgctgtaggtcttgtaagaggaacaaaggttccggaagctactgttgatgtagatgagtctgaattctacaaagcagaagacggaaagacaatcaaagcttactactcaggtggtacacttgcaaatgaggcagctatgctgatcaaagatgcaatgaactgcaaagttccaccagaggacgttgaaggatatatgctccagttagatggcaacgtagtagttgaccttggagatgatgcttatacacagggtaaaccacatccgatgattgatcctgcaaaacgtattgagtgtatgcaggaagcagtagatgatccgtctacaggagttgttcttcttgacatcatgcttggatatggttcacacgcagatatggcaggatcattgatcccgacaatcaaagaacttcaggcaaaagcagatgcagcaggaagaaaagtattcttcatcgctacagtatgtggaacaagaagagattatcagggatatgatgaggctgttaacaaattaaaagaggctggagttatcgtatgtgagaacaataagcttgcatgtcagacagctatccacgctatcggaagagatttccaggagccagagaaagagattcgcgcaaaagaggttgttgcatgtgagaaacatacaccagctgagacattaaaagagcttctttctgagaaaccacgtatcatcaacatcggactgaagagcttcgcagaagttgtagaagagtttggatgcgaagttgtacagtatgactgggctccaccggcaggcggaaatgtaaaacttattaagactctgaacttcttaagaaattacgaaggaatcgaagagaagaaccgtgaagtgattgctaaggttgtagcaagccagccagtattaaaagataacgttcgtgcaaaagaagtaattccagagtttgctgaaaataatggaaaagtaattcttcatgcaggtcctccggtagattacaagaatatgccagacccgatgcagggatcttgcgtaggtgctgtaatgttcgaggagtgggcagagacagaagaagaagctagaaaaatgcttgagaatggcgagatcaaattcatcccttgccaccactgcaacgcagtaggacctatgggtggaatcacatctcctaacatggcagtatttgtagttgagaacgagacaggagctaacagagcttactgtacaatgaacgagggtattggtaaagttcttcgtttcggagcttatgatgaggaagttgttaacagacttcgttggatgagagatgttcttggtccaacacttggaaaagctcttcgttctatggagaatggacttgcaattaacccactgatcgcaaaagcaatcgcaatgggtgacgagttccaccagagaaatattgcagcttctcttgtattcttaaaagagatggctccgcttattacagagatgaaagacatcagcgagaaagaccgctatgatgttatcaagttccttgctgatacagatcagttcttcctgaacattatgatggctacaggtaaggctgttatggatgatgcacgtaaaggaacagacggaacaatcgttacagcaatgtgccgtaacggatatgagttcggtatccgtattgctggtatgggtgacgagtggttcacaggtccggttaatacaccacagggactgtactttacaggatatgatgcagatgatgcttgcccggatatgggagacagtgctattacagagacatttggtgtcggtggtatggcaatgatcgcagcaccggctgtaacaagattcgtaggtgctggcggatacgaggatgctcttcgtacaagtaacgagatgatggaaatcgttacagacagaaacccgaacttcacagttcctacatggaatttccagggaatttgtcttggaatcgatgcaagacttgtagtcgagaaaggtatcacaccagtaatcaacacaggtattgctaacaaagtagcaggaaaaggacagattggagcaggtacagttcacccgccaatcgaatgtttcgaaaaagctatcgtagcatacgctaagaagcttggattcgaggcataa

SEQ ID NO: 1514 - DNA, 2643 bp, Dorea formicigenerans
atggaaaagatatggcataagaaaaaaaagaccagaattttgttgatcataattgcaaatgttatggttatttcgatgatgctcggcgttatgagcatcatgtcttacgcagaacttttcgatgaccttataacaggaaaacttacgcagagctatgaagattcctatgactttgatacagagcttatgaatagtgcgtatcaagtgatgtccggcattgacagtgagcagatgtttgagacagatggaaagattgacgaggataagctggtcgatattcaggtatataacaatagtgagacgatcagtggtcagaatgaaagcggtctttcatatcgattgggagatttgttgaattggtatcagaaattgatctacagtgagagtaccagttatgtcggagatacaaacacggattcagcagaattagaaggcaacgacgcagaagatctgaaggctccgatcgtttgtaaattatcagatggaagttatcattactatagtcaggatgattttaatgaaaaggtgttaaatggtgaattaaaatttgtaatgacagatggaataggtgcggagacatcggagcagatcttagatgagctggaaaatgtggatatatcagatagaaatgaaatgacggaagaggaaaagaattttcggggaatcgaagatgcagagggaactatgctctatgtagattgctggaaatatgatggagtgttattccgtgaggaggcagctccactggaagcagaaaatctcttgcagatagttaacgagaattccaactggaatggcaggctcaatgaagcttataatatgctggaaagctgtatttatcagattggagagcgctatgcaaattatgagagcctgacagagcagtataaagaaggagatagtaattttttctattattatttagatttaaagagtggaaaagtcgtcacaaatcgggaggagctggggcaggaaaataatattaatgatgttgctaaaagtgttcgtaagatggggaaatatgtcatagtaaaatcaaaactgtcagagtttgagacgaatattcaggaagcagatgcagaactatggcagtcacagaccgtttatctgagtaatgcagataaaggagagtttgtgtttatgacaggtgtggatacgaagtatcctgtgaaagatagttattataaaaatgcacatttttatgaaaagtatagtccgtttgtccgaggagtcagtgcaggaatgattttggcgtttttaatattttttgccagtgtagtatggcttgttgtaatcgcaggtcgaacggaaagagatggagaactgcatttatataaatttgacagatgtaagacagaaatcggagctgcaacagttatatttgcatggttcgtaccgtcactattgaccgtgcttttcatgggagctgcaggaattatctcccagaaaacatttgcagtaggaaatggtattctttcttacgaaacattttttggaatgattggattcggaggacttgcagtctatacatgtaatatgtttctcgttggtattttgagtctggccagaagaataaaagcaggaattgcatggaagaacagttttctgtacagtgtcgtagagtttgtgaaattattgattcgaaatgccagacacatagcaaaaataattgttttatatcttgcgtatgcagcagtacattgggtggcatatctggcatcaggctggccaagtgcattttggtcattcgtgattttcattgtgcagacagcaggatttgtaatccttgtcaactgggcagtcggacgacagaaaattaaagaaggtattgagaaaatcagtgaaggagagctggattacaagattgatctcgaagatatacatggagaacaacgcaagattgcagaacaagtcaattctatcggaagcggacttgatgcggcagtcgagaagaatatgaaaagtgagcggttaaagacagatctgattacaaatgtatctcacgatatcaagacaccgctgacctccattattaattatgtaaatctcttgaaacaagaaaaatttgatgatccgaagattcaaagatatattgaagttctggaagaaaaatctcagagattgaagactttgacagaagatgttgtagaagcatcgaaagtcagctcaggtaatatttctctcgagtttatgaatattaatatgatagaactcatccagcagacaagtggagaatttgaagaaaaattccagaccagaaatctgacacaaatcatgaacttcccggaagaagatgcgattgttcgggtagacggaagaagaatgtggcgcgtgcttgcaaatatttataataatgctgcaaaatatgctatggaaggaacacgcatctatgcagatctgcagacactggacggaaaagtaatcttcagtctgaaaaacatatctgagcagccacttaacatttcctcggcagaagaactgactgaacgatttatccgcggcgacctgtcacgaagtaccgaaggaagcggacttggattgtctattgcgaagacattgaccacaatgatgggtggaacatttgatctgtatctggacggagatctattcaaagtcgtgattatatttgataaaatagattga

SEQ ID NO: 1515 - DNA, 2433 bp, Dorea formicigenerans
atgaaatggaaaaatcgcgtgatccacgcaggggtactggttctggtatttcttgctgcggtggtcatatttggctatgtgacaaataaaaagaacagtaacatgacgacagatatgggggcagcaacacgtccccagattgcgttttcttataacggttattcgctcaatgatctgcccggatataagaatgagatggatttgacaggcgtacgtgattccatcacaccggtcagcaatggccagcttcaggtcaccattaaagcttatgaaaatgtgatcgacagcctggactatacggtttattcgatcgatggcaaagaaaagctgttggaacaaaaggtgaagaagccaggagagaatgcaacgctggaagtaggaaatgtcgatggtgaaaatattttgtctgaggagcgtatgcttcagatcacgctgcatatggacaatcacgacatgtattattatacgagaatcgtggacggagccaagttaaatgcggcgccaagcctggattatgtacaaagtttccatgaaaatgcactggcgaaagcggaaggtgttggaattggaacggcgattgagcccagtgatgagggagacaacacgacattacagcatgtgacgatccactcagattacacgcatgtaacatggggagatctggccccgaaggttgatggaagtgagcgttggacgattaaagagttgaacagcacatatatggcagtggagctggaatatcgtgtgaactgtactggtgaggaaaatgagcaagacgaataccaggtgcgggaatatttccgtgtgcgttacatttccggaagccagaagacatatctgttagattatgaccggacgatggaccagatatttgatgcgacgaagaaggtgttgaataaaaaaggtgtacttcttggcatcacagacaagaatccggtctacatggtaaataaaaacggaaccgttgtgtcatttgtgcaggcgggagaactatggaattataatcgtgaccgagatgaagtttctcttgtgttcagctttgcagatgcggagaatacggatatccggaatatgctgatgcagcatgatattaagattttaaatgtagacgaaaagggaaatacaacatttgccgtatgcggatacatgaaccggggcagccatgaaggtgagactggatcagcagtctactattataatattgaacagaattctgttgaggaaaaattattcgtatccagtgacaaggcttatgaccgtgcccaggaagaagtgagcggactggtctactataatgtagaaaatggctgtctgtatacgattgcagatgacgtactctacaaaatggatatgaataaaggtacgaaaaaggagcttgcgacaggactgaatgaagatcagtatgttgcaagcgaagatggacatctggtagcttatgagaaagaagatccttcgaagtccaagtctgtgacagttatgaatctggagactgatcaagaatatgaagtgacttgcaaagatggcgagtgtatcaaaccacttggcttcatggatggtgattttgtctacggtgttgcaaaaacggaagaagtcggaacaacactgtcaggagcccaggtcattccgatgtataaagtggagattacaagtagtaaagataaggtgatcaaaacttatgaacagtcaggaatctatatgttaagtgctacatttgaggataatatgatcacccttgaccgtgcggtaaaagacggcgatacttacaccggaacagcacaggattatattacaagcagcgaagaggcgaaagaaagcaatatttatgtgcagacatataaaacagatctgaaagagacacaggttcgcctgacgtatgatgatggaatttctgacaaggagccgaagctattaaaaccgaaacaggtggtacttgaaaatgttccacaggtcagtctggaccgcaaaaaagaaacagacgcattttatgtgtatggtcatggaaggcttcagggaacttataatactgcaggaaaagcgattcagaaagccaatgactgtggcggagtcgtggtcgatgctgatcagaattacatctgggagcgtggaaaccgcgatctgaaatattcgattgacacggaagatgcagatacagaacagctcagacaggcactcgcaggtggaaaatctgcggtcgatgcaattgcagaagtttatggaagcgtgatggatttaagtggctgtacgatagacgaactgctttacaatgttaatcagggacggccgttaattgccgtcttagatgcgcaaacaacgctgatgattgttggttatagtgacggaatagtcagctgtgaagatatcggaagcggtgcacgcagcaatcatgcacaaagtgactttgcaaatgtcagtgtatatctggcagcaaaatag

SEQ ID NO: 1516 - DNA, 2547 bp, Dorea formicigenerans
atggaagacaatatttttgataaagtccatgaggtcgacctaaagaaaacgatggagacctcctatatcgattatgccatgagtgttattgcttcccgtgcgcttccagatgtaagagacggattgaaacctgtacagagaagaattctttactccatgatcgagctgaacaatggaccggataaaccgcacagaaaatcagcccgtatcgtcggtgatacaatgggtaaatatcatccgcacggtgacagttccatttacggagcattggttaatatggctcaggaatggtctaccagatatccgctcgttgacgggcatggaaacttcggttctgtggacggtgacggagcagcggctatgcgttacacagaggcaagattgagtaagatttccatggaactgactgctgatatcaacaaagatacggtagacttcatgccaaactttgatgagacggagaaagagccggttgtacttccggcaagattcccgaaccttctggtgaacggtacatccggtatcgccgtaggtatggcaacgaatatccctccacacaatcttcgtgaggttattgacgcagtagtcagaattatcgataacaagattgcagataaagacgagacaacaatggaagaaatccttgagatcatcaagggaccagacttcccgaccggtggagagattcttggtacaagaggaatcgaggaagcatatcgaacaggacgtggtaagattcgtgtacgtgccgtaacgaacattgagacgatgccgaatggaaagagccgcatcattgttacagagcttccgtacatggtcaataaggcccgtctgatcgagaagatcgcagagctggtacgtgacaagaaggtggatggaatcacagacttaagtgatcagtccagccgtgaaggtatgcgtattgtcattgaacttcgtaaagatgtcaatgcaaatgtattgctgaaccagctttacaaacatacacagcttcaggatacatttggcgtgattatgctggcactggtcggcaaacagccaaaagtcatgaatattttagagcttcttggatattacctgaagcatcaggaagatgttgtgacacgtcgtacaaagtacgaactgaacaaagcaaaagaaagagcgcatatcttaaaaggattattgattgcgcttgataatattgacgaagttatccggatcatccgtggttccagtacggtacaggctgcaaaagcagaactcatggagaaattcgaactggatgatgttcaggctcaggctatcgtagatatgcgtctgcgtgctctgacaggattggaaagagagaagcttgagaaagaatatgcagaacttatggctcagattgagagactggaggcaattctggcagacgaaaaattacttcttggagtgattcgtgaagaaatccttgtcattaaggataaatatggtgatgacagaagaacatccatcggatttgacgagtatgacatttccatggaggatctgattccgaaggagaatattgtaattaccatgacaaagcttggttacatcaagcgtatgtctgatgatacatttaaggcacagaatcgtggcggtaagggaattaaaggtatgcagactctggatgaagactatgtggaagagctattcatgacgaatacgcaccactacattatgttctttacgaacaccggacgtgtctacagactgaaaggttacgagattccggaggcaagccgcacatcaagaggaactgcgatcatcaacctgctccagttaatgccgggcgagaagattaccgcagtaatcccgattgattactaccgcaatcaggattatctgatcatggcaacgaagaaaggtcttgtgaagaaaacatcacttcgcgagtacatgaatgtaagaaagacaggacttgccgcaattacactgcgtgatgaggatgaactgatcgaagtaaaattcacagacaacaatcaggaaatcattcttgcaacgaagtatggtcagtgtatccgctttaatgagaccgacgtaagagcaacaggacgtaactccatgggagtacgcggaatcaaccttgcagaccgcgacgaagtgattggaatgcagcttgtgacccagggacatgaccttttgatcgtatctgaaaaaggtatgggtaaacgtacagacatccatgaatttacagcacagaaccgtggcggcaaaggagtgaagtgctacaagatcaccgaaaagacaggaaatgtcatcggaatcaaggcagttgacgaagacgatgagattatgatcataaacacagacggaatcatcatccgtatgctgtgttccggaatctccgtactcggaagaatcacatccggagtcaaactcatcaacctgaaagataaagagaccgtagcaagtatcgcaaaagtcagagacgaagaaaaagaagaagccaaaaagaaagaaatcttcggcgaagacggggttgaagtagatcagctcgatgtagaatcactggagttagaaagtgacgaagaacaaaaataa

SEQ ID NO: 1517 - DNA, 2559 bp, Dorea formicigenerans
agagaagcaataacagatgtgaacaggtctgctccggcagatctgttcttttattcattttttagcacaagagtaagaaaggatcaaaacaatatgattaatccgagatttgaaaaagaagcatttaagaaggatgtagaacagaatgttaagcagctgttccgaaaaactgtagacgaagcatctcagcaggagctttatcaggcggtttcctatgtcgtaaaagatgcaattatcgatgactggatcgcaactcagaagcagtacgagaaagatgatccgaaaatcgtgtattacatgtccatggagttcctgcttggaagagctcttggcaataacctgatcaatatgacggcatataaagaggtgaaagaggctctggaagaaatgggtctgaacctgaatgaacttgaggatcaggagccggacccggcacttggaaatggcggacttggacgtctcgctgcatgtttcctggattcactggcatctcttggctatgcagcttacggctgtggtatccgctaccgttatggtatgttcaagcagaagatcaaagatggctatcaggaagaaaaaccggataactggctgaagaacggcaatccattcgaacttcgcagaccggagtatgcaaaggaagtacgtttcggtggaaatatccgtgtagagtacgatgataagaccggagatatccgttttaaacaggagaattatgagtctgttctggcagttccgtatgattatccgatcgtaggatatgataatcatattgtaaatacacttcgtatctgggacgcagaaccaatcgtagatttccagttagattcatttgatcgcggtgactatcacaaagcggtagagcagcagaatctggcaaaaacgatcgtagaggtcctgtacccgaacgataaccactatgcaggaaaggaactgagactgaaacagcagtatttcttcgtatctgccagtcttcaggctgcgcttgaaaaatataaaaagaaccatgatgatatccataaactgccggagaagatgacgattcagatgaatgatacacatccgacggtagcagttgccgagcttatgagacttcttcttgatgaggaaggacttggctgggatgaggcatgggagatcacaacaaagacctgcgcttacacgaaccacaccatcatggcagaggctctggaaaaatggccaatcgacctgttctccaggctgcttcctcgtgtataccagatcatccaggagattgaccgccgctttgtggccaagatccgtgagatgtatccgggaaatgaagagaaagtagcaaagatgcagattttaagagatggtcaggtaaagatggctcatcttgcaatcgtagccggatactctgtcaatggagttgcaagacttcatacagaaatcctgaaaaaacaggagcttcgtgatttctacgaaatgatgccgcagaaattcaataataagacaaacggaattacgcagagacgtttcctgatgcatggaaatccgctgctggctgactgggtaacagataagcttggaacaaaggactggatcacagatctgtctctgatgtcaggattgaaaaaatgggtggacgatgaggaagctctgaaggaatttatgagcatcaagtatgagaataaagtccgcctggcaaaatacattaaagagcacaatggcattgaagtggatccaagatctatcttcgatgtacaggtcaagagactgcacgagtacaagagacagcttcttaacattttacatgtgatgtatttgtacaatgagatcaaggaacatccggaaataagcttctatccgagaacatttatcttcggagcaaaagcttccgcaggatatatccgtgcaaaacagatcatcaaactgatcaattccgttgcggatgtagtcaacaacgaccgcagtatcaacggcaaactgaaagttgtattcatcgaagattatcgtgtgtcaaatgctgagatcatcttcgcagcagctgatgtaagcgagcagatttccacagcttccaaagaggcatcaggaaccggtaatatgaagttcatgctcaacggcgcaccgacacttggaacgatggatggagcaaatgtggagattgttgaagaagttggtgcagagaatgcatttatcttcggactcagctctgacgaggtcatcaattacgagaacaatggcggctacaatccgatggatatctacaatagtgatgccgatatccgacgcgttgtgaaccagcttgtggatggaacatattcacaaggtgataaggaaatgtaccgtgacctgtataattcacttctgacagctcaaggtggaagcaaagccgatatgtatttcattctgaaggatttccgttcttatgcggatacacagaagaaggttgaagaagcttatcgcgacaaagacagatgggctaagatggcacttctgaatactgcaagctgtggaaaattctcatctgacagaacgattcaggagtatgtggatgatatctggcatctggataaagtgacagtagaagtttag

SEQ ID NO: 1518 - DNA, 3348 bp, Dorea formicigenerans
gtgcaggcgttacttaagccgcttttggaactggcagaatatgaagatatcgtaaaaaagaaaaaagaagatccgggagttctgatgctgacaggttgtgtgaattcccagaagactcatatgatgtacgcacttagcgatggctgttgttataaagtcatcgcctgttccagtgaggcaaaagcgaaacagatttatgaagagtatcgttttttagatgcagccattagtttttatccggcaaaagacttgctgttttaccaggcagatattcgtagtaaagagctggtcagtcagcgaatgcaggtgatacaggcagttttaaaaggcgaaccgataactgtggttgctagttttgatgcatttatggatgcactccttccaaaagaaatgataaagagcagggtgatcaagatatgctccgacgagactttgaatctggatgaattgtctgtgcagctggcacagtgtgggtatgacagagagatagaggtggcaggaccggggcagtttgcggtccgtggcggcatcttggatgtatatccactgacggaggagctcccggttaggattgaactttggggagatgaggtggattctattcgaacctttgatccggagacgcagcgatctatcgagaagcttgacgaggtagaagtgtttccggctacagaatttccagaggaagaagaaaaaagagtttcttttctggattattttgaaaaagaaaatacaattcttttcttagatgagcctgtgcgtttgaaggaaaaaggggaaggagtggaagaagaatttctggaagcccagaaacgacgtgcccagagcggatacgaagtagccgacagcgaagctgtgctttttacgacgcaggagattatgaggaaaatgaatgaatattccagcgtgggatttcaggcgttggatatgcgttgccctgggttgaatatcagggcaagttataatcttcaaacgaaaaatgtggatccatacaatagaagttttgaacttctaacgcaggatctgaaaaaaatgaaacgaaatcagagccgtgtcattctgctttccggttccagaacaagagcaaggcgcctggcagaagatcttcgagattacaatctgagcagcttttacagtgaagatatggatcgtgaagtagaaccgggagaaattatgactgcttatggttatattgcagaaggctatgagtatccacttttgaattttgttgtaatttcagaaacggatattttcggaaagaataaaaggaagaaaaaacgccgtaccacttatgaagggcgtaagatccaaagcttctcagaattaaaacctggagattatgtggtacatgagaatcatggactgggaatttatcaaggaattgaaaaaatcgaagtggataagatttccaaagactatatgaagatttcctatgctaagggtggaaatctttatattccggcaacacagttggatctgatccagaaatatgccggttctgattcaaaaaaaccaaaacttaaccgtcttggaactcaggagtggacaaagacgaaggcaaaggttcggggggcagttaaagaaattgcaaaagatctggtagaactttatgcagcaagacagaatcaggatgggtttgtttacggggaggatacagtctggcagaaagaatttgaggaaatgttcccgtatgaggagacagaagatcagcttctggcaatcaatgctgtgaagaaggatatggaaagccacaagattatggatcgtctgatctgtggtgatgtaggttatggaaagacggaaattgcaatccgtgcggcatttaaggcagtacaggaaaataagcaggtggtctatctggtaccgaccactattttggcacagcaacattacaatacattttgccagagaatgaaggatttcccggtccgggtagatctgatgtgccgattcaggactccggctcagcaaagagatacgattcagaacttgaaacgcgggctggtggacattgtggttggaacccaccgtgtgctcagtgatgatattgagtataaggatctgggattgctgatcatcgacgaggagcagcgttttggagtccagcacaaggagaaaatcaaaaagttaaagaaaaatgtagacgttctgacgttgacggcaacgccgattccaagaactcttcatatgagtcttatcggaatccgtgatatgagcgtgctggaggaggcaccgcaggaccggctgccgatccagacgtatgtgatggaatataatgatgagatggtcagggaggcaatcgaacgagaatgtgcgagaaacggacaggtctactatgtgtacaatcgagtggaagacattgcagaggtaacagcgcatattcagaaacttgtcccggagttaaatgtatcctttgcccacggacagatgaaggagcatgagcttgaaaagatcatgtatgattttattaatggagatattgatgtgcttgtgtcgacaacgattattgaaacgggtcttgatatatccaatgtaaataccatgatcattcacgacgcagaccggcttggcctttcccagctctatcagcttcgtggccgcgtcgggcgttccgggcgtatggcctatgcatttttgttgtaccggaaggacaaattattgaaagagattgcagagaagcgtctggcggcaatccgggaatttacagatcttggatcgggattcaaaattgccatgcgtgatcttgaaatccgtggagctggaaatcttcttggtgccgaacagcacgggcatatggaagcggtcggatacgatatgtactgcaaaatgttaaatgaggcagtcaaacatttaaaaggggaattatcagaagaggatacatttacgacagcattggatgtcaatgtcgatgcgtatattccggattcttatataccaaatgaatatcataagctggatatttataagagaattgctgccatcgagtctgaggaagagatggacgatatgatagaggagttgattgaccgttttggagatattcctaaaaaagtggagctccttctggaagtagcaaggcttaagaatctggcgcaccaggcgtatgtgacagaggtgactcaaaaaggtgtgacctatacattccgtatgtatgaaaaagcaaaaatccatgtagagcggatcccggatcttttaaaacaatttccggaagatctgtcatttaaggcggatgtatcggatcccaaattcatttaccagagaaagaagaaaacaaagcgtggtgaagtggagaatccaattgaggttgtgaaaaaagtgttaattggtataaaaggattgcttgactag

SEQ ID NO: 1519 - DNA, 2823 bp, Dorea formicigenerans
atgcgcactgcggcgtacaatgatggtaccgcaagcggccgccgcaggcgccagaatgtgctggggcacattctatattttgccctgaaatgtgaaaaatgtgtgaaaacacgaaccaggaaacacgtatttgaggaggagactatgagtcagaatttggagaaaacttacaatccgaaagagattgaagacaaactgtaccagaagtggtgcgaaaataagtatttccacgcagaagtggacagaagtaagaaaccatttacaatcgtaatgccgccaccgaatattaccggtaagcttcacatgggacatgctcttgacaacacgatgcaggatatcctgatccgctacaagagaatgcagggatacaatgcactgtggattccgggaacagaccatgcggctatttctacagaagtaaaggttaccaatcagttaaaagacgaaggtattgataaaaaagaacttggccgtgagaaattcttagaaagaacatggcagtggaaagaagaatatggcggaactatcacatcacagcttaaaaagatgggtgtttcctgtgactgggacagagagcgtttcacaatggacgagggatgttctgaagcagttgagaaagtattcttgaaccttcataaaaaaggattcatttacagagggtccagaatcatcaactggtgtccggtatgtaagacttccctgtctgatgccgaggtagagcatgaagagcaggacggattcttctggcacattaagtacccaatcgtaggaacagaccgtttccttgagattgcaacaacacgtccggagactcttctgggagatactgcaattgcagttcacccggatgatgagagatataaagatatcgttggaaagatgtgtaagctgccactgacagaccgtgagattccgattgttgcagattactacgtagacaaagagttcggaacaggtgctgttaagatcacaccggcacatgaccctaacgactttgaagttggaaaacgtcacaatctgccagaacttaacatcatgaatgatgatgctacgatcaacgagaagtatggtggaaaatatgcaggcatggatcgctacgaagcaagaaaagctatggtagaggatctgaaagagcagggatatcttgtaaaagttgttccacattctcataatgtaggaactcacgacagatgtcatacaacggtagagccaatgatcaaacagcagtggttcgtaaagatggaagagcttgcaaaaccagccattgaggcgattaagaatggtgagcttaagtttgtgccagagcgttttgataagatttacctgcactggcttgagaatatccgtgactggtgcatatccagacagatctggtggggacatagaatcccagcctactactgccaggattgtggagaagtcgtagtagcttccgaagcaccggaaaaatgcccacattgtggttgtacacattttaaacaggatgaggatacgctggatacatggttcagttctgcgctttggccattctcaacacttggctggccacatgagacggaggaccttgactacttctatccaacgaatgtacttgtaactggatacgacatcattttcttctgggttatccgtatggtattctcaggatatgcacatacaggaaaggcaccatttaacacagtactgatccacgggcttgttcgcgattctcagggacgcaagatgagtaaatcacttggaaatggtatcgatcctctggatattatcgatcagtacggcgcagacgcacttcgtatgacactgattacaggaaatgctcctggaaatgatatgcgtttctacaacgagcgtgtagaggcaagccgtaattttgcaaataaagtatggaatgcttccagatatattcttatgaatatggaaggaaaagagatcacagagccacaggcagaggatctgggacctgcagaccgctggattttatctgcatgcaataatgtggtaaaagatgtaacagagaacttagataagttcgagcttggaattgcactttccaagatttatgactttatctgggacgagttctgtgactggtacattgaactttcaaaatatgcaatctaccacgcagacgagaatccgaagagtgcgaacgctgcactttggacattgaagaaagttcttggtgacgcactgaagcttcttcacccatacatgccatttgttacagaggaaatctacagcaaactggttccagaagaagagtccctgatgatgtcaagctggccggtatatgaggaaaaatggaatgacgcagagaatgaaaacattctgaaccattacaaagaaatcgtaagaggtgtcagaaacgttcgttccgagatgaatgttccaaattccagaaaggcaacgatctacgttgtatgcgaggacgagaagctctcagccggtcttgcagtattaaaagagtctgcaatgatgatggcatctgccggagacttcattgtacaggcagacaagagcggtattgcagacgatgcagtgtctgtagtagttccggatgcaaccgtttatgtgccgcttgaggagctgatcgattttgagcaggaaaaagagcgtcttacaaaagaagagactcgcctgaataaagagattgcacgttccaacggcatgctgaataacgagaagtttgtaagcaaagcaccggctgcaaaggtacaggaagagcgtgagaaactggaaaaatatgagcagatgcttgctcaggtcaaggagcgtcttgcaggattacagaaaaaattaggtaattgcgaaacacattcctaa

SEQ ID NO: 1520 - DNA, 3012 bp, Dorea formicigenerans
atgtattccaaagggcttacagtttattttatggaaaaatgtgatataatagcctcagtgtatgagaaaggagaacatcggaaagagtttatgagtgtaaaagacttaacgacgtatgaagtattaaaagacgaagatttaaagggtattaaagcgaaaggaaagcttttaaagcataagaaaagtggcgcgagagttctgcttgttgagaatgatgacaataacaaagtgttcagcattgcatttcggacaccaccgtcagacagtacaggagttccgcatattatggagcattccgtactctgcgggtcaaagaatttcccggcaaaggatccatttgtagagctggtgaagggatctttgaatacatttttaaatgcaatgacgtatccggataagactgtttatccggtggcaagctgtaatgataaggattttcagaatctgatgcatgtatatatggatgcggttttgtatccgaatatttacaatcatgataagacattccgtcaggagggctggagctacaagctggatgaaaaagatggcgagctttcctacaatggagttgtatacaatgagatgaagggagcattttcctcaccggagggagttctggatcgggttgttctgaataccttgttcccggataactgctatgcaaatgagtccggtggagatccggaggtgattccacagcttacttacgagcagtttcttgatttccatagaacatattaccatccgtccaacagttatatttatctgtacggagatatggatatggaggaaaaacttcgctggcttgacgaggaatacctgtgtcactatgacaaaaaggacgtaaactcagagattcatttgcagaagccatttgatgaggtacaggagaagacttttgaatattctatagcaagcgatgaatctacagaagagaatacatttctttcttataataaggtcattggaacaacattggaccgagaactctatcaggcatttgaaatcctggattacgcactgttatctgcaccgggagcaccgcttaagaaggcccttaccgatgccggaatcggaaaagacattatgggttcttatgataatggtgtgtatcagcctattttctctgtcgttgcgaaaaatgcagaggaaagtcagaaagacgagtttgtgaaggtgattgaagacgttcttagaggccaggtgaagaatggcatcaaccagaaagcgctgctggcaggaatcaactacaacgaattccgatacagagaagctgattttggaaattatccaaaaggacttatgtatggactccaagttatggatagctggctttatgatgaaaaccagccgtttatccatattgaggcgttagagacatttgcatttttaaagaacaaagttggaaccggatattatgaagaactgatccagaagtatctgcttgacaatacacacggagcaatcgtagtggtccgcccggagcagggacgtacagcacgtctggatgcacagctccaggacaagcttcagaaatataaagagtcattgagcaatgcagaggtcgaaaaactggtggcagacacgaaggcgctggaagagtaccagtctgaaccggaagcgatagaaaatctggaaaaaatcccggtactgcgcagagaagacatttccagagagatagctccattctttaatgaagaaatgaagctggcagatgtgccggttgtttatcatgagattgagacaaatggaatcggatatgtgaacgttatgttcgatctgtccggtgtcagtgcagaagaactggcggatgttggaatcctgcagtcagtacttggaattattgatacagaggactatgaatacagtgagttattcaatgagataaatgtaaataccggaggaatcggtacatcactggagctgtataataatgtgacacgtgtgaaagaaaaagaattcaaagcgacatttgagatcaaaggaaaagcattatactcacaacttgagaaaacatttgccatgatggcagagattcttacggcatcaaaactggatgatacgaaacgaatccgggagatccttgctatgctgaaatcaaggctgattatgaagttccagtcttctgggcatacgaccgcagcacttcgtgcactgtcttatgcatcaccgtctgctaaattcaaagatatgacaagcggaattgacttctacaaacgagttgcctatatagaggaacattttgacgaggaaaaagaggcgttatcgcagagattgtacgcactgacaaagaaaatcttccgtccggacaatatgatgatcagctatacagcggcaagagaaggtcttgagggcatggagccgagaatcgcagaactagccggaaagctcaatcatgagaacgtaacagagacaccgtgcatcattcattgcgagaaaaagaatgaaggatttaagactgcatcaaaagttcagtatgtagcacgcactggtaacttcatagatcgtggcgtagaatatacaggagcactgcagattctcaaagtgatcttaagctatgattatctgtggcagaatatccgtgtcaaaggcggagcttacggctgcatgagcagtttcaaccgcatcggagaaggttactttgtgtcttaccgtgacccgaatttaaaacgtaccattgatgtatatgagggcgtggtagattacctggagaactttactgtcagtgaccgtgatatgacaaaatacatcattggaacaatcagtaacatggatcagccaatgacaccggcgaccaagggcgaacgttctatgaatctctacatgaacaaagtaagtgccgagatgattaagaaagaacgcgcacagatcctggatgcggcacaggaagatatccgggcactcgccaaggtggcgaaagcagtactggcagcagaccagttgtgcgtcattggtggagaagagaaaatagaagaagataaagaattatttggcgatgtgacaagcttttaa

SEQ ID NO: 1521 - DNA, 2154 bp, Dorea formicigenerans
atgaaaaagctgcgaaaggaagaggttatagcatactggaaggaacgtagagagcgaagggcaagaatactggaagagagaagaaatggtgcatttgcgcagaagatgaaacctgtctatcagtttatgaaccggttttctctgatatttcacgcgcttttagcatgtctgatcaactttgcaattgaggcaatttcaagacattcacttgttcaggcatggagctatatgacacagacaccactcgtcttcctttacaatgcatttatgatatttatgacatttacggtggtatacctgttcaggcgaagggtgttcacaagaatcattatcggtgtactttggatgattcttggaatctgtaacggttacatgctgatgaagcgagtgacaccgttcaatgcccaggacctgaaggtagcaaccgatgcggtcagcctgatcaacaattatttcaatggatttgagatcgtgatcgtattggtgggaattgcagcggtcattatatggctgatttccatgtggcgccgcggtggtcagtatgaagggaaaatgcaccggcttctggcaattgccggagtggctgtatgtgccatgttattcagcttcacaacagatcaggcaattgataagcgagtgctttccacatactttggaaatattgcgtttgcctatgaggattacggacttccgtactgctttatgtccagtgtatttaatacaggaatcgatgagccgaatgattataataaggagactattgatcagattacgaataacggagaaatggccgagaataaaacagggcgtgcctctgatgatcttccgaatataattgtggttcagttagagtcttattttgatgtagatgaggcggaatttttcacaacaagcgaagatgcatgcccgaatctgcatgagatgtacaagaattattcttccggatatttcaaagttccgtctgtaggagccggaaccgcgaatacagagttcgaagtgctgacaggaatgaatatgcgtttcttcggacctggagagtatccgtataaaacagttgtcaagaaccagccatgtgagagtgctgcaacagctctttcagcactgggatacggtactcatggactgcacaataacggaggtaacttctacagtcgtgcaaaagtctatgatcatatgggatttgacagttttacaagtaaagagtttatgaatattcttcagcttacgccaaatggatgggcaaaggacgaggttctggtagacaatattatggaagctatggatacgaccgagcagcaggatttcgtatttaccgtcagtgtgcagggacatggagattacccggaggagcagctgattgagaatccgaagatcaaagtagaaggtatcgatgacgaagcaaagaagaataaatgggaatattatgtaaacatggtctatgagatggaccagtttgcaggagatcttgtgaaagcagtggaagatcgtggagaaccggcagttgtcgtattctacggagaccatttaccgactatgggacttaccgcagaagatttaaagagccgttatctctataacacaaattatgtgatctgggataacatcggactggaacagcaggatagaaatattccggcttatcagctaatggcggatgtgatgaaccgcctggatattcattccggaacattgttcaattatcatcagcagagacagaattccaagaattacctgtcagacttagagcttctccagtatgatattctgtatggcaagcagtatgtttacaagggcaatccgccgatcacggaaggtcatatggaaatgggtgtgaaggacgctacgctgacgaacatcgttccgtatctggaaaaaggctacagcctgtatggcgagaactttacgaagtcaagtaaggtttacgtcaatggcgagaagcaaaagagtacatttttaaataatacacgaatcgttcttccaagcacagagcttagcgagggagatgttatcactgtcagccaggtaggatccagcaatacaatcttcagaacgacggacgaatacatttaccaggctggacagcttgtaaggcaggaaggaacaggaactgatacaacaaaatcctggacagaacaggaaaacgaggaaaaataa

SEQ ID NO: 1522 - DNA, 2679 bp, Dorea formicigenerans
aatgtaaagaataaaagacgtctaatcaagcaaactataatccatactttttatttacaggagggaatccagatggctaagaagaaagatgttgtaccggtatttgttgacaatgtggaagcgttggaagcgaagatgcaggcgatgcgcgaggcgcagaaaatctttgccacctatacacaggagcaggttgacaagattttttatgcggcagcagttgcagcgaacaaaatgcgtattccacttgcaaagcaggcagttgaggaaaccggacgcggtattgttgaggataaagtaatcaaaaatcactatgcagcagagtatatttacaatgcatacaaagacacaaagacttgtggtgtgattgaggaagataaagcattcggaattaagaaaatcgcagagccaatcggtcttgtggcagcagttattccgacaacgaacccgacttcaacagcaatctttaagacattgatctgtctgaagacgagaaatgcaattatcatcagtccgcatccggcagcaaaagcttctacaattgcagcagcaaagattgttctggacgcagcagtgaaagccggagcaccggaaggaatcattggctggatcgatgcaccgtcactggaactgaccaatatggtcatgaaagaatctgacatcatccttgcaacaggtggtccgggaatggtaaaggcagcttattcttccggaaaaccggcacttggagttggagccggaaatacaccggttattattgatgacacagcagatattaaacttgcagttaactccatcattcattccaaaacatttgacaacggtatgatctgtgcatctgagcagtccgtaacggttctggacagcatttacgatgaagtaaagaaagaatttgcatacagaggctgctatttcctgaaaaaaggagaagagcttgataaggttcgtaagacgattattataaatggagcattgaataataagattcctggaaaatctgcatatgagattgcaaaacttgcaggtgtggaagtcccggaaaatacaaagattctgattggtgaagtagaatctgtggacatttccgaggaatttgcacacgaaaaattatcaccggtacttggaatgtatcgtgcgaagacatttgacgaagctcttgaaaaagcggagcgccttgtagcagatggaggatatggacacacagcttctctttatgtacatcctgctgagacagagaaaattgcaaaacatgctgaagctatgaagacatgtcgaatcctgatcaacacaccatcttctcacggaggaatcggagatctctacaacttcaaactggcaccgtcactgacacttggctgcggttcctggggaggaaactccgtatctgaaaatgtaggtgtaaaacacctgatcaatattaaaacagttgcagagaggagagaaaatatgctttggtttcggactccggataaggtatactttaagaaaggctgcatgccggtagcgcttgatgaacttggaaatgtactgcacaaaaagaaagcatttatcgtaacagacagcttcttatataagaatggttacgtagctccgatcgagcagaaactggatgagcttggaatccagcacacatgcttcttcgaggtggcaccggatccgacacttcagtgtgctgaaaaaggtgtggatcagatgcgcgcatttgagccggatacgatcattgctcttggcggtggatctgccatggacgcagcaaagattatgtgggtaatgtatgagcatccggaagctgactttgaggatatggccatggacttcatggatatccgcaagcgtgtattcactttcccgaaaatgggcgagaaagcttactttgtagcaatcccgacttcttccggaacaggttccgaggtgacaccatttgctattattacagatgccgagacaggtgtaaaatggccaattgcagattatgagcttcttccgaatatggcaattgtagatgtagataacatgatgactcagccaaaaggactgaccagtgcatctggtatcgatgttatgactcatgcaattgaggcatatgtatctattatggcgacggattacacagacggacttgccctcaaggcagcaaaagcagtatttgagtatctgccgagagcatacgacaatggtgcaaatgatccggaggccagagagaagatggcaaacgcatcctgtatggcaggaatggcatttgcaaatgcattccttggactgaaccactccatggcacataaacttggtgcattccaccacctgccacacggagttgcaaatgcagtgatcctgacagaagttatgagatataatgctgcagaagtaccgacaaaaatgggaacattttcacagtatcagtatccacatgcactggcaagatacgctgaaatcggccgctttgtaggctgccagggaaaagacgatgcagaagtatttgaaaactttatcgcaaaactggaagagctgaaagaaaaaatcggtattaagaagtccattcacgagtacggcattgatgagaaatatttcatggacacactggacgacatggtggagcaggcatttaacgatcagtgtacagcagcaaacccaagatatccactcatgaaagaaatcaaagagttatacttaaagtgctggtaa

SEQ ID NO: 1523 - DNA, 3561 bp, Dorea formicigenerans
atgtatttaaaaagcatagaagtgcaggggtttaagtcctttgcaaataagataaaattcgattttcacaacggtattacaggaattgtcggaccaaatggaagtggtaagagtaatgtagccgatgcggtgcggtgggtacttggtgaacagcgtgtcaagcagcttcgaggcggtacaatgcaagatgttatcttttccggtacagagaaccgtaaaccgttaagctatgcgtctgtagcaatcacattggataattcagatcataaacttgcgattgatttcgaagaagttacggtaacaagaaagttataccgttctggtgaaagtgaatatctgatcaatggcagtgcatgcaggctgaaagatattaatgaattattttatgatacaggtatcggtaaagaaggatactccattatcggacagggacagattgacaagatcttaagtggtaaaccggaagagcggcgagagttgtttgatgaggctgccggtattgtaaaattcaaaagacgtaagagtatgtctgtgaagaagctggaagaggaacagcagaatctgatccgtgtcaatgatattctttcggagcttgagaagcaggtcggcccattggaacggcagtctgagaaagcaagagaatatctgaagaaaaaagaagaactgaagacttatgatatcaatatgtttctgttagaggcagaccgcctgaaagagcagatccgggatgtggaagcaaaaaataatctgacaaaggctcagatgggagaagcaaaccgcttgtatgaagatacaaagcaggaatatgaaagtattgaagaacaagtcgatacgatggacgcgtctattgagacttataatcgcaagcttactgagacaagcatgttaaaacaacagttggagaatcagattgctcttttgaaggagcagatccacagtgccagaatgaatgatgagcattacgcgaatcgtgcccagtccattgaacgggaactttctgagcgtgaggaacagctcggtactctgatttcggatcagacaagactccaggcagaattagattccggccgaaaagcagaaacacttgaaaaagagaatctgaacaagcttcagatccgtattgcaagtcttagttctgatattgaaaagaaccagaatgatattcgggaaattctcggaaaccgtgcatccacaaaagctcagatccagaagttcgatactatgatggaacagatccaggtgcggaaatccggactgaaccagagatattttggtgcgcaaagtgaagccggtcttcagaaagaacaatatgagacattttatgcggaattaaaagaagtatcagatcagattatttcctttgcagaagagaagaagaactatgaatcacagattcaagaacttcaaaagtctttaaatgaaaaaaatgagcagatccgtgcaagtcagagtgcttaccacagagagcattcacgcctggagtctcttagaaatatgactgaacgctatgacggatacggtaacagtattaagcgtgttatggataaccgcagtcatgaaaaagggctgttaggtgttgttgcagatattattaaagtagaaaaaaaatatgagacagccattgagacggctcttggcggcagtatccagaatattgttacagataacgaacagacagcaaaacgtatgattgaatttttgaaaaagaataaattcggccgtgcaacatttctcccgctgacgcagatccgttcccatggaggaatcgctcagccacaggcattgaaggaagaaggagttatcggtcttgcagacactcttgttatggtggaagacaagtacctggaactggcaggctctctgcttggcagaacactggttgtcgatcatattgatcacggacttgccattgcaagaaaatacaggcagtctattcgaattgtaacgctggaaggtgatctgatcaatccgggcggttctatgactggtggagcattcaagaattccagcaaccttttaagcagacgccgtgagatagaagaactggagcaggctgtccaaaaactccgtgctgatgtagcaaagacagagcaggagatcgcggagctgaaaaacaatcgttccggttactatgataaaatcgaacagatcaaagatctactacagaaagcatatgtccgccaaaatacagcgaagatgaatgccgatcaggcaaagagtaagatcgaagcagcgaatcagactgcgctggaaattcagaaagagacacagcaactggatcaggagatcagtgacatcatggataatcagcagtccatcaatgtggagctggatacgtctgaacagttagaacgtgacctgaataaacagattgaagaagggcagacaaagttagatgatctgaaacatcaggaaatattacagcagcaggcttcggaaaatgcacatttatcctgtgctgctacagaacaaaaggttctgttcgtaatggaaaatgcagaacgtattcaggaagagatgcaaaaattccgcgaagagttgaaggggctggaagcaagtaaaggcggtacaagcagagaaatcgaggaaaaagaatctcagattcaggaattgcgccagacgattgagaattccggagaattatttgtggaaattcaggatgagattgaaaaggcgaagaagacacgtgaagatctgaaccagcgccataaagatttcttacagaagcgtgaagacctctccaggcagatttctgatctggataaagaaatcttccgtctggagagtcagaaaaacagttatgaagaagctgccgagaagcagatcaattatatgtgggaagagtatgaactcacttataatcgtgcgatggaacttaggaatgaaaatttaacggatgttgcgaagatgaaaaagcgtattcaggaattaaaaggagaaatacgcgctttgggaaatgttaatgtcaatgccattgaggactataaaaatgtatcggagcgatatgagttcttaaagacgcagcatgatgatctcgtggaagcagaagcaacactggaaaaaattatcgcagaattggacgaagcgatgcgaaagcagttcacagagcagttcgcacacatttgtcaggaattcgaccatgtattcaagcaattgtttggaggcggaaaaggtacactggaactgatggacgatgaagatgttctggaagcaggaattcgtattattgctcagccgcctggaaagaaactgcagaatatgatgcagttatctggtggagagaaggctctgacagcaatctcattattatttgcaattcagaatctcaagccgtccccgttctgtctgcttgacgagattgaggcagcactggacgatagcaatgttgaccgttttgcacagtatctgcataagcttacaaagaatacacagttcattgtcattacgcacagacgaggtacaatgactgcggcagaccgtctgtacggaatcaccatgcaggaaaaaggaatttcgacacttgtgtccgtcagtcttctggaagatgaactggacgattag

SEQ ID NO: 1524 - DNA, 2280 bp, Dorea formicigenerans
atgttgaaattatatgacggcggtgcgtatctggtaaatggcaccgagatcattacggacgaagcagaagtaaaggcaaagacaggccgtgaggtatccaaggaggaagccagaacgcagacaatggcttatggaattctggacgctcataatacatcaggcaatatggagagactgcagatcaaatttgataagctgacatctcatgacattacatttgtcggaattattcagacagcgagagcttcaggactggagaagtttccaattccatatgtattgacgaactgtcacaactcactctgcgcggtcggcggaacgattaatgaagatgatcacatgtttggactgacttgtgcgaagaaatatggcggtgtctatgtaccgccgcatcaggcagttattcaccagtttgcccgtgagatgctggcaggcggcggcaagatgattcttggatccgacagccatacccgttatggagcacttggaacgatggctatgggtgaaggcggaccggaacttgtaaagcagctcctgaataagacatatgatattaagatgccaggtgtgattggaatttatctggacggagagccggtcaaaggcgtcggaccacaggacgtggcactggcaattataggtgcaacatttgcaaatggttatgtaaacaataaagttatggaatttgtcggaccaggtgtggagaagttaagtgctgatttccgtatcggaatcgatgttatgacaacggagacaacatgtctgtcttctatctggaaaacagatgataagattaaggagttctatgagatccacggcagaagtgaagattacaaagaactgaatcctggtgcagttacatattatgatggtatggtctatgtgaacttaagcgagatacgtccgatgatcgcaatgccgttccatccgtcaaatgtatatacaatcgacgaagtgcgtaagaatctgaaagacgtgcttcacgatgtagagcagaaagcactggtgagcctggatggtgcggtggattattcacttcaggataaagtgattgatggaaaactttatgtggatcagggaatcatcgcaggatgtgccggtggtggatttgaaaatatctgtgcagcagcagacatcataaaaggtcattacattggctcagatgaatttacatttagtgtatatccggcaagtacaccgatctatatggaacttgtgaaaaacggtgcagttgcggatcttatggaagcaggaacaattgtaaaaacagcattctgcggaccatgctttggagctggagataccccggcaaataacgcattttctattcgccactctacaagaaacttcccgaaccgtgaaggttccaagcttcagagtggacagattgcatccgttgcacttatggatgcccgttcaattgcagcaacagcagcaaataaaggtttcctgacacctgcaacagatatggacgtagaatacaagggacagaaataccactttgatcagaagatttatgcaaatcgtgtatttgacagtcatggtgtggctgatccggatacaaagatcaagttcggaccgaatatcaaagactggccggcaatgtcagcacttccggagaatctggtattgaaagttgtatcagagattcacgatccggttacaacaacagatgagctgatcccatctggagaaacatcttcttacagatccaatccacttggactggcagagtttgcactttccagaaaagatcctgcatatgtaggacgtgcaaaggaagtacagaaagcacagaaagcaatcgaagcaggcgaatgtccgttagaggtattggaagaattaaaaccggttatggcaaagatccaggagaaatatccggaagcaggaaaaggaaatatcggagtcggaagtacgatctttgcagtaaaaccaggtgacggttcagcaagagagcaggcagcttcctgtcagaaggtgctcggtggctgggcgaatattgcaaatgaatatgcgacaaaaagatatcgctccaatctgatcaactggggaatgcttccatttatcacaaaagaagacgacaagaaattaagcttcaaaaatggcgattatatctttgtaccggaaatcagaaaagcagtggaaaacaaagatgcagagatcaaagcttatgtagtcggagatacattgaaagaagtcacatttacacttggagatatgacagacgcagaaagagagattattctcaaaggttgtctgattaattattataagggctaa

SEQ ID NO: 1525 - DNA, 1932 bp, Dorea formicigenerans
atggctacagaaaaggtacagcacgaatatggcgcagacgaaattcagatactggaaggactggaagctgtaagaaagcgtccgggaatgtatattggaagtacctcatcaagaggtcttcatcatctggtatatgagattgttgataatgcggttgatgaggcgttggcaggattctgtgataccattcacgtaacgatcaatccggataattccgttactgtcacagataatggacgtggaattccggtcggaatcaaccataaatcaggacttccggcagttgaagtcgtatttacggtgcttcatgccggaggaaaattcggtggtggaggatacaaggtatccggaggacttcatggagtaggtgcatctgttgtaaatgcgctttctgtctggctggaagttgaaatctgtcacgaaggaaaagtatacagacagcgctatgagcgaggaaaagttgcaaagaagctggaagtcatcggagaatgtgagctgggaaagacaggaacaaaggtcacattcctgccggatggagagatttttgagacaacaatctttgattacagcattttacagcagagattccgtgagatggcatttttgacaaagggactgaagatcgttcttcgcgatgaaagaccacaagagccgattgagaagactttccactacgaaggtggaatcaaagaatttgttgagtatctgaacagcagtacgactccgctttacgagcagatcatttactgtgagggaaacgtcaacaatgtatctgttgaagttgcaatgcagcacaatgattcctacaatgagaacagctacggatttgtaaataatattacgactccggaaggcggaactcatattgtcggatttagaaatgcgttaacaaagacatttaatgattatgcaagaaagaataaacttttaaaagataatgagccgaacctgacaggtgaggatatccgtgagggactgactgcaattatcagtgtcaagatcgaggaccctcaattcgaaggtcagacaaagcagaaacttggaaacagtgaggcaagaggagcagttgataatgttgtcagtgaacagcttcagattttcctggaacagaatcctcaggtcgctaaagtaacagttgagaagtctgtgatggcacagcgtgcgagagaggctgcaagaaaagcgagagatctgacaagaaggaaatcagcccttgatggtatgtcacttcctggtaagcttgcagactgttctgacaagaatccggaaaaatgcgaaatctacatcgtagagggagactccgccggtggttccgcaaagacagccagagaccgtgcaacacaggcaatccttccacttcgtggtaagatcctcaatgttgagaaggcaagactggatcgaatttacggaaatgcggagatcaaagccatgatcacggcatttggaaccggaatccatgaagactttgatatcagcaaattacgttatcacaaaatcatcatcatgaccgatgccgacgtggatggagcacatatcagtacactgcttctgacatttatgtacagatttatgccagatctgatcaaagaaggatacgtgtatctggcacagccgccactttataagctcgaaagaaataaaaaagtttggtatgcatacagcgacgaagaacttgacagcattttgcaggaagttgggcgtgataacaataataaaattcagcgttacaaaggtcttggagagatggatgcagagcagctttgggataccactatggatccggagcaccgcgtactccttcgtgtcacaatggatgatgagacagcaagcgagctggatctcacatttacaacactgatgggagataaggtagagccaagacgtgagttcatcgaagaaaatgcacagtatgtacagaatcttgacatttaa

SEQ ID NO: 1526 - DNA, 2628 bp, Dorea formicigenerans
atgagcgagaatacaaataaaaaaattgtgctcatcgatgggcacagcatattaaacagggcatttttcggacttccggatctgacgaattccgaaggacttcatacgaatgcaatctatggatttctgacgatcatgttcaagattctggatgaagaaaagccggattatctgacggtcgcatttgacgtgcatgcgccgacattccgtcataagatgtatgacgcttacaaaggaacaagaaagccgatggcagacgaactgagacagcaggttccggttattaaggaagtcctttgctctatggggattaagactatagagtgtgcgggattggaggctgacgatcttcttggaacactgtccagacgatgtgaagaagaaggaatggaagtgtccgttatttccggagacagagatcttctgcagcttgcaacgcaacatgttaagattcgcattccaaagacaaagcagggtcgtactgaagtggaagattattatgcggcagatgtgaaagaacgttatcaggtgacaccgaaggagttcattgatctgaaagcgctgatgggcgacacggccgataacattccaggagttccaagcatcggagaaaagacagcgaccaagattatcacagaatatcattcaatcgagaatgcatatgaacatgtgagtgaactgaagccgccacgagcgtccaaggcacttgctgagcactgggatatggcagttatgagcaagacacttgccacgattgaagttcatgcggattttccgtatgaactgtctgaggcgaagcttggtaatatatttacagaagaagcatatgcatttttccagaaactacagtttaagaatcttttgtccaaattcgatgttactgcaccggcaaatcaagtggaagacggatttgaacagattacagattataagaaggcagaaaaagttctggatcaggcaaaagaatccacatgtgttggagcggtgatcttccagaatacggaaaatgtacttccgctttttgcaaatgaagcggcaattggcggtatcggtctttgttttgatgaagagcatgcatactgtattgaagtgactgagcagattacaaaggaattccttcttgaaaagctgagtaagctgaatgaaagttgcggacgttttgtcatgttcgatatcaaagaagctatgaagtggctgccaatcaaaaatcagaagcattgctttgatgcaacggttgcggcttaccttttgaatccgttgaagaatgattacacatacgaagatgtggcaagagagcagcttaatattgtaattgaagaaaagtcagaagcttatgtgaaggtttgctatgaagcatatacagcgtttaagggcagtgacttgttatacaagaagttagaagaaacacagatgctgcatctatttgaagatattgagatgccgcttgtatttactctttatgatatggaaagaaatgggatccgtgctgaaggtgaggcgctgaaagtttatagcagccagcttggcggacggattagtgaactggaaaaagaaatttacgaaatggcaggtgaatcgttcaatattaattcaccaaagcagcttggcgtgatcctttttgaaaagcttttacttccgggaagtaaaaagacgaaaagtggttattccactgcggcaagtgtgctggacaagcttgcaccggattatccgattgtaagtaaagtgctggaatacagacagcttacaaagctaaaatctacgtatgcagatggtctggtcaattatattgaagaagatggacgaatccacagcaagttcaatcagacaattacagcgaccggacggatcagcagtacggagccgaatcttcagaatattccggtccgggtagaactgggacggctgatccggaaggtatttgtgccggaggacggatacatttttgtggatgccgattattcacagattgaacttcgtgtgctggcacattgttccggtgacgcaaatctgatcgaggcttaccgggaagaaaaggatattcatagaattacagcttctcaggtatttcacattccttttgaagaggtaactccacttcaaagaagaaatgcgaaagcggtcaatttcggtattgtatatggaatcagttcttttggattgtctgaggacttgagtattggcagaaaagaagctgcaaaatatattgaagattactttaagacatatccgggaatcaagacatttctggatgatactgtggcacatgcaaaagagatggggtatgttgtgacactgttcggaagaagacgtccggttccggaactttcttccagcaattttatgcagcgttccttcggagagagagtggcaatgaatgcaccaatccagggaaccgcagcagatattatgaaaattgccatgatcggtgtgaaccgtagactgaaagagcagaatctgaagtccagacttgtacttcaggtacatgatgaacttctcatagaagcttacagaccagaacttccggaagtagaaaaaatcctccgggaggagatggagcaggcggcatccttagatgtaccgctggagatagatatgcacacaggagaaaactggtacgaagcaaagtaa

SEQ ID NO: 1527 - DNA, 1947 bp, Dorea formicigenerans
atgtgtgagaaatgcaacaaaggaaagtattatattactacagcgattgcttatgcatcaggcaaaccgcatattggtaatacttatgaggtcgttcttgcagatgcaattgcaagatacaaaagaagtcagggatacgatgtatttttccagacaggaactgacgaacatggtcagaaaattgaactgaaagcggacgaggcaggtattacaccaaaacagttcgttgacaatgcagcgggagagattaagaagatctgggatttaatgaatacttcctatgataaatttatccgtacgactgatgaggatcatgaagcacaggtcaagaaaattttcaaaagactgtacgatcagggagacatttataagagttcatacgagggaatgtactgtactccttgtgagtccttttggacagagtctcagttagtagacggaaaatgtccggattgtggacgcgaatgtaaaccagcgaaggaagaagcatatttcttcagaatgagcaaatacgctgaccgtctgatcgattatatcaacacgcatccggaatttattcagcctgtatctcgtaaaaatgagatgatgaacaatttccttcttccaggtcttcaggatctgtgcgtgtccagaacatccttcacatggggaattccggttgactttgatccaaagcacgttgtgtatgtatggctggatgccttgacaaactacatcacaggaatcggatacgattgtgatggaaacagcacagagcagttcaagaaaaactggcctgcagatttacatttgatcggaaaggatattatccgtttccacaccatttactggccaatcttcctgatggcactggatcttccacttccaaaacaagtatttggacatccatggcttctgcagggcgatggtaagatgagtaaatccaagggaaatgtattgtatgctgatgaattggtagatttcttcggagttgacgcagtacgttacttcgtacttcatgagatgccatttgagaatgacggagttatttcctgggagcttatggtagagcgtatgaattccgatctggcaaatacacttggaaatctggtcaacagaaccatttctatgacaaataaatactttggcggaacggtgacgaataaaggtgttgctgagacagaagaagacaaagcagttgatgcggatctgaaagcaatcacagaggatacgccaaaaagagtggaagctaagatggacgagctgcgtgtggcagatgcgatcacagagattttcgtactcttcaaacgctgcaacaaatacatcgacgagacaatgccgtgggcacttgcaaaagaagaggctaagaaagaccgtctggagacagtgctctataatctgatcgagagcatcaaaacaggcgcaagacttctggagtccttcatgccagaaacatctgagaagattcttgcacaacttggtgacggaaaagtgacagaaaagccggaaattcttttcgcaagattagacgtagaagaagtaatgaagaaagtagaagaacttcacccacagatgacagcagaagagaaagagaatcaggcagatggtgaagaagagacagtaatcgatattgatgcaaaaccagaaattacatttgacgacttcggaaaaatgcagtttcaggtaggtgagatcatctcatgcgaggcagtcccgaaatctaagaaattactgtgctcacaggtaaaaatcggaagtcaggtaaaacagattgtatccggaatccgcaaacactatacaccagaagaaatggtcggcaagaaagttatggtacttgtgaacctgaagccggcaaaacttgcaggagtactttcagaaggaatgcttctgtgcgcagaagatgcagaaggaaatctggccctgatgacaccggaaaaagcaatgccggcaggagcagagatttgctaa

SEQ ID NO: 1528 - DNA, 2778 bp, Dorea formicigenerans
gtgggaacgacatctgaaactaaaccaaaacgatatatcagcgtggggcttctggcacatgtggattctggaaagacaacgctttcagaaggaatcctttatctgacaggacagatccgtaagccggggcgtgtagatcatggggatgcgttccttgataactacgcgctggaacgacagagggggattacgattttttccaagcaggcagtgtttcagcttggtgacagccaggtgacacttctggatacaccggggcatgtggatttttccgcggaaatggagcggacgctccaggtgctggattatgcggttttggtagtcagcggagctgatggcgtgcagggacacacccgcacgctctggaacttgcttgcgcgctaccggattccgacattcatatttgtcaataaaatggatcagccagggacggacaaggcgctgattctaaaagagctgaagaaaaaactggatgcttcctgtgtggacatggaagatccggaagatattgccacgggggatgaacgtgcactggaagagtatctggaagcgggagaagtttctatagataccataagccagatgattgcagatcgtcagattttcccttgttattttggtgctgcgctgaaattacaaggtgtacaggaattactggacgggattggaaaatatgtgggagataatgtttcggccaattatgatcaggcagataatagattacagaacagtggagatgctcagcagtttggtgcgcgtgtctataagatttcccgtgaccctcagggaaaccgcctgactcacatgaagattacttccggtgaattaaaagttaaatctttgctgaaaggtggacaagtctctgagccgtgggaagagaaggcagaccagatccgaatttattccggagaaaaattcgagacagtacaacaggcgaaagcaggcatgatctgtgctgtgacaggattaaagcatacatttccaggggagggacttggaattgaagccggtaaacaggcagtaacaccgatgttagaaccagttctgaattatcaggtttatttccctgatcaggtggatgcacacaccatgctcggctatatgcgtcagatcgaggaagaagatcccatgcttcgggtcatttggaatgaagaactgggtgaaatccatgttcagcttatgggcgaggtgcagacagagattctgaaaagtctggtaagcgaacgattcggagtagatgtgacatttggcactggaaatattgtatataaggaaacaataaaaaatgtcgtagaaggtgtagggcattatgagccgctccgccattatgcggaggtgcatctgattctggagccgggacttccgggcagcgggcttgagttctcaaccgactgcagtacggatgatctggatctgaactggcagcggctgattctcacacatcttttggagcgggagcatagaggtgtgcttcttggagcggcaattactgatatgaagatcacactggtagcaggaagagcacatttgaaacacacggagggcggtgactttcgacagtctacttaccgggcggtgcgccagggactgatgcaggcggaaagtgtactgttagagccatattatgaattccgtctggaagtgccgtcagaaatgatcgggcgtgcactgacggatgttcagcgtatgtacggtgagttttcgccaccggagacagacggggatcagagtgtgcttacaggaagtgcgccggttgcctgtatgcgtgattaccagaaagaagtggtgagctacacaagaggacggggacggctgacacttgtatttcagggctatgcaccatgccataatacagaagagattctggaaaatgcaggctatgacccggaagcggataacgagaatccgaccggttctatattttgcagtcacggagccggatattatgtaccatggcaggaagtgccggagcatatgcacatttcctctaagttggaggagtatctcagaaaagacaaagatgcgggggaaatgcacgaaggaactgacggcaatggcagaggtgtattaagaaatggtgctgccggtggaagcccttcaaaatcaggcagaagtcgtgattttggcgcggaagaccgggaattggaagagattttcatgcggacttacggaaagattgaacgcaagaaaccaggcaacggaccgcgtacgattattgcccagtcccaatataaagaagaaaaaccacaggagaaggttgcggaatatcttttagtagatgggtacaacgtcattttcgcgtgggacgaactgaaagaactggcaaaggtgaacattgagagtgccagaaataaattaatggatatcttaagcaactatcagggatttaagaaatgtaccgtgatccttgtgtttgatgcatataaggtggatggcgatacgctggagattcaaaaataccacaacattcacgttgtttatacgaagcaggctgagacagcagatcagtacatagaaaaggtcgtgcaccacatcggacgaaaacgccatgtgacagtcgtaacttccgatggcgtggagcaggtcgtgacccagggacagggaagcgcacttatttcttccagagaattttatgaagaggtagaaatcacccgcagacagattcaggaagaaattaaggagcgcacaggcggcacaaaaaattaccttttcgaccatatggatgaagcatttgtaaaagagatggaagatgtccgtcttggaaagaaggatatttga

SEQ ID NO: 1529 - DNA, 2370 bp, Dorea formicigenerans
cgcgtgatgagaagcccgttaaataaacgtctgttccgggagcttcgtggagaatttggaaaatatctggtcatttttattttgatgacgctgacgatcggaatggtatcaggatttctggtggccgatggaagtatgatccaggcgtacgaggaaagctttgagaaatatagcattgaaaatggacatttccggacagaaaagaaaatgaacaatgctcagattcaggatatcgaagatctgggcatcaaattgtacgagaattattatgtagaggaagctttaacaaatggaagtacaatgcgcattttcaagaatcgtgatgaggtcaataaggtgtgcctgatgaagggaaaaatgcctgaaaaaccgggagaaatcggtattgaccgtatgtatgcagacaataatgatctgagcgtgggtgatgagattgaaagtggcggacatacatggaagattaccggtcttgtggcgctttcagattacagcgccttgttttccaataataatgattccatgtttgactcggtaaaatttggcgtgtcggtagtgtgtccagaggagttcgacagctacaaggccgatcagttgaattacagctacgcatggaaatacaatactgagcccaaaaatgaaaaggcagaaaaagacatttcggaagatctgatggaagatgtggcaaaagaagtgacactggaagaatttgttccaagatacacgaaccaggcaatcattttcactggggatgatatgggcggtgaccgttcgatgatgatcgtgcttctttatatcatcatcgtgatcatggcatttgtctttgcaatcactaccagcaacacaatccgaaaagaggcaaatgtaatcggcaccttgcgggcatccggctatacaagaggtgaattgatccggcattacatggcagccccggtatttgtcacatttattggagcgattattggaaatattatcggctatacggtaggaaaagattattgcgcgggactttactatggaagctacagcctgccgacctacgtgaccatttggaacgcggaagcatttcttctgacaacggtagtgccgatcctcattatgcttgtggtgaattctgtgctgctgtggtacaaattaaaactatcaccactgaagttcctgagaagggacttaagcagacgtaaacagaaacatgcattgccgttgagtgagcatcttggctttttccaaagattccggatacgtgtgatccttcagaatatgagtaactacgcagtattgtttgtgggaattatttttgcaaatatgttgttgatgttcggactgatgcttccatctgtgctggaccattatcaagtggaaatggaaaatggcatgctcagcaaatatcagtacatgctgcagatgccggcgagcatggcaggtggagacagtaagcttgagcagatggtgtccatgatgatgttcagtcaggcagtagaaacagaaaatccggatgcagaaaaattcagcgcctattcactgagcacccttcctggaaaatataagagtgaggaaattatcctctacggtgtggaaaacaatagcaaatatatcaacattaagtggaaaacatcagattccgcatctaatacagatgtgaaaaatgtggagaatatccctgaggtatacctctcctctggctatgcagaaaaatttagtctgaaaaaaggtgacacaattactttaaaggaaaagtatgaaaataaaaaatacaagtttaaagttgcaggtgtatatgattacgtaggttcactctccatatttatgccaatacaggaactcaacaaaacatttgatatggacaaagacagcttcagcggatatttctctgattctgaaattacggatattgatgaaaaatatataggatccaccattgatgttgaggatctgaccaagatttccagacagctcgacgtgtccatgggaagtatgatgaatctgatggacggattttccgtgatcattttccttgtattgatttatctcctgtccaagatcatcatcgagaaaaatgcgcagtctatttccatggcaaaaatcctgggatatacaaacggcgaaatcagccggctgtacattatgtccacgtctatcgtggtcgtgctgttcatcttgatcagcctgccattggagctggaaatcatgcagattctgttccgggaaatgatgttgacaagcattaccggctggatcacattttacatagatccgaagattttcgtggaaatgtttgtgatcggcgtggcggcatatgccgttgtggcagcaattgaatatcgaagaatccgaaaagttccaatggatgaagcgttgaaaaatgtagaatag

SEQ ID NO: 1530 - DNA, 2955 bp, Dorea formicigenerans
gtgcaagccgatttgtataatttgtggaaccgggtcaaatccggcataagtgatatcgtaaaatcaagaacatttattgcaattatcatgttctgcgtcttgtcagcagtattacttcaacgagtattttatctgcagattgtgaaaggacagaactataccgacaaatatgaacttcagattcaaaaaacaaaagaggtcgaaggaacccgcggcaatatttatgaccgcaacggtgttctgcttgcctacaatgaactagcttattctgttaccattcaggataatggagactatgataaaaaatccgaaaaaaataaagctttaaatcaaattgtaacgaaagttattaatattgtggaaagtaatggtgattccgtcatcaatgattttggtattattctggatgccaatagtgaatactcttttgtagcagaaagtgatacccagcgcctgcgtttcatcgcagatgtatatggcaaaaaaaccattgatgaattatcggacaagcaaaagtcccagtctgctgccgacatcatgcattacttatgtaccgataaaacttacggttatggtatcaacgagaaaaaactggacaagactatgattttgaaactggtcaatgtacgttatgcaatgtctctgaacagttatcagaaatatatctctactacgattgcatccgatgtcagtgatcagactgtggctgatattatggaaaacagtgattctctacagggcgttaacattgaagaagaatccttacgccgatatacagacagtaaatgttttgcaaatgtaattggctataccggacagatttcaacagacgaatatgatgcacttagtaaagaggatcaggaaacttattccaaaacggatacggtcggaaaatccggacttgaaaaagtcctggattccacacttcgcggaaaaaagggtgaagtgaagttatatgtaaataacgttggtaaagttctggacaccgttcagtctacagaaccaaaagctggcaatgatgtgtatctgtctttggatgctaatcttcaaaaagcagcctataatattctggaacaggagcttgccggaattcttctttccaagatccagaacactttggattttgatcggaattctgtcagtgacggaagtgacgttatgattccaattggcgatgtttataacgcactcattgctaatgatgttgtaaatatgactcatttcagtgagaatgatgcaaaatcaaccgaacaagaagtttataatacattttccggatacaaagagcaggttctggcaagtctttccagtacacttgcagatcctaatgcagctgcatacaaagatgattctaaggaaatgcaggcatatctgagttatattgttacagatatattgacaaataataccggcattttaaattccagtgtcatcaacaaaaatgatgaaacctataaagcatggaaaacagatgagaccatcaatgtttacacatttttaaactatgctgtttctcagaactggattgatacctcaaagcttcaaaattatacaagcaatggtggtaaatattcggattcctcggaaactttccaggcaattatttcatacttaaatgaacatttaaaatccgataacagttttgacaagctgatctacaaatacatgatcaaagccggatccattactggtcgtgaactttgtatgattctctacgatcagaacatacttaactatgatgaatctcaatataatgcactcgcaagtggcgcaacaacagcttatgactttatgcgtggaaagatccagacactggagattacacctggacagctcggtctggaaccatgtacgggttcttttgtcatgacagatacttccacaggtcaggttctggcatgtgtatcttatccgggatatgacaataaccgacttgcaaacaatatggactcaacttattacaatcagcttgtaacagcaagttcccgtccattctacaataatgcgacacaggaaaagaccgcaccgggatctacttacaaacctttgtctgctatagccggacttaccgaaggtgttatcagtacagattcccatcttccgtgccatggtatttatgaaaagattgaaccaaatccaaaatgctggatttacccaaatgcacatggcagtctggatgtgtcaggtgcaattgagaactcttgtaacagtttcttttatgaagtcggttacagattaagtctgaaagacaacggaatcaattccatcagccaggataataatcaaggtgatgcaacgaatgcttactattccagtgaacttggactccagaagctttcaaaatatgctcagatgtttggacttggaaccacttccggaatggaaattccagaggctgatccacaaatttccgatgattcttctgtaccatctgcaattggacagggtaccaacaactacacgacaagtcagcttgcccgctatgttactacaattgcaaataaaggaacactttttgatctgacactcctgaacaagaccactgatgtcaaaggcaatgtcattgaagaatcacagccaaaaatcgataatactctgtcagatatttctgcgagcacatgggatgctgtacacgaaggaatgcgtaatgtagtacttgtatctcatagtagtacattttcggatattaacaggagcggattccagttatccggtaagaccggaacagctcagcagagtaaaacgcatccggaccatgcgcttttcataggatttgcgccaagcgattcaccggaagttgcttttgcaactcgtatcgccaatggttatagttctacttatgcagcagaagtagccagagacgttatgaaatattattaccagctcactccggaaaatgaattgataaccggaacagcttcaagcattggttcaaatgcttcaaatgaaggctag

SEQ ID NO: 1531 - DNA, 2379 bp, Dorea formicigenerans
atgatgaataagaaatctttatacaaattagaatacaataaaataattgaaaaactgacagagcacgcaggttcttttggaggccaggagcgttgcagaaaattaaaaccaaagacggaaatctctgaaattgagagaatgcaggaagaaacggccgcagcatttacacggatcgtaaagaaaggacgtccatcttttggaggctgtagtccggtaagtgaatctatgatgcgtctggaaatcggaggaacacttggaagtggggagttacttcgcatatgtaaggttctggagacagcaggacatgtaaagaattacgggcgccatgacaatgcagatgatatgcaggatatattggacggatactttgaacagcttgttcctgtatctattttgtccacggaaatccgcagatgtattccggcagaagatgagattagtgatgatgcaagtccggagcttaaaagaatccgtcgtgctatggggcagattaatgataaggttcatgcaacattgtcttccatggtgaatggttcactccgcacatatttgcaggatccgattattacgatgcgtggagatcgttactgtatcccggtcaaggccgaataccgtggccaggtcccgggaatgatccatgaccagtcatcaacaggttctactttatttatcgagccgatggcagttgtaaagctgaataatgatctgaaagaattatatggaaaggaacaggaagaaattcaggtcattcttgccaggttgagtgcagacgcagcggaatatgtttctgaaatccgtacggactatgcaacattgacagagcttgattttatatttgcaagaggagctcttgcattggatatgaatgccagcaaaccgatgttcaatcaggagagaaggatccgtatccgcgagggaagacatccgctattagataagaagaaagtcgttccgatcagtctgacactgggcgaggactttgatcttctgattgtgacaggaccgaacaccggtggtaagactgtatcacttaagaccgttggattattccagctcatggggcaggcaggtcttcacattccggcactggaccgttctgaactgggtgtattccgtgaagtttatgcagacatcggtgatgagcagagcattgaacagaacttaagtacattctcatcacatatgacaaatgtagtgtcatttatcaagcaggtggatgaagattcacttgtactttttgacgagcttggagctggaactgacccgactgagggtgcggcactggcaacagcaatattgaatcatttgcattgtcagggaatccgtactatggcgactacgcattacagtgaattaaaggtgtatgccttgtccacaccaggggtagaaaatgcgagctgtgagttcgacgtggagacacttcgcccgacgtatcgactgcttcttggaatcccaggaaagagtaatgcatttgcaattgcaggaaaactgggacttccggactatattatcgaggaagcaaagacacatttgacagagcaggacgaatcttttgaggacttgctgacagatttggagagcagcagacgaaccatcgcgaaagaacaggaagagattgcggcttaccgccgtgagctggaggctctgaagcaggagacggcgcagaagaaagaaaagctggaagaacagcgtgaccgcattttacgagaagcgaatgaaaaagcacatgcgattctggcagatgccaaagagacagcagatgagacaatgcgtaactttcataagtttggaaaggctaatgtttcggcaacggagatggaaaaagagcgtgagcgcctgagaaagaagatggagaagacacgcgagggcatgacagaggaagtgaagaagccgaagaagcagtataagccatctgattttaaattaggcgagacggttaaagttctgagcatgaatctgaccggaaccgtgcattcactgccagatacaaaaggcaaccttatggttcagatgggaattcttagctcaaaagtacacatttctgatctggagattgttgatgagaagccggcatatctgaaaaagactgctgcaagaacaagcaagggtaaggtgaagatgggcaaatctttgtccgtaagcccggaaattaatctgcttggaaagaccgttgacgaggcggtcgcagagctggataaatatttggacgatgcgtctttggcacatttgacaagtgtgcgcgtggtacacggaaaaggaaccggagctttaagagcgggcatccaccaatatctgaaacgtcagaagcatgtgaaatcttacagattaggagcatttggcgaaggagatgccggagtgacgattgtagaactgaaataa

SEQ ID NO: 1532 - DNA, 2445 bp, Dorea formicigenerans
atgaaattatcattatcatggattaaagattttgtaaatatccctgaagatatggatatgaaacagcttgcatatgatctgactatggatactgttgaggttgaggacgtcgagtacctggcagaccgttttgaccatatggtagtaggtgtgatcgaggatatcgagccacatccaaatgcagacaagcttcgtgtctgcaaagtagacatcggtgacggtgagattaaagacatcgtctgcggtggtatcaatctggaaaaaggtatgcgcgttgccgtatcctgcccgggagcaattgtccgctggcatggagagggagagcctgttgagatcaagaagtctaaacttcgcggcgtggcttcctacggaatgatctgtgcatctgacgagatcggactgggagatctcttcccggcatctcaggaagcagagattcttgacctgtccgcatttgatgtaccggcaggaacaactctggcagatgcccttgacctgaacgatgttcttcttgagattgataacaaatcaatgacaaacagaccggatctgtggggtcactatggtatcgcccgcgagattgcagcattatataatctgccactggctgagatcaagccatttgagacagatgtacagtctgattttaatgtagagattgctgatccagacagatgtccaagatatatcggtgtagaaatgtctggtgtaaatgtaaaagaggcgccataccagatgcagaatagaatctggaaggttggtatgcgtccaatcaatgcattggttgacattacaaattatgtgatgctcgcaactggtaacccgacacatgcatttgacgcagataacatttctgatcacatcgttgtaagacatgcagcagaaaatgagaagttacttcttctgaatgacaaagagctttctctttgtacagatgaccttgtaattacagattccgaggaacctgttgcactggccggtgttatgggtggagcaaaggattctatcctgcctaagacagagcgtgtcattcttgaggtcgcaaactttgaagcagcaggaatcagaagaactgcacttcgttatgataaccgtacagaagcttcttcaagatatgaaaaagctatcgatcctgagagatgcgaccaggcacttgcactttccatgcagtatttcaaagagctgtatccggaaatgaaagtgacaggttactgtgataaatatgtaaagaaactcaagagagctgagattgatgtaaaccttgtatggcttgagaagagacttggaaagcatctgacaaatgatgagatccagggcaagcttgaaaaacttggatttgatgtacagatcaatggtgaggacatgcatgttatcgctccgacatggcgttccacaggtgacatttccattaaagatgatgtaatggaagaagttgccagaatgtatggatacgacaatttcgagccaacatcatttacaacaacatttgacagtgcaatcaatcagaaagatcaggatcttgtaagaaatatgaaagagttccttgcaattcgttgtggaatgcaggaaatctacacatatccttgggtaaatgatgtatatctgaatgcaattatgcagacgacagaaggaatgcttcgtctttcaacaccaccggcaccggatctcagttacctgcgtgcttctctgcttccgaacatttgcgaggcagttgcaaagaatgagcgttacttcaatgatttctcaatctttgaggaagctcaggtattccatgatgcgaactatacttcaccatacgacaagtctgagttactgccagagcagcgccgccacattgccggagcatttgcaagcagtgtgaaagatgtgaaagagctcttccaggaagcaaaaggtgttctggagtatatgccacgttatacacatcaggcagcatttgagttcagaaaagaagagaaaccagtatgggctgacaatgtagtatggctcaacatttaccgtggagatgagaagattggtgatatgggacttctggctaagaaggcatctatggactgcggaatcaagaacttgtccgtaatgctctttgaattagatgttctgaaactgaaaccactcatttccagaaccaataaattcactcaccttgcagcatatccggagaacgagtatgacatttccatgctctttgactccaatgcagtatggagtgatatgcatgaggcaattcttggcaagaagaaagccagcgagttccttaagaaagcagatttcgtagatgagtaccgtggaaaacaaatcccacagggcaagaaatctgtgacaatcagactgaccatcggatctaatgagaagacactgacttcccaggagattgaaaatgtagcaaatcaggttatgaagaagctgcagaagaagatgggagcagagctgagaactcagtaa

SEQ ID NO: 1533 - DNA, 1962 bp, Dorea formicigenerans
atgggaggacattttatgaataagaatgagcaggacatgattcggaaaataaaggaaaagtcagaacaggttccggtgccgaaagcgcttgaaccgaggcagattgaagcaaagcttgcagggaagaagaaaaaagtgtggactccggcgagaatcggtgggctggcagcagcatgcctggtgctaatcgtgggagtgatggtatgccagaattattttaaaatggaagacgcgactcgagatgataagatagcaggcagtgatgtgacaatcagtgacagtacgaaagtagaaagtgcggcggaatataaggatgtctatgcatatttggaaaaatataagaaagatcaggaaagagacagtgcatacacttcaagctgggcaagatcattgaatgatataagagtcgatgaatcagctgacagtaaggcaagtggagatgcagcacagaatatggaagaaagcagtactgcagcagcggacaccggaatggcaagcggttcttattctgagacaaatgtacgtcaggaaggtgtggatgagggggatacagctaaaacagatggaacatacctttacgtgttaaaagataagagcgatcagattgccattatagatacccgcgataatcggatgaagcaaacggcgactataacagtggaagatgtttctgaaatccaggaaatgtatctggacattgaaagaaatcaattaatcgcagtgtgtgacggttatgtgggcggcaaatggaatgatgatgattatggatatggtcagagggctaatacgaccgcagtaacttatgacatttcagaccgggaaaatccaaaagaagttggcagggtcagtcagagtggatattacaattcttcaagaattgcagatggatacttatacttattcagtgattattatgtaacacttgatggtataacggcgaagaatccgaagtcctatataccacttgtaaacgataatctgatcaaagaaacagatatttgtcttccgtccatttcaaaggcagatatgtattcgatcatcacatcagtttctctggaaaatccaaatgagacagcgcacagtaaggcacttttggcagacggtggcaatttatatgtgagcaacgataatatttatttttatgaaaatgtgtggcaatattctggaaaagatgtgacgacaatccgaaaagtttcttatgaaagtgggaaattgacggctggggcacagtgcaaaatagacggttatattaatgattcattttctattgatgaatatgatggatatctgagagttgtagtgaccgatggcgacacgaacagtgtttatgttttgaatcaagaactgaaagaaaccggctccatcaaaggtctggcagaagatgagagggtgtattccgcaagatttatgggaaaggcaggatactttgtaacatttaaagagacggatccgttattttccgttgatctgtcggatccgaaaaatccaaagatcataggagcgttgaagatacctggattttcagattatctgcatccgtatgggaaaaataagcttctgggtattgggatgaatgttgatgaaaagactatgtcaacagatggcgtgaaattgacgatgttcgatatttctgatccggaaaatgtgaaagaggagcagacttatgtcattgaaaatgtgtactatacagatgtttcttatgattataaggcagctttagtagatgcagagaaaaatctgattggttttgctgcagacagcgaaggcggccgggagtactatacattttcttacgacgaaaaacaaggatttacatgtacgatgcatgaggaaatcaatggaaataatatgaggatcacaagaggtatttatatagaagatacgctttatgttatccagggaaatattatagaagcgtatagcctgaaagatttcaaaaaagtggacgatatcattttgtaa

SEQ ID NO: 1534 - DNA, 2682 bp, Dorea formicigenerans
atgactacttataattataagttagtgaattttgaggaggaaattatgcagaaatacggagttaacgaattaagaagaatgttccttgaattctttgaaagcaaggatcacctggcacttaaaagtttttcactggtgccacataacgataaaagtttattgttgatcaattccggtatggcaccaatgaagccatactttacaggacaggagatcccgccgagaagaagagtgacaacctgtcagaagtgtatccgtacaggagatatcgagaatgtaggtaagacagctcgtcatggtacatttttcgagatgcttggtaacttttcttttggagattatttcaagacagaggcaatccactggacatgggagttccttacagaggttgtaggacttgatccagagagattatatccttctgtatatgagaatgacgatgaagcatgggaaatctggaataaagaaatcggtgtcccggcagagcgtatcttccgtttcggaaaagaagataacttctgggagcatggttcaggtccttgtggtccatgttcagaagtttattatgaccgtggtgaaaaatatggctgtggaaaaccaggctgtacagtaggctgcgaatgtgaccgttatatggaaatctggaatgatgtattttcacagttcaacaatgatggacatggaaactattctgacctggctcagaagaacattgatacaggtatgggactggagcgtcttgcatgtgtcgtacaggatgtagactccatgtttgatattgatacaatgaaagcattgcgtgaccatgtatgcgctatgtcaggaaagcattatggcatcgaccacgagacagatgtttctcttcgtgtcgtaacagatcatatccgttctgttacatttatgatttcagacggaattatgccatctaacagtggccgtggttatgtactccgccgtctgctccgccgtgcttgccgtcacggaagacttctcggtatcgagggagctttccttgtagagcttgcacagactgttattgatggttcaaaagatggatatccggagcttgaagagaagaaagactttatcttcaacgtgattgcaaaagaagaggctcagttcaataagacaattgatcagggactttctattcttgcagatatggaagaagagatgaagaaaaatggtgagacagttctttccggagaaaatgcatttaaactttatgatacttatggattcccaattgatctgacaagcgagattctggaagagaagggcctgacttatgataaggaaggatttgaaaaagctcagaaagagcagcgtgcgaaatcagagggaacatttggtactcacagctacactggaaaagacgctacagtttatgatgaactggatgcagagcttgcaacagaattcgtaggatacgagaatcttgtatgtgatgcaaaagtgacagcacttacaagcgaagaggagattgtagacgcattatccgatggcgagaaaggtacaattattgttgacaagactacattttatggaacaatgggtggtcaggaaggtgacatcggtaccattaagactgctgatggagagttcgtagtagagaatacaattcatcttgccggaacaaagattggacatgtgggatatgtaagccatggaatgatcaaagtcggtgatacagtatctatggaagtagataaagagaatcgtaatctgtcagcaagaaaccacagtgcaacacatcttcttcaggcagctctccgccaggtacttggaacacatgttgagcaggcaggttcttatgtagatgctgagagacttcgttttgactttacacatttctcagcattgtcaaaagaagagttaaagcaagtagaaaatattgtaaatgaaaagattgcagaatgcttaccggtcgtagctaagaatatgccaatcgaggaagcaagaaagacaggagcagcagcccttttcggtgagaaatacggtgatgttgtccgtgtcgtaagcatgggagatttttcagtagagttctgtggaggtactcacgtatcgaatacaggagttatcagtgcacttaagattatttctgagacaggtgttgcagcaggagtcagacgtattgaggctctgacttcaaagggacttctgaaatattatgatgatatggaaaagaaacttcaagaggcagcagctcttgtgaaagcaactccgaatcagttatcagataagatccgtcatcttcaggctgagaataaaaatcttcacagcgagcttgagagcgtgaagagtaagatggcaaaagaggcaatgggagatgtatctgatcaggttacagaagtaaaaggtgtaaaacttattgctgcaaaagtagatgatgtagatatgaatggccttcgtgatcttggagatcagttgaaagaaaaacttggtgaaggtgtgatcgttcttgcatccgcggcaggtggaaaagtaagccttgttgcaatggcaacagatgaggctgtgaagaaaggtgcccatgccggaaatctgatcaaaggcattgccggccttgttggaggtggcggcggtggacgtccgaatatggcacaggctggaggaaagaatccagacggaattgacgctgcaattgcaaaagtaagtgaagtcctggagagccagttatag

SEQ ID NO: 1535 - DNA, 2217 bp, Dorea formicigenerans
atgttcgctgatattattattgatattacgcatgaaaaattggataaagtatttcagtatcgcatccccccagaacttgagggggtgcttcaagttggaatggaagttgtagttccatttggcaaagggaataaagaaactcatggatatgtgataggattttctgaaaaagcagattacgacctcgcaaaaattaaagaagttctttgtattgaagaaaaccatcaggaaatcgagtcaaaacttattgctctagctgcatggatccgagaatactatggtggaactatgatccaggcattgaagacggtacttcctattaagaaaaaagagcggatccagcacaaacgcaaggtgaagcttcttttaaatgaagaggaaggaaagaagcagttagatatttatctgcacaagaaccaaaaggcaagagcaaggcttttggcagggctgttagatcagccgcagcaggactatgagctcattacaaagaagttaaatgtcacactttcggtcattcgttctctggaagagcagggagtattggagattcaggaagaagagaatttccgtaatccgatacactaccagaaaaaagatttcggtccacttacacatacaccagaacaacagcaggcaatcgacacattctggaaagattacagtcagagacattatggaacatatctgctttatggcgtaaccggaagtgggaagacggaagtttatattgagatgatcagtcgggtggtcagtcagggaaaacaggcaattatgctgattccggagattgcgctgacttatcagacggtgatgcgcttctatgccagatttggaaaccgggtgtcgattttgaattccagactttcccagggagagcgttctgatcagatggagcgtgtcagacgtggagaagtggatgtgatgattggacctagatctgcgctttttacaccattttccaatctgggactaatcgtgattgatgaagagcatgaacctacttataaaagtgagcaggtgccaagatatcatgcaagggagactgcaatacgccgtgcacagattgaacaggcaagtgtcgtacttggttcagcaacaccttctgtggaaacattttcctggtgccagggcggaagctgcacgatgctggaattaaagaaccgtgctaccaggcaagtgatgccaaaggtatacacagtcgatatgcgggaagaattaaagaatggaaaccgcagtattttaagtgacagactgacagaacttatggaaaagtgtttaagtgagcaccaccagatgatgcttttcctcaatcggcgtggatatgcggggttcgtctcttgcaggtcctgtggatatgtagtaaaatgtcctcattgtgatgtttcgctctcagagcacagaggaggcaggctcatctgtcattactgtgggcatgaggagaggatgatcaaaacttgtccgtcctgtggttcaccttatattggtggattccgcatgggaacgcagcaggtagaggatctggtaaagaagcgctttccacaggcaagagtcctgcgtatggatctggatacgacaaagaataaagacgggcatgagaagattctgtcagcgtttgcaaatgaagaagcagatattctgattgggacgcagatgattgtgaaaggtcatgattttcctggggtaacactggttggaattctggcggcagatatgtcactgtatggggacgattaccgttccggagaacgtacatttcaacttcttgtgcaggctgcaggtcgtgccgggagaggtaatcttccgggagaggttgtgattcagacatacagtccagagcattatagtattgtaaatgccgcaaagcaggattatgaaagtttttatgaagaagaaatcagttaccggagacttatgggatatccgccggctgccgggctgatggcaatttatgcatcaggggcagacgaggcacttcttacgaaagcttcaggatacctgaaagattttgcagtgcgggcagctggagaagcaccgatggcagtcattggaccagcaagtccaggcataggaaaaatcaatgatatttaccgtaaggtcatctatttgaaaagtgaagatgaaagaatcctgatggcggtgaaggagcggatggaaaaatacattgagatcaatcggggctttcagtcattgaagatacagtttgatatgaatccgtaa

SEQ ID NO: 1536 - DNA, 1908 bp, Dorea formicigenerans
atggagaaagaatggaaagcttatgaaatcggagaattagatcagtaccttttcggacagggaaatcactacgaaatttataagaagctgggtgcacatatggtggacaacgaagggcaggaaggagtttattttgctgtctgggcaccgaatgcgaaatcagtgtctgtagtgggggaattcaatgactgggatcgcacaagaaaccctatgacaagggcggaatatatcggaatttacacatgctttgtaccgggagtaaaagaaggtatgatgtataagttctgcattgagacgattacaggggagtatcatatgaaggcagatccgtatgccaattatgcagaacttcgtccgggtacagcatcaagaataacgaatattgagaatttgaaatggaccgatagttcctggatgactgcacgggaaaaatggaaccacaaaaaagaaccaatgtctgtatatgaggttcatatgggttcttggaagaggcacccaggcacagaggacgagggattctatacttatcgtgagtttgcaaaagaaatcacaaagtatatgaaagatatgggatatacgcatgtggagatcatgggaatcgcagaacacccatttgatggatcatggggatatcaggtgacaggatattatgcgccgacaagccgttatggaacaccggaagattttgcgtggatgatcaattatctgcatagaaatggaatcggtgtcattatggactgggttccggcacattttccaaaggacgagcatggacttgccgagtttgacggaacagcaacttacgagtatgcagatccaagaaaaggggagcatccggactgggggacgaagatatttgatcttggcaagaatgaggtaaggaacttcctgattgccaatgcacttttctgggtggagcatttccatattgatggacttcgcgttgatgcagttgcttctatgctgtacctggattatggaaagaaagacggagaatgggttccgaaccagtatggaggtaatgagaacctggaggcagtagatttcttcaagcatctgaacacagttgtacttggaagaaatccgggtgcacttatgatagcggaagagtctacggcatggccgaaggtaaccggagatgtagaagacggaggtcttggatttagccttaagtggaatatggggtggatgcacgactttacggaatatatgaagctggatccgtatttcagaaaagacaatcatcatatgatgacatttgccatgagttatgcgtacagcgaagattacattctcgtactgtcgcatgatgaggttgtccatttgaaatgttccatgatcaataagatgccaggacttggatttgataaatatgcgaacctgaaagcaggatatgcatttatgatgggacacgccggaaagaaattgttgttcatgggacaggattttgcacagcttcgcgagtggtcagaggaacgtgaactggactggtatctgttggaggagccggagcatcaggcaattcagtcatggatgcgtgatctactccacatgtataaaaagaaacaggcactttatgaactggatcagtcatgggaaggattcgagtgggtcaatgcagatgatgcatacagaagcatttacagttttatccgccattctaaagatggaaaacataaccttttgttcgtgatcaacttcacaccgatggcaagagaagattaccgtgtaggcgttcctagaaagaagcagtataagctgattctgaacagtgacgatgtgaaatatggcggaaatggcgagaagaggcagaacatttatcatgccgtgaagaaagaatgtgatggaagaccatattcatttggatacaaattgccgccgtatggggtagcagtttttgaattttaa

SEQ ID NO: 1537 - DNA, 3675 bp, Dorea formicigenerans
atgccagaaaatagtaaagaacaatcatatcagccaatgacttttgatgcaatcaaaatcgggttggcatcacctgaaaagattctggagtggtcaaaaggcgaagtaacaaagcctgagactattaactatagaaccttaaaaccagagagagatggtctgttctgtgaaagaatttttggaccaagcaaagactgggagtgtcactgcggtaaatacaaaaaaatccgttataaaggtgttgtttgtgaccgttgtggtgtagaggttactaaggcaagtgtacgtcgtgaacgtatgggacatattgccctggcagccccggtatctcatatctggtactttaaaggaatcccgagccgtatgggattgatccttgacttgtctccaagaacactggagaaagtattatattttgcttcttatatcgtacttgataaaggcgagacagacctgcagtataagcaggttctgtctgagcaggagtatcaggaagcaagagaatcctggggaaaaggtttccgtgttggaatgggagctgaatctatcttagagcttcttcaggcaatcaatcttgaaaaagaatacgaagatctgacagaaggcctcaaaggcgctaccggacagaaacgtgcaagaatcgtaaaacgtctggaagttgtagaagctttccgtgagtctggaaacaaaccggaatggatgatcatgacaaatgttccggttatcccgccagatcttcgtccaatggtacagcttgatggtggacgttttgcaacatctgacctgaatgatctgtacagaagaattatcaatagaaataaccgtcagaaacgtcttcttgagttaggcgctccagatattatcgtaagaaatgaaaagagaatgcttcaggaagcggtagatgccctgatcgacaacggccgtcgcggacgtccggtaacaggacctggaaaccgtgcactgaaatctctgtccgatatgctgaaaggtaaatccggacgtttccgtcagaacctgcttggtaagcgtgttgactactctggacgttccgttatcgttgtaggaccggaacttaagatttaccagtgtggtctgccgaaagagatggcaattgagctgttcaagccatttgttatgaaagagcttgttcagaacggaactgcacacaacattaaaaatgctaaaaagatggttgagagacttcagccagaggtttgggacgtccttgaggatgtcatcaaagagcatccggttatgttgaaccgtgcacctacattgcacagacttggtattcaggcatttgagccgatccttgtagaaggtaaggctatcaagcttcatccacttgtttgtacagcgtttaacgccgacttcgatggagaccagatggctgtccatcttccgctttccgtagaagcacaggctgagtgcagattcttactgctctcaccaaacaacctcctgaaaccatctgatggtggtccggtagccgttccttcacaggatatggtacttggtatttactatctgactcaggaaagaccaggtgcagcaggagaaggtaagattttcaagagtgtaaatgaagcaatccttgcttatgagaaccaggcaatcacacttcactctaagattaaagtacgtgtgacaaagacaatgccaggtggagaaaaaataacaggaattgtagagtccacacttggacgtttcattttcaacgagatcatcccacaggatcttggattcgttgatcgtgaaaaagaggagaacaaacttcttctggagattgatttccacgtaggaaagaaacagttaaagcagatccttgagaaggttatcaatacacacggagcaactgcaacagcagaagttctggatgctgtaaaagcaattggatataaatattctacaagagctgccatgaccgtatctatttccgatatgacggtacctccgcagaaaccacagatgatccagcaggcacaggatactgtagaccgcatcactaagaacttcaaacgtggtctcatcacagaggaggagcgttacaaagaagttgtagagacatggaaggcaactgacgacaaactgacagaggcactgctttctggtcttgataaatacaataacatcttcatgatggctgattccggagcccgtggatctgacaaacagatcaaacagcttgcaggtatgcgtggattgatggctgatacaactggtcatacaatcgagttgcctattacttcaaacttccgtgaaggacttgacgtactggagtatttcatgtctgcccatggagcacgtaaaggtatgtctgatacagctcttcgtacagccgattcaggatatctgacaagacgtcttgttgacgtatctcaggagctgattattcatgaagtagactgtgcaaagaaagatgcaccgattcctggaatttatgtcaaagcattcatggatggaaaagaagaaatcgaaagtcttcaggagcgtattacaggacgttacctgtgctatgacattgtagataaagatggcaatgttcttgttaagaagaaccatatggtaacaccaaaacgtgcagaactgatctgcaagaagggtgtaaatgagaacggagaaccattaacacagattaagatccgtacaatccttacatgtcgctcacacagtggcgtatgtgcaaaatgttatggagccaacatggcaacaggtgagccggtacaggttggagaggctgtcggaattattgctgctcagtcaatcggagagcctggtacacagcttacaatgagaacattccataatggtggagttgccggtggagatatcacacagggacttcctcgtgtcgaggagctttttgaggcaagaaagcctaagggacttgcaatcatcacagagattgcaggaactgcgaatttgaatgacacgaagaagaaacgtgagattatcgtaacaaatcatgagacaggtgaatcaaaagcatatctgattccttatggatcacgtattaaggtagcagacggagcagaacttgaggccggtgatgagctgactgaaggtagtatcaatccgcatgatatcttaagaattaaaggcatccgtgcagttcaggattacatgatccaggaggtacagagagtttaccgtctgcagggtgttgagattaacgataagcatatcgaggttatcgttcgccagatgcttaagaaaatccgtatcgaggagtctggagatacagagttccttccgggaacaaatgtagacagacttgagttcgaggatgtgaatgaggtactggaggcagaaggaaaagagcctgcaatcggagagccgatcatcatgggtattacgaaggcttctcttgcaaccaattccttcctgtcagccgcttctttccaggagacaacaaaggttctgacagaggcagcaatcaaaggaaagatcgatccgctggtaggtctgaaagagaacgtaatcatcggaaaacatatcccggctggtacaggtatgagaaagtatcgtgatatcagactgaatagtgagttatctatggatgacgatctgttctttgaagaaggattagatgatgatgacgatttagatattctgaatacagatttttcagatgatgatctgttagaagaaaatgaacttacaacagaagaataa

SEQ ID NO: 1538 - DNA, 2067 bp, Dorea formicigenerans
atggatgaaggcttgagcaagaagcgaggggcgcatatcagtggcagactgaagaactacatgcgttggccgatcgcgatggcgatcatgcttctcctattgaatttgtggatctattgcattgatatcaaagccggtacactcatgttgatatttatgctgatttatatagtcggcattgggattttgtatgtatacagccgatcactgatcatgaaagatctgattgaatttgcagctcagtatggtgttgtacagaatacgcttttaaaggaattgtctgttccatatgcaattcttctggaggacggacagctcttgtggatgaatgatcagtttgaacggttgtttggagatacagcgcagaaagataagtatctgagcagatatataccagagttgaaccggagcattttcccaaaagaagaaaatgacgtggtagagatggatgtttactatgaggaccgtgagtataaggcggaattaagacgtgtgtctgtggaaggattcagcgagacagagcagctcctggaattgccggcagagcgagagtattttattgcggtttaccttcaggatgtgacggaactgaaccggtatattaaggaaaatgaagagcagcggctggttgcaggcttgatctatattgataattatgatgaagtcatgaatagtgtagaggaagtcagacagtcacttttagttgcgctggtggatcgcaagatcaaccaatatattgcaaaagcagacggaatcgtaaagaaaaccgagacggacaaatattttattgctttgaagaagcaagagttcaagagactggaggatgacaaattctctcttcttgaggatgtaaaaacagtcaatatcggtaatcagattccattgacactgagtattggtctgggactcagtgcgggtaattattcccaaagttataattatgcccgtgttgccattgatctggctcttgccagaggcggcgatcaggctgttatcaaagactgccatggtattacatattatggcggcaagcgtgagatgactgcaaagaacacgcgtgtcaaagcccgtgttaaagcagaagcattgcgagagtatattacagtcaatgacaagatatttgtcatgggacatacactgacagatgtagattcttttggtgcagctatcggtatctgcagagcggcaaatgctcttgggaaaaaggcaaatgtggtgatcaatgaggtgtcagcatctcttagaccactctataatatgtatattaatagtccgtcttacccggacgatctgttcctgacatcagaacaggcattgaacctggcggatgagaattccatggtcgtagttgtggatacgaaccgcccgaagatggtagaatgtgaagaacttttgtatctggcaaagacgattgtcgtactggatcatcaccgtcagagcagtgatagtattgataatgcattattgtcttatattgaaccttatgcttcgtcagcatgtgagatggtatctgagatcctgcagtacattgtagatgatattcagattccgaatctggaggcaagcagtatgtatgccggtatcatgatcgatacgaacagttttatgaatcgtaccggagtgcgtacatttgaagcggcagcatttctcagaagatccggagcagatatcacacttgtgcgtaagatgttcagggatgacatggaaggataccgcgcaaaagctgcaattatcagcaacgcagaggtatatcagaaaaaatttgccattgcgacaggtacagatcttcaggtggagagtccgacgatcatcggagcacaggcggcaaatgaacttctggatatcagtgagattaaagcgtcctttgtattgacagaatataatggaaagatttatgtgagtgcccgttccatcgatgaggtcaatgttcaggtcattatggaaaagttaggcggcggcggtcatatgaatgcttcgggagcgcagttcaatcatacggatatggacgaggctgttgcatgtctgaagcaggttctggataatatgataaaagaaggagatatatag

SEQ ID NO: 1539 - DNA, 2307 bp, Dorea formicigenerans
atgcaaattgtaaatcagccagtcagaaaaaaagatgccatgcagcttgtgaccggtcagccagtatatatggatgatatgatcccggaagattgtctgatcgtgaaactgctcagatcccctcatgcaaatgcggtggtgcaggagattcagacagataaggcaatgaaagttcctggaattgaggccatctatacatggaaggatatcgaccagaacggacgaagatttacatgtgcaggacagacttatccagaaccaagtccatatgaccgtctgattctggatcgtcatgtcagatttgtaggagatccggttgcgattgtggcaggagagacagaaaaagcggtggacagagccatttccatgatcaaggtacagtacgaggtgttggaaccgatccttgattatcataaagctttggataatccaattctggtgcacccggaagataactgggaggcgctttgtccggtaggagcagataataaaagaaatctgtgcgcacatgaggcgagtgaacatggagatattgatcaagtactgtcagactgtgacattatcatcgaccaggtatatcatacaaaagcgtgccagcagacgatgatggaaacaatgcgtacatattgttccattgatacatatggacgtctgaatgtatttagctctacccagattgtgtttcactgcagaaggatcattgcaaatgcacttcatattccaaaatcacaggtacgtgttagcaagccgcgtatcggaggaggttttggaacaaaacagacagcggtctgtgaggtctatccggcatatgtgacctggatgacaaagaagccgagtaagattattttcacccgtgaggaatgtatgacagcttcttctccgcgacatgagatggaaatgcatgtgaaacttggagctatgaaagatggaactattcgtggaattgatctgtacaccatttctaacacaggtgcctatggggaacatggaccgacaacagtcggactgtccgggcataaatctattccgctttacggaaaagcagaggcattccgctttgtttacgacgtggtttatacgaatgttatgtcttctggagcttatcgtggatatggtgcaacacagggactttttgccattgagacagcagttaatgaactggcagaaaaactccatatggatccgatgaaacttcgtgagatgaacatagtaaaagaaggacaggtcatgcctgcattttacggtgagacaaatacaagctgtgccttggaccgttgtattgcaaaggtgaaagagatgagtcactgggatgagaattatccggttcgcgaactaggacatggaaaagtccgtgctcttggtatgggacttgccatgcagggatcttgtatcagtggattagatgtaggcagtgcagcgctgaaactgaatgatgaaggtttctacattatgcgaattgcagcagcagacatgggaacaggttgtgatacgattcttgcacagattgcagcagaagtattggagtgtccgcttgataaagtaattgtatttggagcagatacggatgcatcaccatatgattcaggatcttatgcatccagtacgacttatgtaaccggaaaggcaactgagctgtgtgcgagaaagcttagagataagatttgtcttgtcggagctaagatgcttggatgtgatgagaaagaagtagaatttgacggtgataaagtcatctatagaggcgaaaagactctggaaaaaacagaagtttccctgtttgatattgcaacagcgtctatggcgggcaacagtattgctctggaagagactgtgaccatgagccagccaacttcaccaccgccatttatggcaggcgtggcagatgtggaagtggatcttctgaccggacaggcaaaagtgatagattattatactgctgttgactgtgggactccggtgaacccaaacctggcaagagttcaggctgagggaggaatccttcagggaatcggaatggcactgacggagaatatcacttatgatgcaaagggaagactttatgaaaattctctcatgcaatataagattccgacaagagaagatatcggtcatattcatgtagagtttgagagcagctatgaaaagtctggtccatttggcgcaaaatctatcggtgaggtcgtgatcaatacaccactttcggcaattgctcatgcaatttataatgcaaccggacaccgattcagggaactcccaatcatgccggaacagattgctatgtgtgaagaaaatccgatgtggaaaaagtag

SEQ ID NO: 1540 - DNA, 2154 bp, Dorea formicigenerans
atggatattaatcagaagataacagaagaactcggtgtgaaactctggcaggtcgaggcagcggtgaagctgatcgacgagggaaacacaattccatttattgccagatatcgaaaagaagcaaccggaacgctggatgatgaacagctccgtaaattatatgaaagactcgtttacctgcgcaatctggaagaaaagaaagaacaggtattagcgtccatcgaagagcagggaaaacttactgaagaactgaaaaagcagattctggaagcacagacgcaggttgttgtagaagacctgtatcgtccgtatcggccaaagagacggactcgcgcgaccatcgcaaaagaaaaaggactggagcctttgtccacactgatcatgctgcagaagacaaaagagtctttagaggaagttgcaaagcaatatataaatgaagaaaaaggcgtggcaaatgtacaggaagcgttggaaggtgccagagatattatcgctgagaatatttccgatgaggcggattatagaagctggatccggaagcagacgatgcagaaaggacatatcatttccagtgcaaaagacgagaaggcagagtctgtttatgagaattattatgaattcgatgagccggtgaaccgtctggctggatatcgcacgctggcactgaaccgtggcgagaaagaaaaatttctgaccgtgaaaatcgaggcaccgcaggaggatattctccggtatctggaaaagaaaattatccatggtgaaaacctgagtacaacacagattctcaaagaagcaatcgaagacagctacaagcgactcattgctccggcaatcgagcgcgaaatccgaggtgaattaaccgaaaaagcagaagatcgagccatcgaagtatttggcaagaatttagaacagcttctgatgcagcctccaatcgtgggacacacagttcttggctgggatccggcattccgtaccggctgcaaactggctgtcgtagacccaaccggaaaagttgtagacactaccgtcatttaccctacagcaccgacgacaccacagaaaatccaagctgcaaaagacacgttaaaaaaactcattgcaaaatataatatcagcctcatttccgttggaaacggaacagcttcacgcgagtccgagatgatcattgtagaccttctgaaagaaattccacagaaagtacagtacatcatcgtaaatgaggcgggagcttccgtatattctgcaagtaaacttgcaaccgaagaattcccgaactttgatgttggacagagaagcgcagcgtccatcgcaagaagactgcaagacccactggcagaactagtaaaaatcgatccgaaatccatcggagtcggtcagtaccagcacgacatgaaccagaaaaagttaaatgatacattatccggagtcgtagaatcttgtgtaaaccgcgtaggcgtagacctgaacacagcttccgcaccactgctttcctacatatccggcattacctcagccatagcgaaaaatattgtggcataccgggaagaacaaggaagattcgagacaagaaagcaactcctaaaagtagcaaaattaggaccaaaagcatttgaacaatgcgccggattcttacgcattcaaaatggaaaaaacccactggacacaacaagcgtacatccagaaagctacgaggcagcagaaaaactcctgaaaaaacaaggatttaccaccgaagatatctgcgccggtaaactggcaggcttatcactcaccatcaaagactacaaaaaactcgcagaagaactggaaatcggagaaatcacactgcgcgacatcgtaaaagaactggaaaaaccgggacgcgacccacgagacgagatgccaaaaccaatcctccgcacagacgtcctggaaatgaaagatttaaaagaaggcatgatcttaaaaggaaccgtccgaaacgtaatcgactttggagcatttgtagacatcggagtccaccaggacggacttgtacacatatcccagatgacaaacaaaaaattcatcaaacatccactagaagtcgtcagcgtaggagacatcgtagacgtcaaagtcataagcgtagacttaaagaaaaaaagaatacaactcaccatgaaagatgtgtaa

SEQ ID NO: 1541 - DNA, 3234 bp, Dorea formicigenerans
atgccaagaaataaagaaattaagaaagtacttgtaattggatctggtcctatcgtcattggtcaggcagcagagtttgactatgcgggtacacaggcatgtcgttctttgaaagaagaaggactggaagttgtgctgttgaattcaaatcctgcgactattatgacggacaaggatattgctgataaagtatacatagagccattgacggtagaagttgttgaacagcttattatgaaagagaagccagacagtgtcctgccgactctgggaggacaggcagcgctgaatcttgctatggaattggaagagcgggggtttttcaaagaacataatgtccgcttgatcggaacaacagctcagacaattaagaaggcagaggatcgtctggaatttaaatcaacaatggaaaaaattggcgaaccatgtgcagcatcacttgtagttgaaagcgtagaggacggaatcgaatttgcagaaaagattggatatccggtcgttcttcgtccggcatacactcttggcggaagcggtggtggaattgcacatgacagacgtcagcttgtagagattcttgaaaatggacttcgtctttcccgtgtgggtcaggtacttgttgaacgttgtatcgcaggatggaaagagattgaatatgaggtaatgcgtgatgcagcaggaaattgtatcacggtttgtaatatggaaaatattgatccggttggtgtacataccggagacagtattgttgtagcaccgtctcagacgctgggcgataaagaatatcagatgctccgtacatcagccctcaatatcattagtgagcttaatattacaggaggctgcaacgtacagtatgccctgaatccggaatcatttgaatattgtgttattgaagtaaatccacgtgtcagccgttcttctgcgcttgcatcgaaagctacgggttatccaatcgcaaaggtagcagcaaagattgcgcttggatatacacttgacgagattaaaaatgcagttacaaagaagacatatgcaagttttgaaccgatgcttgattattgtgttgttaagattccgagacttccatttgataaatttatcagtgcaaaacgtacactgactacacagatgaaggcgaccggagaggtcatgagtatttgtgataattttgagggagcgcttatgaaagcaatccgatctctggaacagcatgtggacagtcttatgtcctatgatttcagtcatctttccagagaagaactgatgaacgcattggacgtagtagacgatcagagaatctggaagattgcagaggcagttagaagaggaattccttatacagaaatacataagattacaaagattgatatttggtttatcgataagattgcaaacctggtagagatggagcagtctctgcgtgcatgcgcgccaagagtagcgtctggacgtggcggaattggaaaggaattattaaaagaagcaaaacgcctggagttcccggacgaggttatcgcaagactgacaggtcttacagaaagacaggtgcatgatcttagaatggtatacggtattaccgcatcttacaaaatggtagatacctgtgccgctgagttcgcggcagaaacaccgtattattactctgtatttggaagtgaaaatgaagtagaagagacttccggtaagaaaaaggttcttgtccttggttctggtccaatccgtatcggacagggaatcgagttcgatttctgttccgtacactgtacatgggcatttgcaaaagagggatacgagacaattatcatcaataataacccggagacagtcagcacggacttcgatattgccgataagctttattttgagccgctgacaccggaagatgtagagagcattgtagacctggagaggccggacggagcagttgttcagttcggtggtcagacagcaattaaattgacagaagcattgatgaaaatgggagtgccaattcttggtacaaaagcagaagatgtagatgcagccgaagatcgcgaattatttgatgaaattctggaaaaatgccagattccaagaccgactggtggaactgtatttacagctgaggaggcaaagactgttgcgaacagactcggctatccggtactggtaagaccgtcctatgtgcttggcggacaaggtatgcagattgctattaacgataatgatatcgaggaatttatcggaatcatcaatcagattgcgcaggatcacccgattctggtagacaaatatttacagggaaaagagattgaggtcgatgccgtatgtgacggagaagatatcctgattccaggtatcatggagcatattgagcgtgcgggtatccattccggagatagtatctctgtatatcctgcaaagagtatttctgataagacaaaacgtactattgaagaatatacaagacgacttgcaaaatccctgcatgtcatcggactgattaatattcagttcattgtgtgtggtgaagaggtttatgttatcgaggtaaacccaagatccagccgtacggtaccatacattagtaaagtaactggaattccaattgttccactggcaacaaaagtgattatcggtcacaagatcaaagaacttggatatacaccgggacttcagccggaggcagattactatgcagttaaaatgccggtattctctttcgagaagatccgtgatgcagatatcagccttggaccagaaatgaagtctacaggagagtgccttggaattgccaagacatttgacgaggcgctatataaagcattcttaggtgcaggaatcaaacttccgaaatttagcaatatgattatgactgtccgtgatgaggataaggatgaggctgtagaaatcggtaaacgttttgaaaagatcggatacaagatttttgcgacaaaaggaacagcagaagcacttacagaagcaggtgtgaaagcaattgcagtcaacaagattgaacagagcacaccgaacctcatggatctgatccttggacataagatagatcttgttattgatactccgccacagggagcagaacactccaaagacggtttcgtaattcgaagaagtgcaattgagacgggtgtcaatgtcctgacagctatcgatacagcaaaagcactgatcaccagtctggagaatacagatattcagaaactgacactggtggacattgcaaagattcaggcagtatag

SEQ ID NO: 1542 - DNA, 3531 bp, Dorea formicigenerans
atgtgccgaggcacattctttattacatgcgaagataaggaaaataagggagaaaaatatatgagctttgcacatttacatgttcatacagagtacagtctgctggacggctccaataaaattaaagagtgtgtggcgcgggtcaaagagcttggaatgaacagcgtggcaattactgatcatggctgtatgttcggcgtaatcgacttttaccgtgctgcccgtgctcagggaatcaagccgatccttggctgtgaagtctatgtggcaccaggatccaggtttgacaaagaggctgtaggaagcggagatgacagatattatcatctggttcttctggcagaaaatgatgaaggataccacaatttgatgaaaattgtatcccgtggttacacagaaggatattattataaaccacgtgtggatctggagcttttgagggaatttcacgaaggaatcattgcgcttagcgcgtgcctggcaggtgaggttcagaaaaatatcacaagaggcatgtacagtgaaggaagagcagcagctcttaggtatgaggaaatatttggaaaagggaattttttcctggagctgcaggatcatggaattccggagcagcagacggtcaatcaggcattgatgcgcatgtcacaggagacgggaattgaactggtagcaacgaacgatatacattatacttatgcagaagatgcgcgggcacacgatattctgctctgtatccagacaggtaagaagctggcagacgaggatcgtatgcgctatgagggcggacagtattatatcaagtcagaagaggaaatgaagaagctgttcccatatgcattgcaggctcttgagaacacacagaagattgcagaccgttgtgacgtggaaatcgaatttggtgtgaccaaacttccaaaatacgatgttccggatggactttcctcctgggaatatttgaacaaattgtgttacgaagggctggaaagacgttacccgaatccttcacaggatttgaaagacagactggactatgaactgtcagttattcacaagatgggctatgtcgattatttcctgattgtgtgggattttattcactatgcaaggtcacagaagattatggtcggaccgggacgtggttccggtgccggaagtattgtggcgtattgtctggagattacaagtattgatccgattaaataccagcttctgttcgaacgtttcctgaatccggagcgtgtgtccatgcccgatattgacgtggatttctgttacgagaggcgtcaggaagtgatcgactatgtaggaagaaagtacggcgcagaccgagtcgttcagatcgtcacatttggtacattggctgccagaggtgtgattcgggatgtaggacgtgtgatggatctgccgtatgcatttgtagataatatagcgaagcttattccgaaggagctgaatattactttggataaggcactcaagaccagctcagaacttcgcaagtcctatgaggaagacccacaggtaaaagaactgattgacatgtccatgcgtctggaaggacttccaagacatacttccatgcatgcagccggagttgttatcagccagaagccggtagaagaatatgtgccgctgtcacttggatcagatggatctgtaacgactcagttcgtagcgaccacgctggaagagctgggacttttgaaaatggactttctggggcttcgcaccttgacggtgatccgggatgcagagaagcttgcaagctacagttccggaaaagagatcaacattaacaagattaattttgacgataaagcagtactggattctattggaacgggaaagacagacggtgtgttccagttagagagtgcaggaatgaagaactttatgaaagagctgaaaccgcagagcctggaagatattatcgccggaatttccctgtatcgtccggggccgatggattttatccctcagtatattaaaggaaaagaacatccggagctgatcacctatgactgcccacagctagagccgatcctgtcgccaacttatggctgtatcgtctatcaggagcaggttatgcagattgtgcgtgatctggcaggatatacccttggacgaagcgaccttgtgcgccgcgctatgtccaagaagaaagccgatgtcatggcaaaggaacgccagaattttgtgtacggaaatccggaggaaggtgtaccaggctgtattgcaaatggtattgacgagaagactgccaataagatttatgatgaaatgacagattttgccaagtatgcgtttaacaaatcccatgcggcagcatatgcggtcgtttcttaccagacagcatggctcaaatattattatccagtagagtatatggcagctcttatgacctcagtcattgataatccaggaaaggtagccgagtacatttacagttgccgccagatggggatcaagattctgccgccggacattaaccatggttacagcagcttttctgtagataatggaagtatccggtacggactggcagcgatcaagagcatcggcagaccagtcatcaaagaaattgttgcagagcggaaagcaaacggagagtttaagaatctgaaagatttcattgagcggatgtcaggaaaagatatcaataagagaacgattgagaactttatcaaatccggtgcatttgacgaacttggaggaacaagaaagcaattcatggtcatctatgtacagattctcgaccaggtgaaccgggagaagaaaaattccatgacaggtcagatgtctctttttgacattgtaggagaagaacagaaatccgagttcgatattccgctgccaaatgtaggtgaatacgagaagtctacgaaacttgctttcgaaaaagaagtgcttggaatctacttaagcggacatccgatggaagagtacgaggagcagtggagaaaaggcatttccaaaacgacacaggatttccagtttgatgaggaattgggattttcaagagtcagtgatggcgcagcagaaatcattggtggaatcattgcgagcaagacaatcaaatacacgaagaataataagactatgtgtttcctgacgatcgaagatattatgggatcagtagaagtcgttgtattcccaagagattatgagcgctatcatcaatatctggaagaggaaaatgttgtctttgttaagggacgggtgtcagaagaggatgaagcctccagcaaactaatctgtgagaaagtcattccatttggacagaagaaacaggaactctggatccagtatccggataaagaaacatttcttcagggagagaagatgctatatgatatgcttgcatcttccgatggaaatgatgaagttatagtatattgtaaggcagagcgggcggtaaaacgccttccatctaaccgaaatgtgaatatagaacctggattactaagcaggcttatgaattattttggtgaatcttgcgtaaaagtggtggaaaaaccattgaaaagctaa

SEQ ID NO: 1543 - DNA, 2094 bp, Dorea formicigenerans
atgattaaatttaaaatatcagaaacaggagtgattagaatggaagcaaaaaaaggtagtctttcaatcagcagcgaaaacattttcccaattattaaaaaatgggtatattctgaccatgacatttttgtcagagagatgatttccaatggctgtgatgccattacaaaattgaaaaaactggatgtaatgggtgaataccagttaccagatgattataaggcatcaattcatgtagaagtgaatccggaagagaagactttgaagttcattgataatggtcttggtatgacagcagaggaagttgaagaatatattactcagattgcattttcaggagctacagagttccttgaaaaatataaagacaagacaacagaagacgatatgatcggtcatttcggactgggattctattctgcattcatggttgcagatgaagttcatattgacacattatcttacaaagacggagcaacaccggtacgctgggtaagtaatggtggaacggaatacgagatgacagaaggagacaagcagactgtaggatctgagattacattgtatctgaacgatgattgtctggagtttgcgaacgagtatcgtgtaagagaagttatccagaagtattgttcctttatgccggtagagattttcttatcaaaggcaaatgcagagccagagtatgagacaattgacgaggcagacctgaaagaggacgatgaggttgttgagcacattcatgaagatgccaagaccgaagaaaaagagaatgaaaatggtgaaaaagaagttgtagaagtatcacctgcaaaagataaagtaaagattaaaaagcgtccggaatccttaagtgatattcatccgctctggacaaaacatccgaatgagtgcagtgatgaggactacaaagagttttaccgcaaagtatttctggattataaagagccgttgttctggatccatctgaacatggattatccgttcaacttaaaaggtatcctgtacttcccgagaattaatacagaatatgattctattgaaggaacgatcaagctgtataataaccaggtatttattgcagataatattaaggaagtcattccggaattcctgatggtattaaagggagttattgattgtccggatcttccactgaatgtatcacgtagcgctcttcagaatgatggatttgtaggcaagattgctgagtacatttccaagaaagttgcagacaagcttgcaggtatgtgcaagacaaaacgtgaagattatgagaaatactgggacagcatcagtccatttataaaatttggttgtctgaaagatgagaagttctgtgacaagatgaaagatgcagttctctttaaggatatcgacggaaaatatctgacactgaaagactgcgtagaagcaaatggtggagagctgaaagaactcgataaaaatgcggcaccagacaatgccgaggaaaatgcagaagagaagaagacaactatctattatgtaacagatgagattcagcagagtcagtatatcaatatgttccgtgcacagggacaggatgcagttgtactgaaacacaacattgattctccgttcattacacagcttgagcagcgctatcagaatgttcagttccagagaattgatgcagatgttacagataatgcaaaagaggaagttgctgaagacgaaaaggaagcattccagaagactgtagacagtctgactgcaacattccgcaaagagcttggtaatgacaagctggatgtgaaagttgagaaactgaaagacagcaatgtagcttctattatgacattatcagagcagagccgccgtatgcaggagatgatgaagatgtatggaatggattccatgggaatggatatgggtggagagaataccctgatcctgaacgcaaatcatccactggtacagtatgtacagaaacatgaagatggagaaaatacatctttgatctgcaagcagttgtatgatctggctatgctggcacataagccattaaatccagaagagatgacagcatttgttcagagaagcaatgatattatgatgcttctgacaaaatag

SEQ ID NO: 1544 - DNA, 1914 bp, Dorea formicigenerans
atgaagaatattatcattggtacagccggacatatcgatcatggaaagacaactttgatcaaagctcttacagggagaaatacagaccgctgggaagaagaacagaagagaggaatcaccatagatcttggatttacatattttgatcttccaagtggagaccgtgcgggaattatcgatgttcctggacatgagagatttatcaacaatatggtggccggagttgtaggaatggatctggtgcttcttgttattgcggcggatgaaggaattatgccgcagacaagggaacatatggatatcttacatcttctgggaattgaaaagagtattattgtcctgaataaatgcgatatcgtagatgaagaatggctggaactggtggaagaggaagtgcgtgaagaattaaaaggcacatttctggaaaaagcaccggtatgtaaggtgtctgctgcaaccggtcagggactggaagaactgattcaggtgatcgagcatatgacaagtgatgaagttgtagctaaagatgtgaatacaattccgagacttccgattgaccgcgcatttacattgtctgggtttggcacgatcattaccggaacccttgtgtctggtacgattcgtaaagaagatactctggaaatgtatccgattggcaaagagtgcaagattcgcagcattcaggtgcatggtcaggataaaaaagagtgttatgcgggacaacgtgtggcaattaatctgtctaatgttaagaaaaaagaaattcagcgaggttgtgtactggcaccgccggcaagtatgaaaaatacagacctgctggatgtgaagatgaatatactggactcctctgtgcgggtattgacgaatcatacgagattacatctgtttacaggaacgagtgaaattttatgccgtgcagtccttcttgataaagaggaaatcggaccaggtgagagcggatatgttcaacttcgcctagaagatgaaattgcagtacgcagaggcgataagtttgtagtccgtttttattctccgatggagacgattgggggaggcgtgattcttgagccaaatccgggtgtgaagagacgttttcaacaagatgtgattgaagaacttaagagaaaagaatccggttcttcagcggatgtaattgaacttcatataaaggaacatggagacacaatgatcacttctgcagaacttgcaaagctgacggcattgtccatggatgaggtaaaccaggatatagaagaattaaaagagaatggccagatttatgtattcccgatgaaaaaagatacatttacatggcatgcggattcaaaacgtggagcagtacaggcgattgtgaagagtctggaatcctatgaaaaagagaacccgtatcgttatggaatgaagaaagcggaagtgcagatgacacattttaagggaatgaaaccgaatgtgtttgataaagtcattgagctgttggaaactgagggatatgtgaaacgtgtcggagaatttttgtgcacacctcagtttgaaataaagaaagatgagacgtataacaagatagcaaagaccgtgcttggtacatttgaaagtgcgaaatatgactttgcaaaatattcagagattgactttggaaagactccaagagcaatggctgatgatatcctgaatgtattgctggtcgagggtaaagtagtaaaaatcgcagaagatatgtatacactgacggaatatatggaagaagcaaagaatatcattcgggagaaattagcggaagatccggttattactattgctcaggtacgagatatatttgcgaccagccgaaagagtgcgaaaccaattttggaatatatggacagtatcaaagttaccaagaaagttggagcggaaagtgaaagggtagcatactaa

SEQ ID NO: 1545 - DNA, 1152 bp, Dorea formicigenerans
atggcaaatgtagaaaagatgatcgcagaaacattcctggagatggcacagggtcttgagagcggaagctatggaaagagaccaaagatcgcattaaccggaatgggaagcgaacatggagaagagaatgccatgaaagcagccctgatggcagcaaaagatggcgttgatgtatattatatcggatcacttgaggcagagggagttacaacagtaaaagttgcagatgacgaagaaggccacaagaagatggaagagatgcttgcaaatggagaagtagacggagcagttaccatgcactttccattcccaatcggagtatctacagtaggacgagtagtgacaccggcaaagggaaaagagatgtttgtagcaaatacaacaggaacatccagtgcagatcgtatcgaaggtatgatcaagaacacaatctacggaatcattgcagcaaaaacatgtggaattgctaatccaacagtcggaatcctgaatgtagacggagcacgtcagacagagaaagctctcaaagagcttcaggagaacggatatgatatcacattcgcagagtctgcaagagcagacggtggatgcgtcatgagaggaaatgacgtacttcagggaacaccggatatcatggtaacagattccctgacaggaaacatcatggtaaaaatgctttcatccgcagcaacaggtggaagctttgaagcaactggatacggatatggaccaggaattggcgaaggatatgagcagttagtcatgatcgtatcaagagccagcggagcacctgttattgcaggagcgatccgttatgcggcacagcttgtaagaaataaagtatttgaggtagcaaaagcagaatttgcagcagcaaaaaaagcaggcttaaaaaagatcctggatgcaagaaaagcagcagcaaaaccggctgcagcagaggaggatgtaaaagagccgccgaaggagatcgtaacagcacagatcgcaggaatcgaagtaatggatcttgaggatgccgtaaaagcattatggaagatcaatatctatgcagagagcggaatgggttgtacaggaccgatcattcgtgtatcagatgcaaaccttgagaaagctcatgaagagcttaagaaagccggatacattaactaa

SEQ ID NO: 1546 - DNA, 1956 bp, Dorea formicigenerans
atgcagagaacgaaaaagataaccgcatttatacttgcgattgctctttgcgtggggatgctgccgacacttggggtgaatgcaaaagccgcggacacgggtaaacatatggacgtattatttacacatgatacgcattcacatctgaacagtttttctacgatcgttgatggaaaacaagaagaggtcggaggatttgcaaggctcaagactttaattgacgagcagaaagaaaaaaatccggatacgctctatctggatggtggagatttttctatgggaacgttgatccagacggtgtatgagacagaggcggcagagcttcgtatgctaggctatcttggatgtgatgtgacgacctggggaaatcatgagtttgactatcgttccagtggacttgctaatatgctgaatactgcaaaggcttccggtgaaaatgttccgtcactggtcgtttgtaatgtggactggagcgctatggagaaagcgggcttaacggaaggacagcagcagattaaagatgcatttgagaactacggtgtgaaagattatgtagttgtacagaaaggtgatgtcaaaatagcagtttttggtgtatttggtaaagattcgctagattgcgcgccaacatgcgaactgctttttgaagatccaatcgaggcttctaagaagacggtggaagagattaagaaaaatgaggacgtggatatgattgcctgcgtatctcatagtggtaccgtggaagatgaagataaatctgaagacgagattcttgcgaaaaatgtgccggatatagatttgattatcagcggacacacacatacacaattagataagccgattcagcacggagatacttatattgtttcctgtggagaatatggaagaaatcttggaacgatttctatgacgcagaaagatgatggacgctgggacgtggatacttacgagttgattccggttacggatgagataaaggcggatgctgcaacacaggagcggattgataagctgatggagacggttgatacgaattatctgtcacattttggatatacaaaagatcagattcttgcggaaaatgatattgaattcagcagtgtggatgatatgtataatgagcatgaggagctgaatctcggagacatcatgtctgatgcatatgtgtatgcggtggaaaattccgagtactacgacggtgatccggtcgatgtggcggttgttccgagcggaacagtacgtgatacttatacaaaagggaatgtcacggtcgaacaggtctacaattcattttcacttggaattgggaaggatgggctggcgggttatccgctgatcagtgcttatctgacaggaaaagaattgaaacttgtggcggaaattgatgcgtctgtttcagattttatgacgattgccagactttattgtagtggtcttaactttacatacaatccgcatcgcatgatactcaataaagtgacagattgctatctgatgaaagctcagggggaaggaaacagagaagagatagaagatgacaagctgtatcatgtggtgacagacctatatacagggcagatgctcggtgctgtcatggacacatcttatggactgctgtctattacgccgaaggacaaagatggaaatccaatcgaaaacctggaagatcaggcaattatggaaggcaatcaggagctgaaagcatgggctgccattgccagatatatggagtcctttgatgatacagatggtgatggtattgcaaatgtgtcggaatattataatgaaaaacacgaccgcaaagttgtggaagacagctggaatattattggtcttgtaaaacacccgaataaattttcggctatcatagcgggcatttttgtacttgtaattgtgctgattattttgctcatattgctggttaaaaaaattgtgcggaagataaaaaataattaa

SEQ ID NO: 1547 - DNA, 2436 bp, Dorea formicigenerans
atgaattatacagaaccagcaaaagaagtgctgaaaaaagcggaaaagattgccagagaactggatcatccatatgtaggaacagaacatctgctgcttgcatttatgcgggtatgtacaggtgtggcgggacagatattgtcagcgaatggtgtagaagaagcaaatttatataagattgtagatgaactgatctcaccggtcggagaagtgacttttcaggaaaagccaaagagaagtccgagacttgaatatactctggaggaaagcaaggaagaggcaattcgttttcaatcagaggcaattggaacagagcatatgctccttgcaatccttcgggaaccggacagtgttgcaaccagaatacttctgacactcaatgtaaatatacagaaaatcatgcaggatacgctggaagttctcggcgtggatatcaaggaatatcaagaggagcttcaagaggcatatcaaagaaaagatggaattttagaccagtatggtacagatctgactatgcaggcagaagaaggaaagcttgatccggtcattggaagaaaagcagagattcaccgtctgatgcaggtacttggcagaagaacgaagaacaatccgtgcctggtgggagagccgggagtcggtaagacagcagtggtagaaggacttgccgcacagatcgcaagtggcattgtaccggaaggaatgcgtgacaagcgggtctatacgttagatcttgcaagtatgattgcaggtacaaaataccgtggtgaatttgaagaacgtatgaagagacttttacaggaagtaaagtcggcgggaaatgttattttattcctggatgaagtgcatacaatcatcggcgcaggcggtgcggaaggcgcaatggacgcatctaatattctgaaaccgtctcttgcaagaggagaacttcaattgatcggagcaacaacgattgcggaatatcggaaatacattgaaaaagatgcggcactggaacgaagattccagccaattacagtggaagaaccagatgagaagcagtgtgaagaaatattaaaaggactgcgggaacgttatgagacgcatcatcatgtacagattacagatgaagctcttcaggcggcagttacactttctgcacgttacatcagtgaccgttttcttccggataaggcaattgatgtgattgatgaagcatgtgcgaaagtgagtcttagtggattcaagacaccggagcatatctatgaactggaaaaggttcttggtaattacgaagcaaagatggaagaggcaattcttgcaggtgatcttgtggaggcttccacgatccgggcagagaaagaagatgctcagaaaaagattatgcagacgaagaagcgttttcagaaaaagcaggcgggcagaaaaccacttgtaacagacgaagaagtggcagcggtcgtatctgactggacgaagattccggtgcagaagcttcaggaatctgaaggtgtgcgcttgcaaaagttagagcagacgcttcacaagagagtggttggacaggaagaagctgttacggctgtggcgaaagctgtacgaagggggcgtgtggggctaaaagatccaaagcgcccgattggctcatttttattccttggaccgaccggagttggtaagacggaattgtcaaaggcattatcagaagcattattccatgatgagaatgccatgatccgtgttgatatgtccgaatatatggaacagcacagtgtggcaaagatgatcggttcgcctccgggatatgttggccacgaggaaggtggacagttaagcgaacaggtgcgaagacatccgtattcagtaatcctttttgatgagattgaaaaagcacatccggatgtatttaacattttactgcaggtattagatgatggacatattacagattctcagggtagaaaagttgattttcggaatacggtcattattatgacgtcgaatgcaggtgcacaggcgatcattgatcccaaaaggctaggatttggcaataaggagaatcaagaggaagattacaagcgtatgaagatgaatgttatgaatgagatcaagcttgtcttccgtccggaatttctgaatcgaattgacgagattcttgtattccatccgctaggtgaaccggaacttaaaaagattacgggaatgatgtgccaggaggtggtcaagcgtgcaaaagaacagctggatattcatttgacggtgcgtgattctgtgaaaaagctgattatggaaaaaggaaccgataagaaatatggagcaagaccgttaagacgtgcagtacaaagtgaactggaagacagtctggccgaggcaattctcgcaggtgagattaagcgtggtcaggaagtcgttgccggcgtatcgaaaaaagaaataaaatttgaggtcaagactaccaaataa

SEQ ID NO: 1548 - DNA, 1923 bp, Dorea formicigenerans
atgaaatattcagcaaattctgtatgggaaaataaagacgaatatgatattgcagtaattggagcaggacatgcaggctgtgaagcagctctggcggctgcaagaatgggatttaagacagtagtatttaccgtcagcgtggagagtattgccatgatgccttgtaatccgaatattggaggaagttcaaaaggacatcttgtcaaagaagttgacgctcttggcggtgagatgggcaaggtcattgataagacatttattcagtcaaagatgttgaatcaatcaaaaggaccggcagtacattcactgcgtgcccaggcagataaggaacagtacagcagaacaatgaggagagtgctggaaaaccaggaaaatctggatgtcagacagacggaagtggtaaatatcctgactgaagaagtctgtgaaagtgggaagaaaaaagtaattggtgttcagatactctctgggggtatatatcgagtaaaagcagtcgtattgtgtaccggaacatatctccgtgcgagatgtgtatatggtgaggttagtaatgcaaccggtccgaatggtttgcaggctgcaaatcatctgacagaatgtctgaagaatcttggaattaacatgtaccgttttaagacgggaactccggcaagaatcgataaaagatctatagatttcagtaaaatggaagcgcagtatggtgatgaaagaatcacaccattttcatttaccactaatccggatgatattcagattgaccaggtgccatgctggttaacctacactaacgaaaaaacacatgagattatccgtaataatctggatcgttctccattatattccggaatgatagaaggaacaggaccgagatattgtccatctattgaggataaagtagtaagatttgcggacaagaacagacatcaggtatttatagagcctgaaggaattgatacaaatgaaatgtacatcggaggtatgtccagttctttaccggaggatgtccagtatgatatgtatagatctgttgcaggtctggaacatgccaagattgtaagaaatgcatatgcaattgagtacgattgtatagatgcaagacagttaaagccatcactggaattcagagagattgaagggttatttagtggaggacagttcaatggaagttccggttatgaagaagctgcatgccagggattgattgcaggtatcaatgcagcaagaaagcttcagaaaaaagaagcagttgtactggatcgatctcaggcatatattggcgttttgattgatgatctggtgacaaaagaaagtcatgaaccatatcgtatgatgacatccagagcggaataccggttacttctaagacaagataatgcagatcaaagactgacggagataggatacgaaatcggattaatttcacaggatagatatgaacgtttaaaattaaaagaaaaactgattgaagaagaagtatcacgtgtagagcatgtgcatgtaggaacaagtgaaaaggttcagaatttacttgcgcagtaccaaagcacgccgctaaattcaggaatttcactggcagaacttatcagaagaccggaattaacttatcaggtacttgctacaatcgatgaggcaagaccggaatttccaaaagatttgtcagaagaagtctctgagcaggtaaatatatcaattaaatatgatggatatattaaacgccagaaaaaacaggtagaacagttcaaaaaacttgaaaataagaaaataccagaaaatatagattatgatcaggtgaagagtcttagaatcgaagcagttcaaaaattaaaagaattccgtccggtttctattggacaagcttctagaatttccggagtatcacctgcagatatatctgtattacttgtatatctaggcggcaggtaa

SEQ ID NO: 1549 - DNA, 1938 bp, Dorea formicigenerans
gtgattgtaaaaatgagattcttaaatatcagcggtccgagagatgacatcgaccgggtatgcgagaaatatctgtcaaaatatgagatgcagattgaaaatgcggtgacagaacttaagacgacggaaaatatcatgccgttcgtggaagtgaatccgtacagagatccgcttgcaaaggcagagcagttcgcacagcttctgccggaggacggggaaattcgggcagatctgtcaggatcaaaggatgatatgctggcgctgatccgggatctgaatcatgattatctgggacttgtggaagacagagaaaggctgaagctcaagaaggaagaattgcttggaaaggaaaatgtcctgaaaccattttctgcgttgaaagtggatgttcataaagcattgcagtatcagtacatgcaggtacggttcggacgcatttcgcttgactattacagacgtcttgaaaaatatctggccgacagtctgaatgccatatttctggaggctggaaaagacaaaggttttgtctatggctgttacatagcggcaaatgcggatattgcgaaagcagataacacattccgggcactgcactttgagagaattgacgtgacagatgcttacatcggaactcctaaagaagcgtgtgagaagctggatcaggatattgaagcagtgcaaaaagatattgacgcagatgaggataagattacagcacttatgaaacgtaatgcagccaagcttctgggagcgagaaagagactgcaggagcttgcggacaactttgatatccgtaaacttgcagcgagagtgaccagtgaggatgagagggatgagttctatatcttatgtggctggatgagtgaaaaggatgtagatgcgcttcttgctgagacccaggatgacgataagatcagtatcatggtcgaagatgagcgtgaccagtattttggtgatcccccgacaaagcttgagaacccgaaggtatttaaaccatttgaaatgtttatcaagatgtacggacttccggctcacgatgagatggacccgaccatgttcgtggcactgacctatacatttatattcggagccatgttcggagatcttggccagggcttctgcctctttgcaattggcggaatcctgtatctgacaaagaagatcaatctggcaggaattatttccattgcaggtattttttccatgttcttcggatttatgttcggaagcgtatttggatttgaagatattattgaagcccgctggttaaggcctgtatcggcaatgacgaatctgccgtttatcgggcagcttaacaccgtattcgtcgttgccattgcatttggtatggcactgaatattctggtgatgatcttcaatattatcaattcggcgaaagcccacgataaggaaaatatgttattctccaccaatggtgtggcaggacttgtattttatggattcctggtactgacagtagtactttatatgaccggacacaagactccgggaaatgtaatgcttgtgattttccttggaattccggtgctcctctttgtatttaaagagccacttggaaatctggtagagaaacgtcataagaaaatggaaggcggcaaggtcatgttctttgtacaggcattttttgaattgttcgagaccatgttaagctacttctccaataccatttcttatgtgcgtatcggagcatttgcagtgagccatgcggcaatgatggaagttgtactgatgctctccggagcgagtgcgggaagcacgaactggatcatatttgtcatcggtaatatcatagtctgtggactggaaggattggtagttggtatccaggttctgcgtctggaatattacgagatgttcagccgtttttataaaggaacaggaagagaattcaaaccatttcataaacagagcgagtag

SEQ ID NO: 1550 - DNA, 2232 bp, Dorea formicigenerans
atgagaaaattatttcagtttttaaagccatatgcaccacgggtacttctgatattatgtgtccttgtcgtgcaggcttactgtgatctgtctctgccgacctatacttcgaatattgtaaatgtaggaattcagcagagcggtatcgatgaggaaattccggagaatatttctgaagaagaaatgaaccggctgctattgtttgtgtcggaggacgacaggcaggatattcaggatgcatatgaaaaaagtagtgaaagctttgattacgatggagaagtgctgacactgaaagattcagtgaaatcagataatgaaaagctcgatgcacttacagaagagatgaaacttccgatgatgctgactgccggatttgagaatggcagtgatacaacaaagcagatggaagggcagttaaaagagcagatgagccaggtgccgggaatcgagaagatgtctgtgtttgacatatttggcatgatggatgatacgcagagagcagcaattgttgataagattacggagcagatggataagatgccggattcgattctggatcaggcagcaacttcttatgtgaaatccacgtatgaacagattggtctggataccggacatatgagtacggtgtatattttaaaaacaggtgcaaagatgctgggacttgcagcacttggcatggcagcaagtattcttgcctgtcttatggcatcaagagttggagctaaggtcggacgtggactcagacgtgataccttccgcaaagtcattggattttctaacgcagagtttgacaaattctcgaccgcatcattaattacaagaagtaccaatgatattcagcagattcagtttctgacagtcatgattcttcgtattgtgctgtatgcgccggttatggcaatcggaggaattttgaaagtatctaagacaaatgtggatatgttctggatcataggcctggcagtgctgcttattgtcatggttgtggcagtgcttttcattgtagttatgccgaaattcaaaatcgtacagaacatggtagataaattgaatctggtcagccgagagattctgaccggacttccggttatccgtgcgttccatacagagaaacatgaggaagaacgttttgacaaggcaaataaagacctgacaaaattgaacttatttgtcaaccgtgccatgacatttatgatgccgactatgatgcttgtgatgaatggtattaccgttctgattgtgtgggtcggtggacacagtattaatgacggagcaatgcaggtcggagatatgatggcatttatccagtatgcaatgcaaattattatgtcattccttatgatctgtatgatttcggttatgcttccaagagcagcagtttctgcagagcgtgtggatgaagtcttgaagagcgagacaaaaatccatgatccaaaggagccaaagacacttcctaaaaacggcaaaggcgaagttgcatttgaacatgtatccttccactatccgggagcagaagaagatgtactgcatgacattacatttaccgcaaaaccgggagaaacgacagcatttatcggaagtaccggatgtggtaaatctacactggtcaacctgattccgcgattctatgatgtgacagaaggaaagattacgattgacggacaggatgtaagagatctgacacagcatgaacttcgtgataaactgggatatgttccgcagaaaggagtgctgttctcaggaaatattgcttctaatattatgttcggtaatccggttggaagtgagcaggaaatgacagaggcggctcagattgcacaggctgtcgaatttatcgacacgaagccggaacgctacaagagcccgatctcacagggaggtgccaatgtttccggtggacaaaagcagagactttccatcgcgagagccatagcaaaacacccggatgtatacatttttgatgacagcttttctgcactggattacaagacagatacagttctaagaagcgcattaaaagaaaagacaacagacagtgtcgttctgatcgtggcccaaagaatcagtacaattcttcatgcagagcagatcattgttttggatgacggtaagatcgttggaaaaggaacgcatgaagagcttctgaaaacttgtgatgcctactatcagattgcagcgtcccagttgtcggagagtgaattaaaagaagcaatgaaggaggaagactaa

SEQ ID NO: 1551 - DNA, 549 bp, unclassified Azospirillum
atgaaaaaattactgatcttaaccgccacagttgttctttcggcctgtgcctgctttaattcttctgatgcggaagaagccgcgacagaaacaacaaccgttacgcagacaacgacccagactcagccggcccgccaagttatcgttgctgaacagccggtagaaaatgttcgcgttgtccgccgccgtgttcgtgtctatgatgacggctatgccgcaccgcgtcgcgtccgccgcatttactaccgcgattcggctccggttgccgcttatcgcgaagaagctccggtttatcgcacccgtcagattcaggaaaatgtctgtgacgaatataatgaatacaacgattctccgtgtccggccaaagtccgcgttacccgcgaaccggttgaaatcgtttatcgcaaaaccaaatacaccaccgtatatcagccgaaaacttttaaggatgtcagctatgtcagcgaaccttattctgccggttatgataatacggtaacggtttcgacatcttctgaagttgaagaagaggatgattatatcaaataa

SEQ ID NO: 1552 - DNA, 459 bp, unclassified Azospirillum
gaaaaacaaggcaggcaagaaatgaagaaaaaggtttttgtatcaggatgttttgacgttttgcacagcgggcatattgcttttctgcaggaggcggcgcagtatggcgatttgtatgtggcgctggggtcggacaaaacggttctggagctgaagcaccgtgcaacattatataccgaaaatgagcgcaaatatatgttggacgctttggcctgcgttcataaagtttatatcagtccgggttcggggtatatggattttgtagaagtgttggattgggtcaagccggacattttctttgtcaacgaagacggcgacaagcccgagaagcggaaattgtgcgcagaacgcggaattgaatataaagttggaaagcgcgttccgtttgccgatttgcctattcgttcgacaacggcaatccgcgatgaaatgaagcaggcgcttttaaacgaaaaatag

SEQ ID NO: 1553 - DNA, 723 bp, unclassified Azospirillum
atggtcagagagattgtatttgatacggaaacaaccggatttgatcctgaaaacggcgacaagctggttgaaatcggagctgtggagctgattaaccatattccgaccggggtgacgtttcatcgttatatcaacccgcagcgcgacgtgccggaagatgcttttaaggttcacggcttgagctatgattatttgaagcagtttccgacttttgataagattgtcgatgagtggctggattttgtcggtgacggcgtgttggttgcgcataacgcctcttttgatatcaagtttgtcaaccatgagcaaaagcttctcggcaaaacccagtttacctgggacagagtggttgatacccttgaaattgccaagctgctgtttccgggatcgcgcgttaacctcgacgctttgtgcaaacgttttaacgttgacaataccgatcgtacgttacatggcgctttgcttgacgcccagttgttggcgcaggtttatttggagcttttgggcggacgggagccgagttttctgctggataaaaagaattcggctgtggcggcacggtcaaacgggaataccggtgttacggagccgacaaatcgtcagtatcgtgaaccaagagtatttgccgttacggaagatattgaagccaagcatcgggaatttttggaaggaaaactgaaaaatgcaatttggctggccggggagaacaaggctgctgagtga

SEQ ID NO: 1554 - DNA, 969 bp, unclassified Azospirillum
atgaaaaaattatcttttatcctcaccctggcctccggcagcttgttaagctttgccgctccggccgaagaaatcagctgtaccgcatcccccagttgcgatactctgggctacacccaaaccgactgccccaagggcggtattcgctgcccttttgacaagagcaagatgttttgcgtttccggtttcggcggcgaggatttcagcttcaaaaatgccatttaccaatatcaggtcgtgtttagcgacggctccaccggaaccttctataatgccgataaagacgctgtcgggattgtcacctacgttcaccccaatacggaaggcaaccatggcatcattatggcgctcaaccagccgacggtgcaaacccgtgccgaagcaatcaaatactgtgccaactatgtgaccaaaggtaccaaggtcggcgattggcacttggcggatctgggcgaaatgatgactatgcaaaacggcgatttgattgatgatacgacgcagtttaccaaattgaacgaagtgctcaaaaccattcccggcgctcaggcgctcggcgtctcctttagttattactactcgcaaaaatgttctaataaatcttccgatccgggctatctttgggtcgattgcgatatatctagcttaaactgcccatcaggtagttggtacgattttgacaatgtaggtaggcaatacccttcacaatatttaaacatgggaacaatctacagcaactggtttaataacagcaccgctaattataatccggctccggggtgtgctaatagcagcgataaaagtgcttattatattcgaggaggctatcctttctattacagttcttcttattggaccattagcgatgtcctaagcaaaacacaaccttatgcagttgatttatatgaagcttccagggtttctcacaccggtgctcagcgcggacacttccgttgcatggccattttttag

SEQ ID NO: 1555 - DNA, 735 bp, unclassified Azospirillum
atgaaaccgacattagaagtccgcaatttgaccaaatgtttcggcagcctcacggccgttgacaacctttcttttgccgcccgggaaggagaaatcattgctcttctcggccctaacggcgccggaaaatcgaccctgatgaacatgattaccggttacctggcgccaacctgcggcgatatctgcgttctcggcagcaacattcgcgaaacgcccctggccgccaaaaaagacatcggctttttaagcgaaggttctcccctttatccagatatgagcgtccgctcttttctcggttatatggccgaactgcgcggccttggcggaaaagaaaaagccgcccgcctgcgggaagtctgcaccgccgcaaaaatcgaaaacatcaccgcccaacggattgaaaccctctccaaaggataccagcggcgcgtcggatttgcccaaagtatcttaagcaatccgcccatactgctcctcgacgaaccgaccgacggcctcgaccccaatcaaaaaacccatatccgcgaactgatcacctgcatgggaaaacacaaaaccatcttgatttccacccatttgctggaagaagcggaaaccatcgccacccggattatcctcatcagccgcggccgcataatggccgacggtacgctgaccggcattctgaaacaaacccgcagccgaaccctggaaaacgccttcaaaaaactgaccacgcaaagcgaggaagcatga

SEQ ID NO: 1556 - DNA, 750 bp, unclassified Azospirillum
atggatacacaaactttaagcgatgtaacaaatgcagccgccgaaacgatgtcgatgtgggatttggtctgggcttccgacatggtaaccaaagtggttatgattggcctgattgccgcttcggtatggtgctgggcgattattattgaaaaagtcggcactttgcgtcaggtcaagcagcgttccaacaaatttgaggagcgtttctggtccggcggttctcttgaccggctatatgattctatcggcaaccacccttccgatccgatgtcggcgatgtttgtttcggcgatgaaggaatggaagcgcaccaatatcatgaaatcgaaaaccgaccgcgggctgcgcggggtttcgctgcaacaacgaattgaaaaagcaatgatggtttcgatggacaaagagcttgacgacttggatacgcggatgggatttttggcctctaccggttcggcggcgccgttggtagggctgttcgggacggtatggggaatcatcaacagttttaatgcgattgccgttacgcaaagcaactccctttcggcaatggcgccgggtattgccgaggccttatttacaacggcattcggattgattgccgctattccggccgttatcgcctataataaaatttcttccgacattgacagctatgccaaacgtctggacaattttatggctgaattttccagcattttatcacgcgaaattgacgatacagccattaaagccgacatggccggagaataa

SEQ ID NO: 1557 - DNA, 789 bp, unclassified Azospirillum
atgaagaaaatttacttctttatttcggcggccattattctggcggcggccgcagccatttgcttactcaaaaaggacagtaaaatgaacagcttaaatacaacagatccggaactcgcggcattatggaacaattttatgaacgcagatgttttaccgcatggcagccttgaggtcaaaacgcgcgccctggttttgtttgccggacatgtggccgccgggtcggtcaacgaatacaaaatgtttcttgctcaggcgctggacaacggcgtatctccggttgaagccaaagaagcgatataccagacgattccctatgccggaatggccaaagcctacgactttctgattgccaccaatgaggttctgcaatcccgcggcatcagacttccccttgccgggcaaagcacgacatcgccacaaacccggttgaaaaaaggcattgctgttcagggcgacattttcggagccgaaaatatccgggccatgcgagaatcggcgccggccgaactgaaacacattcaggactatctttccgccaactgcttcggcgattattatacccgcaacggtttggacattaagacccgggagctgctgacttttgcggttctggtttcgatgggaggcgccgaacctcagaccagagcccatgttcaggcgaatctgaatgtcggaaacagccgggaaaatctgattgacacggttacgcagctgttgccgttcatcggctatccacgcagcctgaacgcaatcaacgttattaacgaagttactaaaaaggactaa

SEQ ID NO: 1558 - DNA, 777 bp, unclassified Azospirillum
atgtttgagatttttcatacgatttttaaatatcgcgaaaaagaaagccccgataagctcggactttatccggaacgggtacatgtcaacgccatgcccgagcgccgttatctctggacttcgcgaatcctggttattttggcagccatcagcatgagcatcaacatgatgctggcgctgacggtttatctgctggttccgcaaaagagcgtgtatccccgcctgctgcagattaataaatacttcagcgaactggaactggttcagcaagatgaagtttatacccgcgccaccgacctcttggccgaacagcacattaccgattacattattttgcgcaacaccattaccaatgattatgatgaactgctggctcgctggggacctggagaaattgtctactggttttcggcacgcccggtgtttgaggcattctatcgcggcgatgttcagcataatatcatgcagttcaaggaaaaggggctgcaacggtttgtaaaagtcgaatgggtacgtccgttgacgctcggtttgtggcaagcacagtatctgaccatggacgtgctgcccggcgtggaaaaaattgacaccaaaatctggcgggcaacaatgcggattgcctttttgcgccttcctttcccgtcaaaagaagaccagattaaaaatccattcggatttgtggtacagaactattcgctttcttatgtcggaacaccggaaacatcggcgcattatctggaacgtgcccgcgaactgaccgagggttcttatcgttaa

SEQ ID NO: 1559 - DNA, 870 bp, unclassified Azospirillum
atgtcagactggtttgaaaatgcctgctgccggatgagcggcaggccggcggaaacggcttccttcggacaacgttttaccgccgcgggcggacgctggctgcgaatgatatttatgccttttgcttttctgattgaccattttgggttatggctgcggctgtcgttgctttatgccttggtgttgagcttgctttcctgggggctcggatatctttacgtttgtgcgggaacggccgaaaccgccggtttctattgccgtaattcggttccggtttatttgctttacctgtttttgcggattgcgtttttgggcttgttttgcgccaagtggattgaggctgctgccggaaaagaaattttttcgtggtggcagattgtcctgccggatgttcggtcttggcgcacggccggattgctgctggctttggccggattaatggtcttccctgccggttcttttgaactgttggccgcgcgtgtgcccaatcccgattggcgtattgaaatagcttattttgcagttgtttctaccggttttctggtgccgcttctggctatgcgttattattcctggctggcttttgccgctttgggggaggctttgccgtctttcggaaaaacctggtgccggacgcgttgtcagatgttcaaaattttgaccgccttgtttgtcataatgctgttggtcatttttgttttcggtaattattttattgccttccgatatccgggagagggaagcttggccttttttgccgcggtttcggaatatgtttttaatctgctgtctttgttgtttatggccctgtttgccggtcattgcctggtgcagaaacagatgatgtttggagaaaatgaacatgaataa

SEQ ID NO: 1560 - DNA, 429 bp, unclassified Azospirillum
atggcaaaaactgttgaaattgaagaaactgaaattcaagccgccggtttgccggaagaacccaaaagcggcgtgtggtatgttgttttggcatggtttttgggcgttttcggcgttcatagcttttatgccggacatttttttaccggactggttcagcttatgttgacgattacgtcatggctgtttctgtttatcccgttgctgattaccatggtttgggcgtttctggatatgttgtttgtcaacaaggacgcacagggggtggttttttccggcaataaggaactcatttttgtgctgaagattctggcggcaatctggctgctgggcggtatttatttgctatatgccaatgcccggttttcatatgaggaaaccgagattctggcacccggacaggttgtttcggtagaggtcagcgagtag

SEQ ID NO: 1561 - DNA, 942 bp, unclassified Azospirillum
atggcagaatacagaagcaaagttttaattatcggttcagggcctgccggttacaccgccgggatttatgccgcgcgtgccgggctgaaaccgattttggtttccggccttcagcccggagggcagctgaccattaccaccgaagtggagaattttcccggttttcccgaacccatacacggcacagacctgatgcagcggatgcgcagccaggcagaaaacgttggggttacaatcattgacgacaacattatcgaagttgatttcagcagccgtccctttgtctgcaattctgaaaactaccatgtctataccggcgaaaccctgattatcgccaccggtgccagcgccaaatggctggggctggaaagcgaagaaaaattccgcggctacggagtctccggttgcgccacctgtgacggcttcttttatcgcaaccgcaatgtcgcggtcgtcggcggaggcaacaccgctgccgaagaagcgttatatttgagcaattttgccaaatccgtcacccttatccaccgccgtgacagcctgcgcgccgatcagaccatgcagaaacgcatcttggaaaaccccaaaatcaacattgaatgggatacggttattgaagaaattttaggaacggaaaatcccaaatccgttaccggcctgcgcctgaaaaacgtcaaaaacgacagcacttttgaactcgccgttgatggattgttcatcgccgtcggacaccaccccaataccgagttattcaaaaaatacttacagcttgacaacaacggttacattgtcactttgccgggcagcagcaaaaccaatattgaaggcgtttttgcggccggcgacgtcaaagacccgcagttcagacaagcggtcattgctgccggctccggctgtattgccgcattggaagcggaaaaattcctcaacgaaaatttataa

SEQ ID NO: 1562 - DNA, 1221 bp, unclassified Azospirillum
atgcgtgaactttgctacatcgccgccgttggactgctgctgggaatggcttttccggcagcggcagacgaaggttatgacccgatgctgttttccagcgaggaagaagccaacaacaatcttttttcgattatgccgccgactccgccgaaaatcaatccggtgaaaacggctccgcagaattcgcttccggtttctccccaaagttccgcccggcagacgcagccggccgaggctgccgcggctgtcaatccgctgccggaaatgacgccggaagatttgggatttcctgacgacgaagaaacaaccggaaaagaaattcccgaaaccgcatcccaacagccaatgccgaaacaggaaacggccctgccctccccaacgcccgcccggcctcagccgcaggttgacccgagccgcgggctgacagacaattttaaaactgacgcaacgacggcggaagatgccatttcttctaaggtcaaagacacctggattggtaaaattaccgaaaccgcagccgaaaaagtcaaagaaacaaccggggaaatcaaaacagacgagcataaagaaggagccagcctggaagggctgataaaaagttcaaaaaatgccagaaaacgggccaacgcctcggtattcgacatttcgggcgttatgctgcgcatgactttgccgcaggcggaagcggcgatgaaacagcggcattttaccaaagtttcggtcaaatacgaaattcccaattttataaaatggcgcaatgaggaaaaatgccgcaacaacggcgtggtcggctatgagcgcctggcaagctgcgtggtcgaactggccaaaaaagaccatcaccaataccccgaaacagttcgtttttctcgttttgacaccaaagaagagctggaaatcaaactgaccagcaattttaccaacaacaaagttcaccgcatactttacaagagcctttccccggcgattacgggaaacagcaacaaagccgtttatctccgcaacgtaaaaatttatgacttttggaaaaaggtcaaccaaaaatacggcacgccggacaacaaagacgaggttttgtgggggctgggcggcaacaagccttaccttaaggccgcctcgggggttttgctgcttgaagatccgatgctccgggaacttgattacacgcggatgtcacgggaggaccagcgctttatcaatacggatttatataatttttaa

SEQ ID NO: 1563 - DNA, 918 bp, unclassified Azospirillum
atgacggctaaatccgaagaaaatctgccgacgcgttgcggcttcgttgccctcatcggagcaccgaatgccggaaagtccacaatcaccaacgactttgtcggttccaaggtgtctatcgtgtcgcccaaagtgcaaacgacccgttctttggtccgcggcattggaatttttgaaaatactcagatcatattcattgacaccccgggaattttcaaacccaaacggcgattggatcgcgcaatggtagcctcgtcctggagcggcgttaccgatgccgacataacggttttggtcgttgacgccaaacgcggatttgaccatgaaaccagagccatcatcgatcagcttaacaaaaacaaacaaaacgccgtcctcctgattaataaggtcgacttggttgccaaagaaaaactgcttgctctgagcgcagaattaaaccgctatggaaatttcgccgaaacgttttttgtttccgcaacaacccggcaataccttgacgatttttaccgctatctggccgaacagctgcctgtcagtccctggttttatcccgaagatcagatttcagacatgccgctgcgcattctggcggcagaaatcacccgcgaaaaattgtttctctgcctgcatcaggaacttccctacgcccttaccgtcgaaaccgaattatgggaacgccgcgacgacaactcggttcgctgcgaacaaaccatttatgttgaacgggacaaccaaaaggtcatcgttctcggcaaaggcggcagcatgataaagaaaatcgggcaaatggcccgccgggaattggaagaattgcttgaatgcaaaattcacctcttcctttttgtaaaagtgcgcgaaaactggatcaacgaccccgcgcgctacaaagatctgcagctcaatttcaacgcctga

SEQ ID NO: 1564 - DNA, 519 bp, unclassified Azospirillum
acctgccgccacacgcctcccggacaaaataaatgcccctcaatccgctatttccaaatccgcgccgttttatacaaaaacttgacttcatataattacgtcgataacctgacaacggaaaaattaaaaccttatattgattcccccttccctatattcaaaatcaggagaactgctatgcccaatgctcaaaaatacctcggaaaaacagtcaaaatatcaatagaccgccccttgggaagcaaacacccccaatatggattttcctatagcgtcaattacggatttgtacccggcacgatttccggagacggcgaagaactggatgcttacgtccttggcgttaatactcccctggccgaatttgagggaaaatgcatcgccgttatccatcgcaccaacgacaatgacgacaaactcatcattgctccctgcggcctttgcttctcagatgatgaaattgaagaacaaaccgcttttcaggaaaaatggtttcaacacataatcatccgtcagtaa

SEQ ID NO: 1565 - DNA, 567 bp, unclassified Azospirillum
atgaaaaaaatatatttgcttattccgtttcttctgctgacagcctgtgtggccacgggtgtcagccagccctcaaaattttacaacctgcaatctgcggataccggcgcttataccaacagcagaatccgcggcaatgtcggcgttatggaaattacgctggccgactatcttgacaaaccgcagattgtaaccaccaaacccaatatgattgagctcgacatttccgaaaacaaccgctggagcgaatccctttccaccatgattcaacgcgtgatggcggacgatctggcctattatttgcccaaagcggcggtaaaaccgcggacgtcggcacgcgaaaattttaattatctggtgcaaatcgaactgaacaaatttgacggcagctggaataaaaatgtggttttggaagcctggtggtcaatcaagaacgcttccggacaagttgtcaggcagcaaaagaccgttctttccgccccgctcggcagcggatacgacgacttggtaaaggttcagagccgcctgctttcggaactggcggaaaaaatcgcccgcagcctctga

SEQ ID NO: 1566 - DNA, 867 bp, unclassified Azospirillum
atgaaaatgatcaagccaatcgtcaatatttccaaaattctgggcaactatcatctggttgtgaccggattggaaggcgttatcagcgaaggcggaaacattcttcccgaagccaaagaagccctgatcaaaatgaaaaaatccggccaacgcctgattttgctgaccaattcgccgctgcgggtacattcgattgtccagctgctgcggaacaacggactgccgccgctggtttttgacaatattgtttccgcaggcgaaatcctgcattatctgttcaaataccgggaaggcgattttgccaccatcggcacgacttactataatctggggcaaggcgcagatacggcaattttttcttttttggactatctcccggttgacaaactcggtaaagccgattttctgttcatgggaagtgctgccgctcccgaagccacaatcgaccagtatatgcagattttggaatatgccgccagcatgaacattccgctggtttgcgccggaaatgacacttccagttttcaaaacggcgaaatctgcctggcggccggcgccgttgccgaacaatatgccgctttgggcgggcggattattaccgtcggcaaaccggatcctaaaatcctgtcctatgccctggaaggaatggacaacgtttccccggaaaacatcctgctcatcggcgacaacatcaccacagacattaaaggcgccaatttatccgggatcgactgcgttttggtttccaagggcgttcacgttaattttctgggcgaaggatatattcccgatgtggcaaagacccgggaaatggccaataattatgatgcttaccctgattatgtaatttccaatctgaggtggtaa

SEQ ID NO: 1567 - DNA, 1281 bp, unclassified Azospirillum
atgaatatgcagatggaactctttgattttaaatcctataatccggtacggctcgaagagctgtttgccgcttattatgactgtcggcagaacaagcgcaagacttttaatgccctggaatttgagggggattatgaggcaaagctggtggatttgtggcgcgagatcaatgccgggacttattatcccggccgttccattgcttttattgttgacaagccggtcaagcgcgagatttttgccgccgattttcgcgaccggattgtgcatcatttggtgattaataaactgatgcctttgtttgaggctttgtttattactgacagttacagctgccgcgaaggaaagggcagtcaatacgggattaaccgggtggcggaatttgtccgcgaatgttctgaagattataccaaagactgttatattctaaagatggacattcaatctttttttatgagcattgacaagcgtattctggccaagaggctgcaccgttttatcaataaatattatcatgccgtggacaaggagataatcctgcggctggtggagattatcgtttatcattgtccgcagctcaactgtctggttaagggaaaaaagtcaaactgggacgggcttccccactccaagagtttgttttatgcaggaaaataccgcgggttgccgattgggaacttgtcttcgcaggtgtttgccaatttctatatggacgcgtttgacaagtttgtgaaaaatgtgttgaaagtcaagtactatggccgatatgtcgatgattttgtgattgtgcatgaggacaaggaatttttggtgcggattcaggaaaaaatgcgcaattttatgcagaaggagcttcatttgcgcttgcatcccaaaaaaatttatttgcagcacttttcaaaaggcgttaaatttatcggcgccgtcgtcaagccggggcgcatttatatcggaaaccgcaccaaagggaacttatatcaaaaattgcgcgagtataatctgatggcgaagaacaatccgaattatgccgagcatgcggagcattttgtggcaagtatcaattcttatttggggtttatgattcattacagcagttataagatccgccacaagatgatttgggggatggtggcgcccgagtggtggaagctggtttatacttatggcgcggttaacaagctggtgctcaaaaaagattatacttccaatgtgaagtatctgaaaaaagttcgccatacgccgccgattgaccatattgacgaggcggaaccgttattttag

SEQ ID NO: 1568 - DNA, 948 bp, unclassified Azospirillum
atgccgagaacaattgagggaaaatatgttaccgaaggggcgagagtctttcaggaaggcgatgatgcctggcttaggggggattatgaagcggctcgcggcaagtacagagacgcggcgaaactttatcgagattccggggacgaagagggagccgcttttgtatattcccgtctcggggagctggaattaagccagtatcattatgacgaggccgcgacggctctggcgacggcgttggatttgatacacggcagagactatgccgccaatacgtatggcgaaaccttaatccgtttttccaaggtgaggactgcccagctgaattatgctgcggcgctggcattgattcgcgatgccgaaaaggttttggaggaaaccggcagcaaggatctgggcggcgaggcttatgaacacgaggcttatatacacctgatgcaggagaacgaaaaagaggcgttgcgggcgtatcaggcggcagcggagatgtttgaaagcggccgcgtaacgcttaaggaggctgcggttttgcgcgcgattgcccggttggagatgaaaaacaaaaattatgaccgggcgcatgacattttggaaaaatgccggatgttgtatcgcgaaaacggcgatttgctgggcgaagccagcgctttgtcggcgatcggcagcctgcgctatctgatcggggacattcccaatgcccgcaaagcgttgatgaaggcggtttatctatacggaaaggccgggcatcattttgccgaggccgaggctctgctctatttggcgcgggtggaagccgtggatcaggaacgcggcagctatcccagagcgcgggcgcattataaacattcaatcgagctttatgattttatgcaaaatgacattatgaaaaacgctgtattggaagaatatcagaattttttgaagagaaccggttataaaggggattaa

SEQ ID NO: 1569 - DNA, 534 bp, unclassified Azospirillum
aaattaaattatttagttatgacagcaaaaaatcagattgagtttttagaaggtgagaagcaagctcttaaaaagcagaaatttcacaccagggaagccgattttgcacaacgcatcaacaagcttccgagattgtttcagcatcgcatcgcttttatgcaaaacaccattgaagggtttgattttttatacttggaagacgttctgacttctttggaatgggccgtaaaaatcatacagatttggccaaacggaggtttcagttcactacctaaggaaaagattgacgaaatctgcggagctgacgaacgaatgattgattggaaatattttgccttggtcatggcgattgcctggcacaatgacaatcctaccgatttttgtgcactcaacagttcaatggttatggaaatttccgctcccctgccgattttgacgcagccttcttatgtgcgcgaaagagatttgaccgtttacatctcttccgaaaaatgccttgaaattgagcgaaaattcttaaagccgatgttatga

SEQ ID NO: 1570 - DNA, 621 bp, unclassified Azospirillum
atgcctaatctgttgtttttgtctgataaccagtcttttgccgaggatctttccgggcagattaaactctatgcgccggactttaatattttttatgaagacaacggccaaaacttttatgatttggttttgttagatgaaaaagttgaaactgccgaaaaatacgccggacatccggcaccggtttttttgcttttgccgggtagcaatgaaaccgccgtttccgatgttgaactaattgccaaaccgctttcgctttccaaattgctggatcgcctgaaatcggggattcatttgtttgaaaacagcgaggacggctatttgcagtttaacgattatgaactgcgcccgctgggaaaagaaatttataatttccgcaatgatgaagtgattaagctgaccgaaaaggaaatcgccattctcaaatatctgtataaggccggagcggataagattgtcagcaaaaatgaactgttgcaggaggtttgggggtataaccccgatgtaactactcatacgattgaaacgcatatctaccgcctgcgtcagaaagtagaacacgatgatgcttccgcccagctgattctgacgaccgacggcggctatcagctaaagttttaa

SEQ ID NO: 1571 - DNA, 891 bp, unclassified Azospirillum
gtgtcttttcatattaataacggtgcttttcgcggccgtcttgttcggttggaccaagttgtcaataccattctttccaaacacgaatatccccgtccggtctcggcaattctcgccgaggcaacggccttgggtgtcctgcttgccagcacgctgaaatatgaaggattgtttaccctgcagactcaaagcaacggcccggtctcaatgattgtcgttgacgttacttccgacggcaaagtccgcgcctgcgcccgttttgacgaaacccgtttggccaaatcgcaggaattgcgcaaaactgtcggcgaaatcgaacctgccccgcacctcatgggcgaaggctacctggcctttaccgtcgatcagggaccggataccgaactctatcagggcgttgttgaccttcagggaaaaaccttaagcgagtgtgcactccgttattttaagcagtccgaacaaatagacaccgatctgcaactgtttttccgggctcccgaaggagattccgaaacctggaacgccgccggcattttcattcaaaaactgcctgaactcggcggcaagatcgaccccgatgttgatttatccgaaagttggaacgaagccaaaatctttatggaaagcctgaccgccgacgaaatatttgacaacagcctcagcaccgaagatattcttcatcgcttataccactcaagcggattggtcatttccggacaaaaggattaccgtttcggatgccgttgcagccgtgaaaaactgcaaagtacgctctccgggttcaaagccgaagagattgaatctctgtgcgataagggaaaaatagccgcaacctgtcagttctgctccgaaaaatacctttttgacaaaggcgaaatactgaaacagtag

SEQ ID NO: 1572 - DNA, 651 bp, unclassified Azospirillum
ttgacaaaacgcaaggaatttattgaggaaaaaatgccggattttgagtttgaaaaagaagcgggcggcgtggttgccggcgtagacgaagcgggcagggggccgtgggccgggccggtggttgccggagcggtagtgattgcggatcggaatctgccggaagagcttttgacggggcttgatgattctaaaaaactttccgccgccaaacgggaaaaattgtacagcgctttattggcggccgaaaaggccggaaagttgtcaatcggcatcggggaagcaacggcgcgggagattgatgagatgaatattctgcaggcgacgtttttggctatgaggcgggcggtggcgaagttgaaggtttgtccggaaaaggctttgattgacggtaaccgggtgccgaaggattttccctgcccatgccgcacgattgtcaaaggcgatgcccgttcaatgtccattgctgctgcctcgattgcggcaaaggtttatcgcgatcgtcttatggcggatttggcacgaaaatatcccggctacgggtttgaaaaaaatgcaggctacgggacggtgctgcatcaggccggtttggccgaaaagggaatatgtccggaacaccggcgttcgtatcggccgatacagaaatatttataa

SEQ ID NO: 1573 - DNA, 1002 bp, unclassified Azospirillum
atgattattaccagaacgccgtttcgtatcagttttgccggcggcggcagcgatttggccaactattatgaaaagttcggcggtgctgtcttgagtactgcaattaataaatatgtttatctttcaatgcacccgtattttttcaaagacggatattttctgaaatattcgcaggttgaagatgtgcataatgtcgatgaaataaaacatcggattatccgggaggtgttcaaactttatgacattcggggcgttgacttcaactccagcgccgatattccgtcgggaacagggctggcgtcgtcttcggcttttgccgccggactgattaatctctgcaacgcctataacgaaacctatttgaataaggaagaaatcgccgaacaggcctgtcgggtggaaattgaactgttgaaggaaccgatcggcaagcaggatcaatatgcctgcgcctgcggcggcttgaattttatcgaatttgaaaccagcggccgcgttaatgttgataaggtttttctgaccacggacggatataagcgcctggaagataatctgatgatgttttataccggtcaaacccgggctgccggagacattctgaaagaacagaaaaagaatacgacagacaatgccgccaaaatcaacaacctgcataaaatggttcagttggccaaggatttgcgggaagaacttctgcataataacattgacgccatgggcgagatactgcaccggggttggatgtataaaaaagaattagccggcggtattagtaatgaactgattaaccattattatgatttggcgctgaaaaacggtgccagcggcggaaaattgcttggtgccggcggcggcggatttttgcttttttacgtcaaggaggaaaatcaccagcgcgtccgctatgccttgcgcgatttgaaggaacttccgttcaaatttgataataagggaaccacgatcattcactataataaacattcactgaggggagaatattaa

SEQ ID NO: 1574 - DNA, 819 bp, unclassified Azospirillum
ttgccgaatcgaaaaaaaaatatattcttcgccggaggagcgattgtcatgaatttctggcgtgatttcaacatcaaagcattgttctgcggaccgtttttctatttttggcagggtatggtccggcggggagcttttcttttgaccttggcgtgcttatgctggctgggagcggttttgcaatggcaaagcggaaattccgctatagccgcgattatgttatcgctgccgtttttgttctgcgctttgcgggcaaacgccgattatgccgcttatctggcccaaaacaacaattataaccctgacgcgccgacgcaatattattcagtttctttattccggctgattttttgttcgattgtgagcggcggattttatgacatttattggagctatcgccagtggaatgcggtaaagcacgatcaacacgccagaatttcgccttttttgcgctgcctgagcaatctttttttcatttatcccctgtttaaccggatttaccgttccgcggcgcagctccgttatctgccgcggtttccgtccggactggcggcaatgtcctatattctgatcaacctggcgcaggagcccaaaaactatgacagcctcagttcgggagaagcggttattttggccggaattctggcagccagcgccctcagcctaatcccggcgcaaaaagcaattaattttaacaacgcccgtttgaacggcgctctgaagtttgccccggtccggtggcatgaagttgtgattacgcttatcggtttgctgctgatgatctcttatttttgggccaatcagttcttatataattaa

SEQ ID NO: 1575 - DNA, 1158 bp, unclassified Azospirillum
atgttgttaaaaaataagctgtatctgaccacattgttcgtttcgggaatgttggcctcaacgttgcggccggcatcggctattgaaacttcggccaaaaatgttttggtaatggactatgaaaccggccagtacctctatgccaaagaccaccagaaaatgattccgccggcgtcaatgagcaaattgatgaccatctatatgatttttgaaaaactcaaagacggctcgctctccttggacgatacctttacagtcagcgaaaacgcctggcgcaagggcggggctgccagcggcagttcaactatgtttttgaaaatcggcgaaaaggttccggttcgggatttgatccagggaattattatccagtccggaaatgacgcttgtatcgttgccgccgaaaacctttccggcagtgaggaagattttgccgccgatatgcagaaaaaagcccggcagctgggactgaaacacagttcctttgccaatgccaccggctggccgcatcccgaccagctgatgtcggttgaagacctggctcggctggcgcgggttataatttccgaatttcccgaattctaccacattttctccgaacatacttatacgcacaataatatcaaacagggcaaccgtaatccgttgctttacagcatgccttatgccgacggcctgaaaaccgggcatacggaagaagccggtttctgcctcgtcgcttccgccaaaaaggacaaccgccgcctaatcagcgttatggccgggctcaaaagcaacaaagaacgttcggaagaggccgaaaagctcatgagctggggctttcgggaattttccaactatacattgttcaaaaagaatcaggttattgccgaaattccggtttggctgggaagcgagaacaatatcaatctggttgttgaccgcgatgttcgccggacgctgaaaaaaagcagcgttaacaaagtcaaaatgacggccgtttatgacaaaccggtaaccgctcccataaaaaaaggcgacaggctcggaacgatcaaagtcgacattccggggcagggggattttgagattccgttgactgccgaccgggacgttgaaaagctcggcttcttcgggcggattgtttcaaatctgcattacctgctgttcggaggaatttaa

SEQ ID NO: 1576 - DNA, 564 bp, unclassified Azospirillum
atgtctgattttgatgcaattaagagtgacgccaaaacgagaatggataaaacgctggaaacgctgaaagccgatttttccgggttgcgggccgggcgggcgcatgccagcctgttggacgggattatggttgaggcttatggcagcatgacgccgctttcgcaggtcggaaccatcagcgttcccgatgcgcggacattgtcggtcagcgtctgggaccgcagtatggccaaggcggttgaaaaggcgatccgcgaatctgatttgggcttgaatccggcatcggacgggcagcttatccgcattccgatcccgccgctcagcgaagaacgccgcaaagagctggttaaggttgcggggaaatataccgaagccgccaaggtggccgttcgcaacatccgccgcgatgcgctggacgggattaagaagctgaaaaaagacaacgccgtttccgaagacgatgaaaaaagatttgaaaacgaagtgcaaaagctgaccgacgaggcaattaagaaaattgacgagcagcaggcgactaaagaaaaggacattttgcaggtatag

SEQ ID NO: 1577 - DNA, 1356 bp, unclassified Azospirillum
tattattttaaagcaagattttataaatttatttacctttctccgctatcttggaaaaagacaaaaggtattgtaatgaaaataaaattggcggttacgacattttcctttgctctgctgatttcctgctgcgcttcgtcaagcgtactgccggatccggagcatcatacctataccctctggctgaacagtctgaagtcggaaatgcttaaacgcggcatttctcagcagacgcttgacaaagcttatgcgcaaaccgattactatcacccggctcccgaagttgtgaagattgaccgccgtcaggccgaatttattttaacctcacccgaatatctcaaccgtatggtgcacacgctgcgaataaaaaaagggcgggaaaattacctgaaactatatcccttgtttcaaaaaatccaaaaacgctatggcgtccagccggaatatctggttgccttctggggggcggaaaccaattatggcgtcaattatggtacctatcctgttatcggtgccctgacgcagctaagctatgatcccagacgcgccaaatttttccgcgaacagctttatcatgccctgaagattgtcgatgcctcacaaatagaaccggaacgaatgattggctcctgggccggtgccatggggcactttcagttcatcccttcaacattcaacgcctatgcggtcgattataacaatgacggaaaaatagacatttggcactcctttgaagatgctgcggcatcagcggccaattatttgcactcaatcggctggaatgcggaacaaccttggggaatggaagtcagcctgccttggaattttgatttttcccaaagcgggaaggggcatgtcaaaaccgtcaaagaatggcaaaagctcggtgtcagaaccctgaacaaccaaaagctgccgcttctgaaaaaatggaaggcatcaattcttctgccggacggccgcaaagggcgcgcctatctggtgttggataacttttggctgataatgaaatggaaccgctccgaaaactatgccctggccattggccttcttgccgattatatccgaactggcaagaagtggcagcctgtgcaaaaaacgccggcaacccggctcaaaaccgacgatattaccaaaattcaggcctttattaaccgcattataggcagcaatcttgaagaagatggaaagctcggacaccaaacccgggaggaaatcaaaaaagttcaaaccatggccaaacttccggccgatggttatccggattataacctgctgaataagattaacaattacaatcctgaaatcggctttgccgttccggttcccaaccgaaaattacacaaggccagataa

SEQ ID NO: 1578 - DNA, 798 bp, unclassified Azospirillum
gtgaacagggaggtaaaaatggaaaaaatatggggcaatctgaaaaaagggctgcgtttttattgccgtgagaacggttttagcgatgttattctcgggctgtcgggcggactggattcagcagtagtcagcgttttggcggccgaggctttgggggcggaacacgtttactgcctgatgatgaagacgggctatacttcggctttgagtttggagattgcgcgggagctggcggagatgaacaaatttaattatcgggtactggatattcagccgcttgttgacagccagcagaaatttttgaccgccgccttggggactgaaccgaaaaaggtggtggttgaaaatttgcaggccagagagcggggaaaaatcctgatggctttttccaaccagttcggctatttggttttggcctgcggcaacaggtcggaagcagcaacgggatattgtacgctttatggcgatacctgcggcggcctgatgccgatcggtgatttgttcaagacgcagatttttgaattggcacggtggcgaaaccggcaaggatacgtcattccggaagcggttatcaaccgggcgccgtctgccgagctcagcagcggccaaaaggacgaagacagtctgccgccctatgccgtcttggacgagattttggggctgtatttggatggaggaaagacggctgccgaaattaaagcgcagggatttagttcccagactgtcgattgggttgtccgcagttatgaacggacggcttttaagcgggagcagatgccgccggttttgaaactgtaa

SEQ ID NO: 1579 - DNA, 507 bp, unclassified Azospirillum
atgaataaaaaactttcttcaaaaatagcgtttaactccggtgattatgtcgtttatcctgctcacggggttggcaaagttgccgatattaccaagcagaaggttgccggttccgaattggaactgattgtggttaattttgaccgcgataagatgacgctgcgtattccgatggcaaaagccgagacgaccggtttgcgtcggatttcggcggaagacaccatgaatgatgctttgggtgtcctgaaaggcaaggccaaggttaaaaaggttatgtggtcacgccgggcacaggagtatgaaaataaaatcaactccggaaatccggtggcaatcgctgaggttatccgtgatttgtatcgcagcgaaaacctggcggaacagtcttacagcgaacggcagatttatgaacaggcgcttgaccgtctggctaatgaatatgccgtttgcgaaaatatatcttcggctgacgcaaccaaaaagctgttggatattttagcaaaataa

SEQ ID NO: 1580 - DNA, 1542 bp, unclassified Azospirillum
atgtataaactttcacgttcaagaatcattgttattcttgctatctgcctgattggtatattctttgcggttcccaatctggttcccaataaggcggcgcttccgtcctggtggcagccggttaacctcggactcgatctgcaaggcggatccaatctgcttttggaggttaaaattgatgacgttctcaaagaacggatgaatacgattgaggatgaagtccgccagacgctgcgcgaaaataaaatccgctatgccaatctccgggcgggagaaacctcggttcaggtcaaaattgacaatcccaattcgcgaaccaaagcggcaggcttgttccgcaagctggaccgggattatgaagttaccgaagcagacggcgtgttaagcattgcttataatgaagcggcgcttaaaaagctcaaaatgcaggttgttgaccagtcgattgaaatcgtccgccgccgtattgatgctcttggaaccaaagaacccgtaatccagcgtcagggggataaccgcattgtcgttcagctgcccggccttcagaatcccgaagaagtaaaaacgctgttgggcaaaaccgccaaaatgagtttccatctggtcgacagcagctcgaccgccatggacgcccgccgcggcaaactttccggaaattcccgtctggtacccggaaccgaaggtgaaacctatgttatcttccgcaagccgattatcggcggcgagcacctcaaaaacgccggggtccagtttcaggaaggtcagcccgtcgtcagttttgaattcgattcggccggcggcaaaaagtttggcgaaaccaccaaaaacaatattggcgaaagactggcaatcgttcttgataatgaagttatttccgccccgaccatccagtccgccatcttgggcggcagcggcgtcattaccggaaatttcacgaccaaaagcgccaatgacctggccgtgctgctgaaatccggtgcgcttccggctcctttggaggttttggaagaaagaacagtcggcgccggcttgggagctgactcgattcgcgaaggcgttgtcgccagcattattggcctgattgccgtggtggcgtttattatcgcagcttatgggttgttcggcgtatttaccgcaattgcggttttcaccaatctgtttttgctgttgggagctttgagctttattggcgcaacgttgacgctgcccggtattgccggtattatcctgaccattggtatggcggtggatgccaacgtgctgattttcgaacggatgcgcgaagaagtcaaagccggccgctcgccgcgcgatgctgccgatgccggatttacagaagcctggaacacgattgtcgattccaatctgacgactttggttgccgcttttgttctgttttatttcggaaccggtccggttcgtggatttgccgttaccttgtcaattggtattgccacgtccatgttcacttctgtaaccgtaacccgtttgattatagcctcttggttggcgcgtaacaagccgacccggcttccgatttaa

SEQ ID NO: 1581 - DNA, 756 bp, unclassified Azospirillum
atgagcgtattgcttgaaattgaagatttgcatgcccgcgttggcgataaagaagtgataaagggcctgaacctgacaattaatgagggtgaggttcatgcgattatggggccgaacggcgccggaaaatctaccttgtcttatgttttgtccggcaaacccggctatgaagtaacctccggaacgattcgctttaagggggctgacctgtgtgccctgtcaacggaagagcgtgcccgcgaaggtgttttcttgtgtatgcagtacccggtagaaattcccggcgtaccggtttctacttttttgaaacacgcggtcaacgccgtacgcaaacaccaaaatcttccggaactggatacttttgagtttttgaagacgcttcgcgaggaggggaaaaagctcggaattgacaacgagatgataaaacgcccggttaatgtcggtttttccggcggcgagaaaaagcgtctggaaacattgcaaatgtccattctgaaaccctgtttttcaattctggacgaggccgattccggcttggacattgatgcgctgaaagtcgtggccgaaggagtcaatgctttgcgcgacggttgccgttccatgttggtcattacccattatcaacggttgctgaattatatcattcccgattttgtgcatgtctttgccgatggccatatcgttaaatccggagacaaaaatctggcgctggagcttgagcagaccggatacgccgaatttatgaaagagaaataa

SEQ ID NO: 1582 - DNA, 1239 bp, unclassified Azospirillum
atgaacaacacagcattaaaaattcaggaacaaccaacagaaaagtcaggcgttttgcgcctgactttaactgatttcagaaactatccgtttttgagaatcagcgctgcgcccggcccggtcattattaccggggaaaacggttcgggcaagaccaacattctggaggcgatttcctttttgacgccggggcgcggattgcgcagcgcacggttggccgacattaaaaggattactccggcgttggtaaccgacgaatatgctccgacggagattgccaacttcagctgggcgatttcggcaacggttcaaaagggctttgaagaaatcgaaatcggaacggcggcagagaaaactgtccgcgaaagcgaggacgaaagccgcagttttgagcggcgaatcgttaagatagacgggaacaaggtttcttcgcaaagcgaactgggaaaatatgtttccgccaattggattacgccgcagatggatcggctgtttcggggcggttcgcaaccgcggcgcagttttctggaccgcttggtttatgcctttgatttggagcatgcccggcggacggctaattttgaacactggtaccgggagtggtgccagctgttgaaaagcggacataatgacaattcctggctgaaaagcctggaagaaaacatggcggcgaccggcgtggcgattgcggcggcgcggcgcgaacagattgccaagctcaaccgttttattgagaccgaaccggacgatatttttccgaacgtgcttttggaactggatggaacgattgagcggcttttagacaagatgccggcggtcgacgctgaagactattatcaaaacctgctgcaaaaacagcgtcgcaacgtcttgtacaacgacggcatcgacggcgttaaccggacggatttcaaggtttattacagaaaaaaaagaatgccggccgaactctgttccaccggcgaacaaaagtctttgcttgtcagcattattttggcgcaaagcaagtgtcagacgctgcatcagggatttgcaccggtgttattgctggacgaagctgcggcacatctggacgaccaaaaacgcgaggcgctgcttgaaaaaatccttgatttgcggacacaggcctggattacggccacgacgcccgaaccttttttgcgcttaaaagacgatgccttgtttatgacggttcgcaacaaccaggttttcgaaacaaacttatctgccggagagtga

SEQ ID NO: 1583 - DNA, 513 bp, unclassified Azospirillum
atgaaaaaattttatgcaactctcggattcttgggatttttggcttccaatcaggctctggccgccacgccgcaggttttgggcgaatacggcgactggattgcctattactatcaggaccgcggcggcattgtctgctatatggcttccacccccaaaaaggatgaaggcaaatataccaaacgcggtgacatctatacggtgattacccatcgcccttccgaaaaaagctttgacgttgtcaatatcaatgccggctatacctataagccggattccaaggtaaccgtcaaaatcggcaacaaaagctataaccgcctgtttattgacggcgacaaggcctgggcgattgacgaggcggcggataaagaactggtaaccgccatgaaacgcggcagccggatgattgttaccggtacttccagcaaaggcaccctgaccaaagatacctattctcttagcggtttcagtcaggcctatctggcaatttccggaaagtgcaagaagaaataa

SEQ ID NO: 1584 - DNA, 1494 bp, unclassified Azospirillum
atggcaatgctgacgttaaaacatctaccgattaattcttttaatgaaaatattgcatatcttcacaaagattgcgttgcctacaaactggaagacatcaaatttatgaccaaggtagaaattcacggcggagcaaagccgatatacgcctttttaaatatcgtcgatgatgaaaatctggtcagccccgaacaactggcgctaaatacggaagctttcagccttcttaacctgcctgaaggctccaacattaccctggccctgacacccccgccgcccagcatcagttctatcaaacgcaaaattgccggtaatattctcagtccggcggaatatggcggaattatcgccgctattgccaaccgccgctattccaacatggatattgcctcttttctggtggcttctggttcttttatgacgccgccggaagtgctggcgctgacggaagcattggtcggaaaccaggttattaactgggacaacgaaggaattgtggtcgatcatcattgcctgggcggcattcccggcaacaaaaccgatattatcattaccgcgattgtagcggcttacggcctgcctattcccaaaacggcttcccggtcgctgagttcctgcgcgggggtggccgacaccatgagcgttttggccaatgtcgatttggacgagatactgctcaaaaagcttatccgcgaaaaccgcggcgctctggtttgccacagcggactgcagattgccatggccaaccggttgatttcttcggtagaacggcaaatcggcattacccagcagcagcatttggttgcttctatcctggcaattaaaattgccatggggattacgcatttggtaattgatattcccgtcggccccaattcgcgcattaaaagcacacaagacgccatgcggttgcgcaagctgattgaatatgtcggcgaccagatggggattgaggtcgatgcggtcattaccgacggcagtgagccgattggcaacggcatcggagcagttttggaagcccgcgacgtgatgaaagtcttgcgcaacaaagacgacgctccgcaggatttgcgcgaaaagtcgttgttcctggccggaaggattattgattttgaccccaagctgcgcggcgggcaagggtattttgtggcaaaagaaattctaaattccggacgggcgcttgaaagcatgaatcggattattcacgcccagggcaaggcgccgcagccgacgctcgggcatctgacccgcgacattgttgccgcagaaggcggatatgtggagagcatagacaacaccagaattaaccgtatcggcgttttagccggggcttcgcagaatccgggggccggactggatttgctcaaaaaagtcggcgaccgggttgaacaaggcgaaacgcttttccgcattcattccatgaattcgacggatttcggatatgccaacagcgccgtggacggcaacaacggctatacggttgtttcccgctga

SEQ ID NO: 1585 - DNA, 363 bp, unclassified Azospirillum
atgaatacgccaagagaattgttaaaaaagagaaaagcgcgcgttagaatcgctttgaaaaacgctgccaacggaaaactgagactttcagtcttccgcagcggtaagcatatctatgcgcagattatcgacgatgctaaaggtgcaacagttgtttctgcttctaccttggacaaggaaatcagagacagcattaaaaagtcctctaccgttgaagctgccagctttatcggtaaggttgttgcagagagagcagccaagtccggggtcagcgaagttgtttttgaccgcggcggctatatctatcatggtcgtgttaaagctttggctgatgcagctcgtgaagctggtttgaaattctag

SEQ ID NO: 1586 - DNA, 675 bp, unclassified Azospirillum
atgaaaaaaatcgcccttttcttttttactttttgtattttgacaaatgccgccgccgtccgggccggcattacctttgcggtcgacgcagccaacgacgaactgccggaatacagaattcagggcatgtctatggaacaacgcagggaatattgcaccggatttggcttcaagctgatgagctgtaccgatccgtatatgcccgaggctttgtgccgcgccgatcccagctatgccagcaagtgcatctgccggccggaatataatttggaatgtaaggaaaccgacggactgcgcggcgtggggaccaaatgcgacggcaaatatgcgcagtgctgcaagctgatttgcaaaaatccctatgcaaccctcttaagctgcaaagaccaaggtttggaagaaattcacagcgaacgcgattataacgaatgcggcgaaacctgttatgtctgcaaagacaaatgcgttaagggaacgccggaagaccaatgtccgaacgggcagaagtgtattccgttccaaggcgtcaccagtcatctgggaagacgctgctgccaatgcggctgtccggcggggcaaaaagaatgcatgggcttttgcgttccgcaaaacgaatgttgtcccggctgcaaagacggttataaatgcgccggcggcgtttgcgtttccaagtaa

SEQ ID NO: 1587 - DNA, 1197 bp, unclassified Azospirillum
atgaccagttttaacaagttgggcttgcctgatattatattagactccctgaaaaaaataaattttactaatcccaccccaattcaggagcaggctattccggcggcgctcgacgggaatgatattctcggttcggcgcaaaccggaacaggcaagaccgccgcttttgctcttccgatgttggcgcatttgctcaattcggaaagctcggcggccctggtattgctccccacccgcgaacttgcccggcaggtttgtgaagcggcccaaaaatttatcggccccaagtccggtcttcatacggcgctgcttatcggaggggaagcaatgccaaaacagttgcggcagcttaaataccggccgcggctgattgtcggtactccgggtcggattaatgatcatcttctgcgccacagcctcaaactaaaccactgtgactttttggtgctcgatgaaaccgaccggatgctcgacatgggttttggcatccaactggaacaaatttgcagacatctgccggaacaacggcaaaccttaatgttttcggccacacttccgggaaacattgtttcactctctcaaaaatatttgaaaaatcctgttcgtattgctattggttcaacccaaaccgccgctccgaaaatcaaacaagaaatcgtcaaaacaaatgctgcgcaaaaatatgatgagctgacagcccagcttgccgcacgcagcggttcgattttgattttcgtcaaaacaaaattcggcgcagaacgtctcgccggaaaactgaacaaactttctttgacggcctgcgccattcacggcgatttgaaacaacgcctgcgggagaaagtcatttctgattttcggaaacaaaaaaaccgtattctggtagcaaccgacattgccgcgcgaggattggacattccgcatattcaacatgttatcaactatgatctgccgcaatgtcccgaagactatattcaccgtatcggaagaacggcccgcgcaggtgcggaaggttgcgccgtcaacatcataaccgctgccgacgccaccaagtggaaagcaatccacaaactgatgcatgccgccggaaacgacgacactctcgccttgaacaaagaacgccaacaccgcaaacgccattccggaaatttccgccgcggcaatctccgggcaaaccgctgtacacaacatgccgcttag

SEQ ID NO: 1588 - DNA, 1086 bp, unclassified Azospirillum
atgttatataatctgttatatccgtcggcggagcgggcagaatggatgcaaagctggctgaccgtgccgtctcgggcggcgctggctttttttgcggctttagcgttggggttgttgtttggcggccgtttgattgaatttttacatcatcatcagaaaaaaggacagcccattcgcgaagacggtccccagtcgcatcttctgaccaaaaaaggaacgccgacgatgggcggtttgctgattttgggaacggcaaccgcggcaattttgctgtttgccagtttgcttaatccgatggtttgggtttgtctggcggttatgtggatttatggggtggtcggttttgccgatgattatgtgaaagttaccaaacagacttccaatgcgatgacggccaagatgaaactgctgctgcaatttatgacggcgttggtttcggttctggtcatttcttattatacgccggcgggcagccgttattcgctgacaattccctattttaaagatctggcgctgaatttgtggctgttttatgttccctttgcgatggtggtgattgccggggcttccaatgcggttaatctcagcgacggcttggacggtttggcaggcggtctgctggtggcggcttttgctttctttgcattggcggcttatgtttgcggaacagatgttgcgcagtatttttatgttcgcgcgttgccggggatgggcgaggttgctgtggtttgtgctgcggttgccgggggatgcgtcggctttttgtggtttaatgccccgccggcgaaggtctttatgggcgacaccgggtctttggccttgggggctttgctcgggacggtggcagtaatgctgaagcaggaagttatgctggcgattgtcggcgggatttttgtgctggaagcgctttcggtgatgatacaggttttttggttcaagcgcaccgggcggcgcgtttttaaaatggcgccgatacatcatcattttgaacaatgcggctggcccgagacgacggtcgtgctgcgtttttggattgtggcgctaatgttgttgctggccggtttgccggcattggcaatgagataa

SEQ ID NO: 1589 - DNA, 969 bp, unclassified Azospirillum
atgaagatggctgctgaagaggttttgaaggatatcagaaaattatcggttgatgaactggctgcattgcaatgttctgtacaaaattttggttttgaaccggaagtccgccgaggacttgaggcaaaaattcagcagcgggcgcttaaactaatggatcgtttgaaccgtcagccgaatatttatgccgatttgccggatgttgaaaagctggttaaagtttttggtgagtataatcatgaaagaaaactgatttatccggtggcgcattccttgaaaattaagattcataagactaaatgttattttgagaagaatccggttttgcgggaagaagctttgcggcagcgggaacaacgacggggcaaaacttttgaaatcagatttgagcacccggaaacaaaccgggaaaagaaagttgttgcgaatgaacctcaggcatcggaaccgcggggtgttgagccggaagcgctgccgatatcttttaccgggaatatgtttgcctcagaagaagaaaaaacggttgtggcaacagcaagaacaaaatccgctccgcgccctgatattgccgaacttgtatcaatgctggcggcagctaagactgcttctcggcaggaagcggcaaaatccgtatcgcggcagccggtttccggaaagacgcctgtccggtcggaaaaaacaacccgtttcaaagccttttgtaaggaattggggcaggagataatgcgttggcagacagccgtcggtgcaacggttattttgcttggcggaatcagttcctataaggccgaacaaaataaggccgaaaaaatagtgccgacaaaagaggcaaaagcaacagcagccaagaaacagagccggactgacggcaagacctttacgggttttgacaaggttcagaaagaacatgttaacaaggcagatacggctgcggtaatggcatatctaaagtccggtcgggatttttaa

SEQ ID NO: 1590 - DNA, 654 bp, unclassified Azospirillum
atgttgctggcggcgacagccggcgcaatatgctgttatggcggaagcgcagaggctaagaccaccttcctgcctgactggcaaggtgccggtctggaaggaaaatcatcaaacgaatctaacatggatttgaaccgggatgaaaagctttgtatggagcagaatgctgaatttaagtattatacctccgcacaatgcccgaaatattatgctttggacgagacttgcgacatcgacacccattatctggactgtaacccggtacgctggtgtttggagaacgattataaggttcagagctgttcggaccccgacaaacatttatacaaccaatgcccaaacaactatccctactatcaaaaatgcgtctgcaacagccagttcagatacacttcgtctaactgtaacggccaatattatctggccggaagctcttgtaccgacgaccgttcttcgaccaagaaatatacgcaatgtatatgttcgccgaagagcagcgaaaccggctgttcgtgtacaacttcatgttcggacggatgcggcggaacacgtacctgctgtacatcctgcccgcctcccccaacacctccgtcaacttcttccggaggtagcagcggcggcggtggcggcggtggcggcggcggaggttccggc

SEQ ID NO: 1591 - DNA, 1224 bp, unclassified Azospirillum
atgcgaagcaggaacaaaaaaactatccggcaaaatggcacggttattgcatttatctttataagtttaaccaaaaatttgggattaaaacagatgatgttgagaaaaaccgttacattttttgatcttgccgccgccgggttcctgcttttgtgcagcgttttcttttctccggctcatgccagttcgcgcattaaagacatcgccgattttgagggggttcgcgacaaccagctggtcggctacggtttgattgtcggtctgaacggcaccggcgacaacatcaagtctattgattttaccaaagaaagcctgatttcgatgctcgaccagattgggattaacgcccggggcggtcaaatcaaatccaagaatgtggcggcggttatggtaacggcaaacctgccggcctttgcccgccagggaagtcgtattgacgttatggtcagcgccgtcggcgatgccaaaaacctgcagggaggaactttgctggctacgcccttaaccggagcggacggcgatgtttatgccctggcccaaggacaggtcgccgtcagcggcgttgccgcgcaaggcggcggtgcttcggttgtccgcggggttccgacttccggacggattgccaacggagcaatcattgaaaaggaaatcccatttgaactggacagtctgcgcacgattaaaatcgctttgcgcaacccggattttacgacttcgcggcgggtggccgacgccattaacgccaatttgggaaccaatctggcccaatcccttgatccggcaacgattgaaatgcaaattccgcgggaataccgcgaccgggttgtcgatttgatgaccaaggttgaacaattgcaggttcagccggatcaaacggccaaggttgtaattgacgagagttccgggattatcgtcattggcaaagacgtcaaaatcaacaagctggcgattgcccaaggcaatttgaccatcaggattaccgacgtgccgtttgtttcgcagccgctgccgttttccaacggcgaaacggtggtcggcgtcaataccgcgattgacattaacgagagcattgacagcaagctcagcgttctggacaccggcgtaaacctgcaggaactggtcaacggcctgaacgcgcttggcgtcagcccgcgcgacttaatcagcattttgcaggcaattaaggccagcggcgctttgcaggcggatattgaggtgatttaa

SEQ ID NO: 1592 - DNA, 1653 bp, unclassified Azospirillum
atggcagcaaaagatattatgtttgcaaccgatgcccgggcaaaaatgcttaagggtgtggaaactttggcaaagaccgttaaagtaaccctggggcccaaaggccgcaacgtgattttggacaagtcttacggcgctccgaaaattaccaaagacggcgtttcggttgccaaggaagttgaattgtccgacaaatttgagaatatgggtgcgcagctggttaaggaagttgcccagaaaaccgccgacaaggccggcgatggcacaacaaccgcaacagttctggctgaggcgattatccgcgaaggctgcaaggctgttgccgccggcatgaatccgatggacttgaaacgcggtattgacatggcggttgaggcggtggttgaggatattaagtcccgctccaaagaaattaagacttcggaagaaattgcccaagtcggtaccatttccgccaacggcgaccgttcaatcggcgaatatctggcccgggcgatggaaaaagtaggcaacgagggcgtgattacggttgaagatgccaagggtttggaaaccgagcttgacgttgttgaaggcatgcagtttgaccgcggttacctgtctccgtattttgttaccaatccggagaaaatgacctgcgaatatgaaaatccgtatattttgctgtatgaccagaaaatcagcaatttgcagccgttgattccggtgttggaagcgattgttcaatccggccgggcgttgctgattgttgcggaagatattgaaggcgaggctttggcaactttggttgtcaaccgtattcgcggcggcctcaaagtttgcgcggtcaaagctccgggctttggcgacagacgcaaagcaatgttgcaggatattgctattttgaccggcggacaggtcatttccgaagaactgggcatgaagattgaaaacgttactttggatatgctgggtacggccaagaaagtggaagtcaacaaagacgacactacaattattgacggtaacggcgagaaagacctgattgctgcccgcgccgctcaaatccgcaaggagattgaagaaacgacttcggattatgaccgcgaaaaattgcaggaacgtttagccaagatttccggcggcgttgccgttctgcgtgtcggcggggcttccgaggttgaggttaaggagaagaaagaccgtattgacgatgccctgaacgcaacccgtgctgcggttaaagaaggcgttgttgccggcggcggcgttgccttgctgtattctatcaaggctttggataagctggctcccgccaatcaggatcagaaagtcggcattgacattatccgcaaagctgccgaagccccaatccgccagattgccgaaaatgcgggtgttgacggtgcggttgtagccggaaaacttttggaatccagcgacagcaattatggttataatgcccagaccggcgagtatacggatatggttaaggccggtattatcgacccgaccaaagttgttcgtacggctctgcaagatgcggcttcggtcggcggtttgctgattacgacagaagccatggttaccgaagctccgcagaaagaatgcagttgcggcggtgccggagccggaatgcccggtgcaggcggtatgggcggaatgggtttctaa

SEQ ID NO: 1593 - DNA, 924 bp, unclassified Azospirillum
atgacagacgaaacccgacattccaacccgctgctgcaatccctgaaaagcctcttcggccgcaaatcctgcgaaaccgtgcgcgaaaccattgaagacctgattgaggagtccgatggaaacgacaatttcagcgagcacgagcagctgctgctcagcaacattttggacctcaaagacaccaaatgcggacacgccatggttccgcgggctgatattatcgcttttcatcaggacggaaccgtcggtgaactggcggaactgatgttagccaaaggacattcgagaattccggtgtatggcgattcgctcgacgatatcctcggcgtcgtccatgttattgatttgctcaaacccctgcttgaaggcaagcaggacaccaaagtccacacactgctatgccgcgaagtcaaatttgtttccccgtcaatgcgggtgctggacttgcttcatgaaatgcagttgaacaaaatccacatggctatcgtcgttgacgaatacggcggcgtagacgggctgattacgattgaagacctgcttgaagaaatcgtcggcgatatcgaagacgaatatgattttgaggaagaaccggtcattctgcttcaggaagaaggcgtaatcctggccgatgcccgggcggaacttgacgaaatccatgaagttgccggcatagacctgtatgaaggcctggaagaggacgaactggaggtcgataccctcggcgggctggtcttccacctcgcccagcatattcccaaccgcggagaaatcatcgaagggcgaaacggcatcaagttccgcattttggacgttgatccgcgcagaatcaaaaaagtaatgatttctctgccctgcgacaagaaatgcccgcttgaaactccggaaaccgatactgagcccaaggacaaaaatgcagataagtaa

SEQ ID NO: 1594 - DNA, 1194 bp, unclassified Azospirillum
atgtttgctgaatggagttgggataagatgattgataccatagtttgcgacaaacaggccgaacaggctgccgttgccctgctcggcgatggaaacgtcaaagaaattgaatttgtaaacgaggcccgggccgccgagggcagcatttatctcggaaaaatcacccataagcttgaactggcgcatgaaaaggccggttttatgattgacatcaatgacggacgtgatgcgtttatgatggcagaagaagccgggctgcaggaaaacagctttcatgaaggacagagcctgatggttcaggtcagccaggaagcgcgcgccgaaaaaggagccaaagtcgtccgctctattcagctggtgggggactatgtggtctattgcccataccgtctggaggttacggcctcttcccgcatagaagaccaggataagctgcgtgagtacaagaagctggttattgaacacacaaccggacaggagggctggatactgcgcacgtcttcggttacggtaccttttgaggaaatcgcttctgaaatggggcgcctgcgcagcgaatttgaacagattatgaagaaagcgcgggttgttaatgcaccggcgctgctttatcggcgcggcaatccgctgtttgacgctattgcccgccaccgcggaactttgcacacgattgttaccaattcgcgcaatattgaaaaggaaatcaaagaaaagtatggtgatgaatttgccgttgaaatcaaagccgatccgctgactgaactgggcgtcgaagacgttatttttgaatctctgaacaagcatgtcaagctgccgtccggcggcagaatctgcattgaagagacccgtgcctgcgttgctatcgacgtggacagcggcgatgaccgttctaacggcagcatttcgcatttgaacattgaagcggcaaaagaaattgtccgccaaatccgattgcgcaacctgtcgggaaaaatcgtcattgattttgcggggtcatctgattatcgttttatgaagccggtgcttgaagttttggagcaagaattgttgcgtgataccaacaaaagcacggttttgggcttaagcagagccggattggtcgaaattgtccgggttcgccgccgcccgagcctgagagacattttcacatccgaatgcgagtgctgtcaaggaaccgggagagtttccaaatga

SEQ ID NO: 1595 - DNA, 357 bp, unclassified Azospirillum
atggaaatttacaaggtgactaacacgttttcccgcgaatacaagttcagtctggggcaggatatgcgacgcgacactttgtcgctgtttcggaatttgtaccgggccaataagaataaagacaaaacagctcatttggaggcttttttagatgattttgagctgctcaggctggaaatccgcgtttgtttggatttgaagctcttatcttttaagaaaatggccgagattgcgctgattaccgacagtatcagcaaacaagtaacagcttggaaaaacagaacaaaagataaggataaagataagtttaaaaataagaattgccagaacctggcggattatggtctgacagggtga

SEQ ID NO: 1596 - DNA, 432 bp, unclassified Azospirillum
gtgcaggaacgtttttgggaaaacaaaaagcttgaagacttcacggaagacgagtgggaagccgtctgcatgaactgcggcaaatgctgcctgataaaactccaggatgaagataccgaagaaatttactatacaacggttacctgccgttattttgacaagcaaagctgcaaatgcaccgaatacgccaatcgctgtgcattggttccggcctgcatcaaactgaccaaagacaatatcggcggcattccctggatgcccaaaacctgtgcctaccgctggctttatgagaaccgcacgctcccggactggcatccgctcctgaccggcaaacgcgacaacaaccataccgtcggcagtttctgtatcaacgaaaccgaaatcgaccccgatgacattgaagattatataaccgattgggacgaattatga

SEQ ID NO: 1597 - DNA, 498 bp, unclassified Azospirillum
atgaaacaatttgtacgatctgaatataaacgttttcggaggcaaatcggggcgctggtcaaaaacgcccgccttgctgacggcatgagccgccgcggcgtttgcgaaactctcaacattcccgatgtcgaacagttgataaacatcgagagagggaggtttaccggtatgtggaagttgattaagatattggaattcttcggctataccctaaatgtccatttggaagcgattgacgataatcaaaactatgaaatgcgccggaaacaagcgcaggattccattcgcggtttttattatgcttgtgcgctttgcttaaaggaactgagaggggcttatcattattcgcgtgaacggctggcggagatgagccatattccggaagagaggattaaggctatagaagaacaggattatccctatccgatagaggatttttgctccctgatggttttttttgagcgcgcagcgcttcccagccttgttcccattggctga

SEQ ID NO: 1598 - DNA, 918 bp, unclassified Azospirillum
atgattgagcggctggttaccgaatttttagaaatgatgaccgcggagaagggggcttctccgaatacggttgacgcttatcggcgggacgtggggcaattttttgagatatgtccggtcaaagacgtggcggcaatcggcaaaaaagatctttcgggctatttgcgggctttgtcagatgaaaaagtttatgcaacccgttcagtttgccgcaagatttcgacaatacgcgagttttttaaatttttatacacggaaaagctgatagccgacaatccggcgatgtatctgctgcccccccgcagagaaaagcctttgccgaaatttctggtggaggacgaagtgcggcggatgattgctctggcatcggaaagccctaagccggcgttaaaacgaatcggagcgatgctgactttgatgtatgcctgcggcttgcgggtttcggagctggtcagtcttcccgaacattgcattaattttgaaaaaaaacagattttagttcgcggaaaaggcagcaaggagcggatgattccggttgccgacaaggcattggcggcgataagcgagtattatgattatcgagaactttttttgaacggcggccgccgttcgatttggctttttccttctgcttccaaaagcggacatctgacccgggacgccttttataaggaggttaaaaagctggcggttttggccgggcttgatcctgcgcgggtatctccccatgttttacgtcactcttttgcaacttatctgcttaatcatggggtggatttgcgggcggtgcaaaaaatgttgggccatgccgatatttctacaactgaaatttatacgcacataacttctgaaaagttgatggaagaagtgcggacgagacatcctctggcgcgaatcagcgctctccgcgagtcttga

SEQ ID NO: 1599 - DNA, 849 bp, unclassified Azospirillum
atgaaaaaaggtttatacattgtcgccacgccgatcggcaacctcggcgacatctccccccgggccgtcgaaacgctggcggctgctgacctgatagcctgcgaagatacgcgcataaccaaaaagcttttttctcttttgggcatcagcctcaaaaaaagattcgtcacccttcacgatcataatgagcacgaacacgcgcaaatcctgattgatgccgtcaatcgggagggcttggccgtcgctctggtcagcgatgccggttcgccgctgatctccgaccccggatacaagctgattcgcgcttgccgggaacaaggggtggaaatttttactcttcccggctgctgtgccctgatttgcgctttgcagctctccggactgccgaccaaccgctttatgtttgccggttttattcccaacaaagacaaagcccgggcagaaacctttgccgccctgaaagatttggacgccaccctggttttttatgaaacggcgccgcggattctcaaaacgctggccgctgcccgggagattttcggcagccgcgaaatggccgtcgtccgcgaaatcagcaaaatttatgaagaaaccgtttccggcacgcccgacaaaatcattcaggctttctcggccaaagaacccaaaggcgaaatggtgtttatggttgcgccgccctcagaaaccgctgccgcggaattggacatagattctctgctgcgggagaaattgtctcggcttccgctcaaaacggcggtcaaagaactggttgaacaatatggcctcaataaaaatgaaatttatgctctggcgttgaaaattaaagatgaacccaaccaattatcataa

SEQ ID NO: 1600 - DNA, 468 bp, unclassified Azospirillum
atgaaaaaaaatctggatggaatgtgggaattaatcagcacttggttttatgtgggaaagtcacgctatgctccgggaacagtcgggtcgctggccacactcccggtcgtgtattttctgaactcgcacctgggttcgggcagcgttgttgcctttgtcgttctggtttcgctgctaggtattgtcgcgtccgaaaaattttcggaaatcctgggagttaaggatcccggcatgattgttatcgatgaagttgccgggcagtcgctgactttggtcttcgccggcattaacctttatttatacctcatcggttttgctttgttccgcgttttggacattctcaagccctggccggtttcttgggcggatcaaaaagtccccggcggtttgggaattatgcttgacgatttgatcgccggctttatcggaatgattctcgtttttttgctcaaagtctacgctttttaa

SEQ ID NO: 1601 - DNA, 2298 bp, unclassified Firmicutes
tgccacaagaacatggcggtggtattcatcaaccgtattgaaaacggccagtcccaccaggagggactgtgtctcaagtgcgcccgtgagctgcacatcaagcccatcgacgatatcatttccaaaatgggcatcaacgacgaagatctcgacgggctttcctccgaaatgatggaggccatgcagaatctctccggcagcggggacgatcttatgaacattgaaaacgacgacgacagctcggacgacgacgggaagaccgcaacgttcccgttcctcaaccggcttttcggcgcgcagaacgccgccaacgccgaaaatcgcgacagcgctgccgagaccgagcgtccccgcgtcggcaaggacggcggcgagcgcaagcccaagcgcaagtttctcgataactactgcatctcgctcaccgaccgcgcccgcgcgggcaagctcgaccgtatgatcggccgcagcgaggagctcgagcgcgtcatccagatcctcaaccgccgccagaagaacaacccctgtctcatcggcgagccgggcgtcggcaagacggcgatcgccgagggtcttgcgcagcgcatcgcctccggcgacgtgccggcgaagctgcgcgacaagcaggtatttctgctcgatctcacctctctcgtcgcgggaacgcagttccgcggccagtttgagtcgcgcatgaagggtctcatcgaagagatccgccgcgagggaaacatcatccttgtcatcgacgaggtgcacaatctcgtcggcgcaggcgacgccgagggcagcatgaacgccgcaaacattctcaagcccgcgctctcccgcggcgagattcaggtcatcggcgcgacgacgttcaacgaataccgcaagcacattgaaaaggacgccgcgcttgagcgccgcttccagcccgtgaccgtcgccgagccctcgctcagcgacagcgtggagattctcaagggcatccgcaagtattacgaggacttccacggcgtgaagatctccgacgagatgtgccgcatggccgtgacgctctccgagcgctacatcaccgaccgtttcctccccgacaaggccatcgacctcatcgacgaggcgtgctcggacgtgaatctccacaacaaggacatcgagcgcagcgctgagatcaaaaaggaatgcgccgatctcgacaaggagcgtgagcttttgctcagcagcacggcgggcgacggcgactttgaaaagctcgccgagctgcgcagccgcgatcttcagctcaaggatgagctttctcagatcgaagccaagggcatgccggagctcaccgcggacaatcttgcgcacatcatcgagctctggacgaagatccccgcttcaaacattcgcgccgacgagtttgagcgtctctccggtcttgccggacggctcaaggcacatatcatcggccaggacgaagccgtgaacgccgtttgcgccgccatcaagcgcagccgcgcgggattacagtccaagcgcaagcccgtgagcttcatttttgtcggctccaccggcgtcggcaaaacggagctcgtcaagcggctcgccgccgatctcttcaactcccccgaatcgctcatccggctcgatatgtccgagtttatggaaaagttcagcgtttcgcgcatcatcggttcccctccgggctacgtcgggtatgacgaggccggacagctcaccgagaagatccgccgcaagccctacagcgtcgtgcttttcgacgagatcgaaaaagcgcacccggatgtgatgaacatcctgctccagatcctcgacgacggacgcatcaccgacgcgcagggccgcacggtcaattttgaaaacaccgtgatcgttatgaccacgaacgcgggcagcgacaagcgcaccggcagcgtcggcttcaatatgagcgccgacgagcagggcaaggaaaaggctgtcaaggctctcaacgacttcctccgccccgagtttatcaaccgcgtggacgagatcatttacttccaccgtctgacggaggaaaacatccgcgcgatcgcctcgcttatgcttgaggatctccgcaccgcgatggccgagcgcggcaccgccctcacctgggacgagagcgtcatcacctatcttgccgaaaagggctacagcgctgcctacggcgcgcgcaatctccagcgtctcatccagaaggacgtggaggacgccattgctaccgagatcatcgatcatctcaagggcgcggcaaaaaccgtcgggctcaccgtacaggatggaaagatcgtcgttctcgcgatgtaa

SEQ ID NO: 1602 - DNA, 1410 bp, unclassified Firmicutes
atgaagaaatttatcggaaacaaagacttttacaagctggtcgctgcgctcgcgctgccgctgctgctgcagaacgccgtatcgacgtttgtgaatctgctcgataaccttatggtcgggcggatcggcacggaatcgatgtcgggcgtgtccatcgtcaaccagcttctgttcgtatataacctatgtctcttcggcggcacgggcggcgcgggcattttcggcgcgcagtttttcggccgcggcgactataacggcgtccggcatacgctgcgcttcaatatcctgctctgcgccgggtttacagtgatcgccacggtgctgctcgcgctcatcccggatacgctcatcggtgcgttcctgcacgaggcgggcaccggcggcgatctcacgctcacgctttcggaaggcgaggactaccttcgcatcatgctcttcggtctgccggcgttctgccttacgacggcgtatgtgagcatactgcgcgtcaccggcgacaaccgcctgccgatgaaggcgagcatcgcggcgatcttcgtcaatctcgttttcaactatctgctcatctacggaaagctcggcttcccgatgctcggcgtccgcggcgcagccattgccacggtgctctcgcgctatgtggagttcggtctgatcctgctcggcacccacggaaagaaaacgccgccgcggtttatccgcgggctgtaccgcggctttgcgatccccggccatctcgccgggcagatcgtccgcaagggcatgccgcttctcgtgaacgagatgttctggtcgctcggcatgacgatgctcacgcagtgctactcctaccgcgggctggacgccattgctgcgctgaacatcaactccacggtgctcaatctcttcaataccgttatcttcacgatgggcaacaccgtcggcatcatcatcggcaacctgctcggtgcggaggagtatgaccgcgcgcggaattactgcccgaagctcgctgcgctcagctgcgcggccagcgcggcggtcggcgttgtgatgttcctcgtcgcgccgtatgccccgcggctttacaacacctcccacgagatcatgacgctcgccgcgtcgctcatgcgcatctgcgctctcatgctgccggtccacgccgtggtaaacgccgcgtactggaccatccgtgccggaggccggacgtacatcaccatgctttcggacagcgtgttcacctgggtcgtgtcggtatcgatcgcgtgggtgctcatccataaaacgggtctgccgctcgtggaggcgtacctctttgtgaatctcgccgaccttatcaaaatggtcatcggcatcgtgcttctccgccgcggcatctgggtgcgcaacatcgtcaccggcgaggagatcgcggccgggaatgctgcgggctga

SEQ ID NO: 1603 - DNA, 1416 bp, unclassified Firmicutes
atggcagatctgaaaagcgtagttgcggaaaagcttccgctgacgatgggcgagacgatcgccctcgcaaaagaatacggcgtgcgcgtggtggacgttgtcctcacggagagcgagctgcgcaccggtcttgaccgcgaaggcgtgctcaaggccgtcatggaagagtatgcgcacaacctcaaggctgtggagatcggcgtttccggcggaaacagcttcctgctcggcaccgttcccacccagctcaaggaaatgggccccggcaccatctttgcggatgtgctgcttgacaaggcactcatgtacaccgtggccgccgaagtcggcaaccactgcatcggcgtgcgtccgtgcgccggcacgggcgacccctgcccctacaccggcttcctgcgcgcgctgatggatgtcggcaccgacgagaccactctcgccgaggtcgcctgcctcatgctcaaggtcggcagcctgttccgcgtggcgaaggtcaccaccggctgcaatctggaaggctacggcgcgggctctgccgccatcgccgccgcgaccgttcatctgaagaacggcacgcccgagcagatggaaaaggccatggtcctcgccatgtccccgacgatcggcgttccctgcacgccgcgcgtgctcgttccggcgctctgcaccgcccatgtcggcggcgcgatcctcggcggcatgtacgccggccgtctctgcacgaccgtggagatgaccgtcaacgtcccgttcgacgttatgttcgctatggcgtccctcgttcacaaggagagcgcgcaccacatcgtgcccaccgtcgtggagtacatggagcccttcttccagcgcaccgctgaggtcgaatccctcgtttccgaggaagtccacaaggccgacaagaagcgtattgaagagacgctcgaaaaggccaaggagatcgccaagaagatggcggacggctccgcccccatcatcaagacgctcggcgacgccgttgtcggcggttcctctcaggctgtcggcagcccgacgaactgcggccgcatcgcccacgagcttctcaatgagggcgagaaggtcaccgagatcaccatcgaactgtatccggagctcttcgcccgccgcacgatcaacgtgcccggcgtgctcatgggcgcggtgtacggctgctccacctccgactataagacctatgaggtcgccgtggagcgcgtcaaggccgacggcgtcaaggtgaacatcgtccgcggtgaagagtaccagatccagaaggtcactctcgtcaccgataagggcaacagcgttatggtcgatacgctcaaccgcggcggcggccgtctcgtgctgcgcaacgccacgccctctctcgagaaggcgcaggaagccgcgaagaagctcggcatcgttgttgtcgagtaa

SEQ ID NO: 1604 - DNA, 1026 bp, unclassified Firmicutes
atgaacgttctcgttaccggcggcgccggatacatcggcagccacgcctgcgtggagcttctgaacgccggacattcggtcgttgtggtggacaatctcgtcaacgccaacgcggagtgcctgcggcgcgtcgagcgcatcaccggaaagacactcgaataccacgaaatggatcttttgaaccgcgcagctctcaatgagcttttcgatacgcaccggtttgactgcgtgctccactttgccggtctcaaggcggtaggggagtcggtgcagcagccgctgcggtattataacaacaatctcggcacgaccatccacctctgccagacgatggcggcgcacggcgtgaagaagatcctcttctcctcgtccgcgacggtgtattcgccggacaatacgatgcccgtggacgagagcgcccgcaccggcggctgcacgaatccctacggctggacgaagtacatgagcgagcagatcctctccgatacggcaaaggccgacggcgaatggaccgttatgctgctgcggtacttcaaccccgtcggcgcgcatccgagcggactcatcggcgaggacccgcgcggcatcccgaacaatctgatgccgtatatcgcccagaccgccgccggacggcgcgagtatctgagcgtattcggcaacgactatcccacaccggacggcacgggcgtgcgcgactatctgcacgtcgtcgatctcgcgcgcggccatgtcgcggcgatggactatatggcggagcggaagggtgttttcgtgttcaatctcggcaccggccacggctacagcgtgctcgacatggtgcatgcctttgaaaaggcgacggggaagaaggtcccctacaagatcgccccgcgccgcgccggagacgtcgccgaggtgtactgcgacccgggcaaggccgagcgggagcttggctggaaggcggaacactctctcgaggatatgtgccgcgacagctggaactggcagagcaaaaatccgaacgggtttgcggcagacggagagtaa

SEQ ID NO: 1605 - DNA, 2334 bp, unclassified Firmicutes
atgaaaagaaccgcaaagatgctcaccgcggcgctgctcgcgctggcgctcgcgctgcccggcaccgccgccgcggcggacgatacgccggcggtgcgcatctccgaaatgatgtataaaaaccacgcgacactccaggacgccgacggcgatttttccgactggttcgagctggagaatacgtcgaaccgcgtcgtgcgcctcaaggggtggagcgtgtcggacggaaagaccgtctgggattttcccgcggacgcgacgataccgcgcggtggggtgcgcgtcgttttcgcctcacgcaaggataagaccgcggcgggcgaaagccacacgtcgttcgcgctcggcgagggggagacgctgtatctcatcgcgccgggcgggacgatcgccgaccgcgccgcgtgcgatcccgagctgcccgccgaccatgtgctgcggcgcgaaaacggcggcgagctcaccgaaagcgtctgggcgacgccgggatacccgaacaccgccgcggggtacgcggcgttctgcgagagccgcaaaacggaaagcccgctcgtgatctatgaggcggcggtctataacgacacgttcgctctcaagggcgagtattacgactgggtcgagataaagaacgtatcgaaagagagcgtgaagctctccgactactgcctttcggacgaccggcgggagctggaaaaatggtcgcttcccaaccggacactcgcgaaaggacagtcgatcctcatctactgcaccggcgaggagaacccgacgaccggcaacggcctgcgggcgaatttcgcgctcaacgcttcgagtgaaacgctctatctcacgaagaagggcgagagcgcggcggcggacttcgtctggctgcacgatatcccctacgggtacagcatgggccgcacggacgccgaaaacggctttttctatctccgcaggcagacgccgaacaagccgaacgagaccgacgcttaccggtatatctccgaagcccccacggcgaaccgcgaatcgggggtcttcgaagcggggcagaccgtgcgcgtgaagctcgccgcggcaggcgatatttactatacgaccgacggctccgcccccacggaggagagcacgccgtacaccggcgcgatcaccgtggacaaaacgaccgtccttcgcgccgctgccgtggaggagggcggcgcgccgtcgcgcgcgctcacgctcagcttcttcatcggcgaggagcacacgctgccggtgctcagtcttgtgaccgactcaccccgacggttttccgaaacatataacggcgccgtaaagtaccgcgaatgcgcggcgaatctctcgcttctcgccccggaaggcggtttttccatcgactgcggcgtggagctcaaggggcgcaccagtcttttcaacccgaaaaagagcctcggcgtttcgttccgcggctgctacggcgcggagacgctccgatacgacatcttcggtaaaggcccggcggagttcaccgagctttccatccgcgccgggcaggactatatctccacggtgttccgcaacgagctcatgcaggagctgtgtgccgagctcgatacgaccgtgacgcagcgcagccgctactgcgtgctgtacatcaacggcgaatactggggcatctactgtctcaaggacgatatcacgcggcagttttatgccaatctcaccggcacggcgaaggaagatgtgacgatgctgccctcgccggtgtcgcagagcacggcggtatataccgaggcgctcggactctggcaggacacctcgctcacacgccgggaagcctatgagcgcttctgcgaggccatggatatggacggcttcatcgactgggtgctgctcgagggctactgtgcaaacgtagacatcaagagcaatctccgttatttccgcaccggcgacgagccgtggcagatcgccttctacgatctcgactgggcgttccagacgaggagcaactgctttttcaatctcatcggctcggagcagaccgcgcagatcgccccgacgatccgctggctcttcggcatcgacgactttaaggagcggcttctcacgcggtacgccgagctgacggaaacgacgctctcggacgagcacgtcacggagaagatcgacggattccgcgcgctgctcgcgccggagatcgcgcgggagcgtgcgcactggggcggcagcgaggaaggctggaacgaacaggtggacgcgctgcgcgcgaacattgccgacgactacgccgcccacaccgtccggaacctctgcgacgctctcggcgtgggcgaggaggaacgcatggagtatttcggcttctga

SEQ ID NO: 1606 - DNA, 2271 bp, unclassified Firmicutes
ttggatttgaaaaccgatgcgttggtcgaaagactcgtcaacagctatggcagctgggtgcagaaggactgcgaaaataccgaaggcggtaccggacgctataccagggagctctggccgtatgacacgatgttctcccccatccaggtcaaccgtctgacgatcaagaatcgtcttgtgatggcgccgatgggcaactgccagatggcggaagagaccggccgcccgaacgacaaaatgcgcgagtacttttttgcccgcgccgaaggcggcgtcggccttctcaccacgggcctcatccccatcagccaccacatcgactcatccgtgacggaaaagggcaacttctcctacttcccccgcatcgacaacacccgcaccaacttcatgggctggcgcgatctggcgcagggcgtccacgcgcgcaacagccgcattttcatccagctcaccgccggtctcggccgtgtcggcaacccgcagtgcctcatgacgaagtacgcgctgcccgtgtccgcctcctggaatccgaacttctatattccgagcattccctgccgtccccttaccgaccttgagctggaccagatcgtccgcaactttggtcagggcgcagcagacgccaagacgatgggcatcgacggcgtgtatctgcacggccacgagggctatctcatcgatcagctcaccaacaccgcgttcaaccaccgcaagctcggcaaatataccgactggcagctcttcggtatcaacatcgtcaaggagatgcgcaagcgtaccggtccgtggttcccgatcatgtaccgcatcgatctgagctgcgctctcgaagagacctacggcgagcgcatggacaccgtttcctccctcaagggcttcaagaacggccgttccatttatgaaacgctcgactatatggaaaatctcgtcaaggcgggcgtcgatatgttcgacgtggacctcggctgctacgacaactggtggctcccgcatccgcccgcgtacatgcccgccggctgcttccttgacgtggcgaaggtcgccaaggaatacttcaaggagcgcggcgtgaagtccaacgccggatttgaggttcccatcgtcgctgtcggcaagctcaactatcccgatatggacgagaaagccctgcgtgacggcaagtgcgacatgatcatgctcggccgcccggtgctcgccgatcccgactggtgcaggaaagcctatgcgggcgacgtggaccagatccgtccgtgcatcggctgtcaggaagcctgcgtcaacgagttcgtcgagggaggtcacccgcagtgcgccgtcaacccgcgcaccggccatgaggacgtgctgcccaagcagtccgcgcccgctgtaacggcgaagaagatcggcgtcgtcggcggcggccccgccggcatgaactttgccatctacgccgcgcagcgcggccacaccgtcgagatccttgagaaaacgagcgagctcggcggcattgcgaacgccgccgccgttcccaaaaataagtacgacatgcacaactatgtcgaatggctcaagcgccagacgctcgggcagaagggcgttgcggtgaagttcggcgtagaggccacgccggaatatctcaaggcgcagaactacgacgccgtgatctatgccgtcggcgccaagcgcatcagcccgcgcattcccggcatcgacaccgtgaacatggtcgaagcgaccgagcttctgcgcaatcccgaaaagctcggcggcgcgaagaaggtcgttgtcctcggcggcggcgcggtcggcatggagaccgcctactggctgagctacgagcacggctgcaggatcaccgtgatcgacatgctcggcaacttcatggacggcgcctgcaccgccaaccgcggccacatcatccactatcttgaggataacggcgcgaagctcgtcaactgcgcgacgatcaagtcgtttgagccgggcagggtgctcgtcagccgcaacatctccaagggcgcgccggacgtttactgcacctggacgccggttctgccgaagaacgtcgtcaacccgcttgcgccgaagatgggtcccgaaacggtcgtcgaagagcaccacgcggagctgttcgtcaacgcgctcggccgccgcgccgacgagagccagtatctcgagggcgtgaagcagcatgtcgccaaggagatctacaacatcggcgattccttccaggctggcctcgtctggggcgctaccaaagctgcctacaacctcgcgcagtacatctga

SEQ ID NO: 1607 - DNA, 2091 bp, unclassified Firmicutes
atgcagaaaatggtaaaacccatccggctcgttgtgctcgccgtcgtctttgtgctgctgctcggcgtttacttcgtcgcgctttataagctgcagatcatcggcgggcgcgaatactacgccgtaggggaaacggagacgaaagaagacatcaccatcgccgcggcgcgagggaacattctcgaccgctacgggcgtctgctcgtgtccaactcgctctgcaacaacctgtctatcaacgtaacggagctcttcagccaggacgacccgaacgcggtcattctcgagctgtgcagcgccgtggagcgcttcggcgacacctataccgacacgctgcccatcacgaaggccccgccctttgagttcaccgagatggacacgctgcagaagagcatgctcgacgcctggctcaaggcgaacgacatgccgctcgactccagcgccgtggagatcctcgcggcgatgcgcacgcgctacagcgtcggcagcgagtataacgccgaggacgcccggcgcatcgtcggcgtccggtacgagatcaacgaccgcttcaacatcaacaccacgccctacgttttcgccgaggacgtttcgatgccgctgctcacctatctcatggagcaggacatccccggctttgagctctcctcctcctatgtgcgcgaatacaaaacgcagtacgccgcccacctgctcggctacaccggcaagctgacggcggaggaatgggcgacctacgccggcaaggactactcgctcgacgcctatgtcggcaaggacggcgtggaatacgcctttgaggattatctccacggcgtggatggcgaggcggaggtctactccaatctcgacggcgtcacgctccgcaccaagtacaccaaggagccgcagcccggcgggcatgtctatctgacgctggacatcggcctgcaggaggtgtgcgaggaggcgctcgccgcgcacatcgagtcgatcaacgaagatcgcgcccgcatcattgcggaagccgaaatgtacggcaccgagagcaccgaaatgatctccggcggcgcgctgtgcgtcgtcaaggtcgataccggcgagccgctcgcgctcgtgagctatccgacctacgacgccgccacgatgctggataattacgaaacgctcgtcgcggacgagaacgccccgctctataaccgcgcgctcatgggcgtttacgcccccggctccacgttcaagccctgcaccgctacggcgctgctcgccgagggcatcatttccccgacgcgcacgctgaagaccgaaggtcagttcaccaagtacatcgacgacggctacgcccccgagtgctggatctactcgacctacaaatacacccacggcgagatcaacgtcgtgcaggcgatcacctactcctgcaactacttcttctactatttcggcgacgagctcggcatcgacaagatggcgtactacgccaagctctacggtctcggcgagcacaccggcatcgagctgcccgaggtcaccggccagatgtccacccagagcttcaaggaacagtacaccggtatctcctggttccagggcgatacgctgcagagcgccatcggccagtcgttcaccgaattcacgccgctgcagatggcggagtattgcgcagccatcgccaacggcggcacgcgccacagcgcctccattctcaaggaagtgcgcagctacgattactccaaaacgctcttccagcgtgaaacggaagtgctcagcaagctcgatatcgatcccgagatcttcggctacatccagtacggcatgtacggcgtgctctatgacgccgcgagcacgctcaaggagcattggctcgacagcagcatcgtcgccgccgccaagaccggtacggcgcagcgcggcgaaggtctcgtcaacaacgccatgttcattctctatgccccctatggcgataaccccgagatcgccatcgcgatcgctgtggaaaaaggcggcgcgggcgccacgctctcgccggtcgcgcgaaagatcgtggattattacttcacgttccagtccagcgccaacactgtggaaaatgcgtattctctgctgaaataa

SEQ ID NO: 1608 - DNA, 1731 bp, unclassified Firmicutes
atgggagctttttctgttgcacagcggcagatcggcggttataatgaaagtcgcaaaaagcataacatgcaacagtatatatatacggaggttgacgcgatcatgtacgataacggcaaaatctatctcggtctctccggcgaggagcgggtggagcttcccctctccatgtgcaaccggcacggcctgatcgccggtgcgaccggcaccggcaagaccgttacgatgaaggtgctggcggaatccctctccgatgcgggcgtgcccgtcttcctgtgcgacgtgaagggcgacgtcgccggtatctgcgcccccggcgcggacagcgaggatatgcagaagcgtatcgagcgctttgccctcaccggcaaatttgcctaccgcggctaccccaccacgttctgggacatttaccagaccggcggccatgccgtgcgcgccaccgtgagcgaaatggggcccgagctgctctcccgcattctctgcctgagcgaggcgcagacgggcgttctgcagatcgttttccgcgttgcggacgaccgcggactgctgctcgacgatctcaaggacctgcgtgcactgctgaactatgtgaacgaccataaagaagattaccgcatgaagtacggcaacatcaccacgcagtccgttgcggcggtcctccgcgcgctgctgccgctggagaaagagggcggcgagctgttcttcggcgagccggcgctcgacgtgaaagactggatccgcaccgacgccgagggacgcggcatggtcaacgtgctcgactgcgtcaagctcgtgcagaacccgacgctgtacgcgagcttccttctctggctgctctcggagctgttcgagaccatgccggaggtcggcgatcttgaaaagccgaagctcgtgttcttcttcgatgaggcgcatatgctcttccgcgacgccccggcggtgctcgtgcagaagatcgagcagaccgtgaagctgatccgctcgcgcggtatcggcgtgttcttcgtgacgcagagcccggcggacgtgccgaacaccgtgctcgcgcagctttccaaccgcgtgcagcacgcgctgcgcgcctatacgcccaccgagctgaaagcggtgcgcgtggcggcgcaggcgttccgcgaaaacccggcgttcaacgccgaggacgcgatcatggagctcggcgtcggcgaggcgctcacgtcgttcctcggcgaggacggcatccccgccatggtgcagcgcacgaagatcatctgcccgcagagcctgatgggtgcgccggaggcgatgacgcgcgccaaggcgatcctccgcgacggcatggaaaagtacgacgaggcggaggacaatgtctctgcttatgaggtgctcgccgacgaatcgcaggccgcggaggaggcgctcgcgcaggagcgggagcggctggaagaggaaaagcgcgccgccgaagaggaaaagcagcgccggaagcaggcggaggcagacgaaaagcgcgcgcagaagctcgaagacgaagcgcgccgccgcgcgcagaagctcgaggatgaggagcgccgccgcgcccagaagctcgaggacgaggcccgccgcaaggccgagcgcgaaaaggagaaaaaggaagcggaggaaaagcgcaaagccgaacgcatccgctccaagatcgaaacgcagctcatctccgccggcggccagatgctcaagcgcggtctgctcggtatcctgaaaaagtaa

SEQ ID NO: 1609 - DNA, 1197 bp, unclassified Firmicutes
atgccccggacgccttttgctttatccgggctgcagcgggcggaaaggagaatttttatgtacatcaagccgtttgccgtagaggaatggatgaacgaatgggaggtcggcgcgcgatacaacatcgcggagacgtgcgtcgattccgtgtcgctcaacgagctgttcgcgctgaccggcgaggacaaggccgcctttctggagaatctcgccgcgcgccggctgacctacggcgacattgaaggcgcgcccgcgttccggcagggcatctgctcgctttataaaacggtcaagcccgaaaacatcgtcacaacgcacggcgcggcgggcgcgaaccaccatgtgttctgctcgctcgtatcgccgggtgaccgcgtcatcagcgttctgccgacgtaccagcagctctactccatccccgaatcgctcggcgcaaaggtaaagattctccccctgagccgcgaaaacgggtatctccccgatcttgacgcgctgcgcgcgctcgccgtgccggggacaaaaatgatctgcatcaacaaccccaacaatccgaccggcgcgctcatgagccgcgatatgctcgaagagatcgtgcagatcgcgcgcgaggcgggcgcgtacattctctgcgacgaggtataccgccatctctcccagaccgacgagtggagcgagtccattgcggatctttacgaaaagggcatctccgtgagcagcatgtcgaaggtcttctctcttgccgggctgcggctcggctggatcgccacgcgcgacaaggacgcgctccgcgcgctcgtctctcaccgtgattacgatctcatcagcggcggcatgatcgacgaggccattgccgcgctcgcgctcaagcacagcgataaaatgctcgcgcgcagccgcgccatcgtgcgggaaaatctcgccattctggacaattgggtcgccggagaaaagcacgcgagctacgtcaagcccctcggcggcacgacggcgctcgtctactacgatttcgacattccctcctatgagctgtgcgaggagatgtaccataagaccggtgcgttcgtcacgccgggcgactgctttgagcagccgaagagcatgcgcatcggctacgcctacggcaaggaagcgctcgtgaaagggctgaaggccgtgagcgagtactttgcgtggaaggaaaaggagctggaaaaatga

SEQ ID NO: 1610 - DNA, 1830 bp, unclassified Firmicutes
atgtgtggaattgtaggatttaccggctcgcaggcggcggctccgctgcttctggacgggctgcgcaagctggaataccgcgggtatgacagcgccggcatcgccgtgcagaaggacggcgcgctgcatatgatcaaggcgtccggccatatcgacgcgcttgcggagaaaacacaaaacggcacgctgctgcccggcacttccggcatcggccacacccgctgggcgacgcacggcgcgcccaccgacacgaacgcgcacccgcatatgtccgccgacggcaaatttgccatcgtccacaacggcattatcgaaaactacgcagcgctgcgcgacgagcttaaaagcaagggcttcgtattccggagcgagaccgacacggaagtcatcgtgcatctgctcgacatgtactataccggcgatctcaaggccgccgtgctgcacaccgccgcgcggctcgagggctcctatgcgctcggcgttctctgcgccgaccagccggggacgatctgcgccgtgaaaatggcctcgccgctcattctcggcgtgggcgtcggcgaaaatttctttgcctccgacgtgaccgcgctcgtgagccacaccaaaaacgtgatctatctggaggacggcgagtttgctgagataacgcccaactccatttccatttatgacagcaccggcgcgacggtgcaccgcagcatttcccgcatcgtctgggatatcgaagccgcggaaaagggcggctacgagcactttatgctcaaggagatcatggagcagccccgcgcgctcaaggcgaccatcgccccgcgcatcaagaacgggaagatcgtcctcgacgattttgacgaggcgttccgcgccgacttccggtacatcaaccgcatcgtcatcaccgcgtgcggcagcgcatatcacgccgggtgcgtcgggcggtacatgatcgaatcgctctgccgcgtgccggtggaggtcgatgtggcgagcgagctgcgttaccgccacccgatcgtggatgagcacacgctgctcattgccgtttcccagtccggcgagactgccgacaccatcgccgccatccgcgaatgcaaggcgcacggcgcgcgcgtgctcacaatcgtcaacgtcgtcggcagcaccgtggcaaagctcggcgattatgtcatgtacacctgggccggcccggagatcgccgttgccaccacgaagggctacaccacgcagatcgccgtgctcgatctgctcgccgtatggatggccaacgagcgccggacgctcaccgcgccgcggtacgccgagctcgtcgccggcattgcggacctgcccgagcgcacgcagcgcagcattgacctgaacccgcaggtcagctatcttgccgagcgctactgcggcaacagctcgctcttcttcatcgggcgcaacatcgactacgccgtcgcgcttgaagcctcgctcaagctcaaggagatctcctacatccactccgaggcgtacgccgccggagagctcaagcacggcaccatcgcgctcatcgatccgggccgtctcgtcgtttcgctcgcgtgctacgaggaactgtttgacaagacgatgtccaatatcaaggaggtcaaggcgcgcggggccaaggtcctcgccgtggtgaacgagggcaaccgccgtgtgttcgccgaggcggacgacgtgctctttgtccccgtgaccgacccgctcttctccgccattccggagatccttcccctgcagcttttcgcctaccatgtcgcccggtgcaacgggtgcgacattgataagccccgcaatctcgccaaatccgtcaccgtggagtga

SEQ ID NO: 1611 - DNA, 1986 bp, unclassified Firmicutes
atgagattcgctcttgccggaaaccagaactgcggcaaaacgacgcttttcaatcagctcaccggaagcaatcagcacgtcggcaatttccccggcgtcacggtggacagcaaaagcggcagcatccgcaacacgaagggcgacgaggtcgtcgacctgccgggcatctattcgctgcggccctattccgccgaagagatcgtaacgcgcgatttcattcttgacggccggcccgacggcatcatcaacatcgtggacgccacgaacattgagcgaaacctttatcttacgctgcagatgatcgagatgcaggtgccgatggtgctcgcgctgaatatgatggacgaggtgcgcgccaacggcggaacggtcgatactgtgaagctctcggagctgctgggcatcccggtcgtgccgatcagcgcggcaaagggcgaaggcatcgccgatctgacggagctcgcctgccgcacggcagccacggggcgcaagccggaggtatacgacttctgcccgcccggaccggtccaccgctgcatccacgccgtgacgcacgtggtggaggatcacgccgagcgcgcccggatgagcgcccgctgggcggccatgaacgtgatcgaggggaatagcgatatcgtcgcgcgtctcgcgctcgacgagaacgagttggagctgtgtgagcacagcatcgtggaaatggagcgcgaaacggggctcgcccgcaatgccgccattgccgacatgcggtattccttcatcgaatcggtctgcgccgaaacggtgaaaaaacccgaggagagccgcgagcggaaacgttcgcgcgccatcgataacgtccttacccaccgcatattcgccctgccgatctttgtcggcattatgctgctggtcttttatctcacgtttgaagtgatcggcgcgtttttgtccgacctgcttgccatggggatcaacgcattggcaggagtgacagacgcggcgctcacggcttacggcatcaatccggtcgtacactcgctcgttatcgacgggctgtttggcggcgtcggcaatgtggtgagcttcctgcccatcattgtagtgctgttctttttcctctccatgctggaggacaccgggtatatggcgcgcgtcgcgttcgtgatggacaagctcctgcgccgcatcggtctttccggaaaaagcgttgtgccgatgctcatcggctttggctgcaccgttccggcggtcatggcaacgcggacgctcacgagcgagcgtgaccgccgcatgaccgtgcttctcacgccgtttatgagctgcagcgccaagatccccatctattccgtgttcgtcgcggcgtttttcccgaagtataaggcgctcgccatgggcggactgtacgttttcggcatccttatcggcgttctggcggcgctcgtgttcggaaaaacgctctttcgcggcaaccccatcccgtttgtgatggagctgccgaactaccgcatgccctcggtgcgcacaacgctccagctcatgtgggacaaggcgaaggactttctccatcgcgcctttaccgtcattttcgtggcaagccttgtgatctggtttttgcagacgttcgacacgcgcatcaaccccgtttcggacaattcgcagagccttctcgccgcgctcggcggacttctcgcgccgctcttcgcgccgctcggttttgcggactggcgcgtatgcacctcgctcatcgcgggctttatggcaaaggaagccgttgtcagcacgctcggcgtgctcaccggcggcgcggcgctctccacgcttttctccgtgcgcagcgcggcggcgtttcttgtgttcacgctgctctatacgccctgcgtggcggcggtcgcggcgatccggcgggagcttgactcggtgtggaaaacgttcggcgtcgtggtgtttcagtgcctgctcgcctggggactcggcgcggcggtctaccagatcgcactgcttatttga

SEQ ID NO: 1612 - DNA, 3246 bp, unclassified Firmicutes
atgagcggagggaataccatgacaaacgcaaaagaaaaaaagaagatcgtcctctggctgatcgtactggcaatactcgccgcggcggcattcacggtcacggccattgtgcgccataaccagcgcccggcatgggacggcggctacagcgtccacatcagcgaggtcatgaccgataataagacctgcccgaacggcgagggtgtcctctgcgactggatcgagatcgaaaacacgtcctcgaaggacttctccatcggcggatactatctctccgacgagacgggcaaaggcaaatactgcttcccggcggggacggtcgtcccggcgcggggatatctcgtcgtgtggtgctcgccggacgaggagggcgactatgcgccctttgccctgcgcaaggcgggcggggagacggtgtgccttatgaacgaaaaccgcacggtgctcgacagcgccgtgaccgctgcgtgccggagcgggcagtcgcttgtccgcggcagcgacggcgcgctcattcccgctgatacgccgacgcccggctacccgaacagcgaggcgggcgcaaaggcgtggcaggaggcgctcgcgcagcgcagcggcggcacgcttgagctcagcgagatacagtcctcaaacacgctctatgccgcgcccgacgggaatttctacgactggatcgaggtacataacccctcggattcgccggtatctctctccggctacaagctctcggaccgcacgaacaaaacgaagtacgccttcccggacgaaatgctcggcgcgggcgaatataagatcatatggtgcgcccccggtgtggagggcgcggaatatgcgtcctttgcgctggcgagcgcgggcggggaaacggtcgtgctcacagcgccctccggcgcggagagcgagagcgtggaactgccgatgctggagaagaacacggcctatgccaaggaaaacggtgaatggacggtgtctcaccgcccgacgccgggatattccaacgacgacgcggggtatgaggcgtggctgcgttccggcggctacgaaaacgacgaagtttacatcaccgaggtcatggcgcaaaaccgcggtacgctcgccgacagcgacggcgacctctccgactggatcgagatcgcaaacctcggcgagacgagcgttgatcttgcgggctggtatctctcggacgatccggacgtgccggacgaatggaagatcccgtcgctgacgcttgcgccgggcgagtatgcggtgatcttcgcctccggcaagaaccgcaccgagggtgagcttcacacgagcttctcgctcaccgacagcgacacggtcattctctccgccggaaacggcgcggagatccgcagcgtgaagatcgaggccgtgccggagggctcttcgctcgcgatgcagccggacggcagcttcgccgtgaccgacttcccgacgccggggcttgaaaataccgccgatggctacgccgacttctgcgatgccgacacgcgcacatcgccgcttctgctgtgggagatcgtcgtgtacgaggcgggttcgcccgactgggtggagctcaaaaacgtgtcgggcgagtcgatcgatctttccggatacacgatctcggataaattcaaggaaccggcactcgacgccctgcccgccgtgacgcttgcgcccggcgaaagctatgtgttcgagtgcgaaaacgtggggctgagcgcgcagtgcgacgagctctatctcttcgatgcttccggcacgctctgcgactgggcgttcctgcgcgatatcccggccggcggcagctacggccgtctaaacggggagaacgggtatttctattttgcgcagagcagccgcggcgcggacaacggcacggggtgccgcatggtggcggcaaagcccacggtcgatatcgccgcgggcgtgtacgacgacgccgagagccttacgctgacgatcaccggcgagaacgtgcactatacgctcgacggcagcgacccgacggcggacgatccggcttataccgcgcccatcacgatcacggaaacgacgatcgtccgcgccgcgagcttcccggcggacgcgctgccgggcaaagcggcgacatggtcgtatttcctgcgcgagaacagcacactgcccgtcgtcagtctcgtgaccgacccggacaatctcaccggcgcgcagggcatttactccaaccacgaacgcgcgtggagcgagaagtgggagcgcgaggcgaccgttgccatgtacgaggacggcggcgagttctccattgactgcggcatccgcatgcacggccgcacgagccgccgtgtgagcgaaaagaaatcgttcacgctcaagttccgcggccggtacggcggggatctcaattacgacgtgttcggcgacggcgtcgtaacggacttttcctcgctgctgctgcgcgcgagcgtggaggatacctacacctcctacatgcgcgacgagttcttcgcccgcatcgctatggactatacggatgtgcccgtgcagaattaccggtatgtttcgctcttcctcaacggcgagtactggggcatttacgccatccgcgagcaccacagcgcggaatatttcgcctcgcacaagggcgtggacgccgacaccgtcgatatgcagacgggcgagtttgagggtcagaccgcgtggagcgagatcctgaactacgcgcgctacaactcgctgagcacgccggagggctgggcgtacatccaggagcatgtggacatcccggagatgattgactggctgattctcgagtgctggtcgggcgatatcgacgtatacgaaaacgtccgtttctacgcgagccccgagtacgaaaacgggaagtacatttacggtctcgcggacatggatctcacgatgatgggcatggactcgatgagcgtcggcttcaacaacttccagctccacggcatcattccctcggcgctgcgttacaatgaagagttccgcgacatgttcctgacgcgtctcggcgaaatgctgcgcgggccgctctcggacgagaacgcgcagaaaacgctcgatgagctgcgcgcgatcgtcgagccggagagtgcgcgcgatctcgcccgctggggcaagtcgtccacgttgtttgccacgcagatggcgaatctccgcggcttcgtctccggccgcgccgcgcggatgcagaacgaggccatcgccttcttcggcgtctccgccgaggatgccgccaaatacttcggataa

SEQ ID NO: 1613 - DNA, 1383 bp, unclassified Firmicutes
atggaggaaacaaacagcctggcccggtcccgacgcatgggcgaaatgccggagggaaagctgctgctgtcaatggcagtgcccatgatgctctcgatgctggtgcaggctctctataatattgtggacagcgtatatgtggcgaaggtgtcggaggactgcctttcggcgctctcactcgcgttcccggcgcagaacattctcatcggtcttgccaccggcacgggcgtcggcgtttcgacgatgctctcccgcgctctcggcagccgggacaataagctcgccaaccgcgtggcgggaaacagcctgttcctctgcgtgtgctgctggattattatggcgatcttcggtattttctttgccgacgccttcatccactcgcagacggatatcgagtccatccgcagctacggagattcgtatctgcgcatcgttacgatcggctccgtattcgtgtattttgagatcaactttgagcgccttctgcagtccacgggccagacgaagctctccatgtgggcgcagataatcggcgcggtggcaaacatcattcttgacccgttctttatctacggctggtgcggcctgcccgcgatgggcaccaccggcgccgccatcgccacggtcatcggccaggcgttcggcgcgctggcgggctttctgtttcacctcaaacataataaagaagtcaatatccgtctttccgactgccgcccggacgggcacatcatcctcgacatctatcgcatcggctttccgtccatcctcatggtcggtatcggttcccttacgaactatctcatgaaccgcatcctcatggcgttcacgtccacggcggtcgcgttgtacggcgcatacttcaagctgcagagcttcttcttcatgccggtgttcggactgaataacggcattgttcccatcgtcggctataactacggcgcgcggaaaaaagaacgcatttaccggacgatccgctacggcgtgctgtatgccgtgtgcatccttgctgtcggcctgctgctctttgaagcgattcccggcgtgctgctgcaggcgttctcgccgtcggagcacatgcttgccatcggcattcccgcgctgcgcaaaatcgccatccatttcccgatcgcggcgttctgcattgtgggcgggtcggtctgtcaggcgctcggcaagagtctctattcgttcttcacgtcggtgctgcgtcaggtcgtggcgctcatcccggcggcatatcttctgtcgctgacagggaacgtcggcaacgtatggtggtgcttcccgatcgcggaggtcgtatcggcgtgcgcaacggcgtttttcctgcgccgcgcgctgcgaaatatggaccgggagctgacgttcgcggaggggcaatga

SEQ ID NO: 1614 - DNA, 1503 bp, unclassified Firmicutes
caaaagacctttgggaggtttatccgtatggacaatacatggtttgagaaaatggaagagcgcatcccgcgcggcgaggtacgcacccgcttcgcgccgagccccacggggtatatgcacgtgggcaatctgcgcacggcgctctacacctggtgcatcgcccgccacgcgcacggcaagttcctgctccgcattgaggacaccgaccagtcccgccaggtagagggcgcggtcgaggtcatttataaaacgctgcgcgactgcggtcttgaccacgacgaaggccccgacgtcggcggtccggtcggcccgtatgtgcagaccgagcggcgcgacacctatcttccctacgccaagcgcctcgtggagcgcggccacgcctattactgcttctgcgacaagaccgaatccgaagaggactccggcgacttcactcgcaaggacgacccctgccgcgatctttccgcggaagaggtgcagcgccgtcttgacgccggtatgccgtgggtcatccgccagaagatcccccacgagggcgaaacgacgttccacgacgagatcttcggcgacatcaccgcgccgaacgccgatctcgacgatcaggtgctcatcaagcgcgacgggctcccgacctacaacttcgcaaacgtcattgacgatcatctcatgggcatcacccacgtcgtgcgcggcagcgagtatctctccagcgcgccgaagtacaaccttctgtacgaggggctcggctgggacgtgccgagctacgtccactgctcgcccgtcatgcgcgacgcgcacaacaaaatgtccaagcgccacggcgacccctcgtacgaggatcttgtcgcgcagggcttcctcaccgaggcgatcgtgaactacgtcgcgctcctcggctgggcgcccggcggcgagcgggagatcttttcgatcaacgagctcgcggaggcgttcgatatgtcccgcatctcgaagtccccggccattttcgatatcgaaaagctcacgtacttcaacagcgagtacatcaaggccatgtcccccgaggcgtttgcccgcgccgccgagccgtggatccgcaaggccgtcaagaccgaaagctgcgatcccgccctcatcgccgccattttgcagcagcgcaccgaaaagctctcggacattcccgaaaagctcggcttcttcgatacgctgcccgagtacgacaccgcgctttacgtccacaagaagtccaagtgcgacgagactgtcgcgctcgatatgctcaaaaagatgcgcccgcgtctcgcggccatcaccgactggacggaggaggccgtgcacgactgtctgatcggcgcggcggcggaattcggctgcaagaacgctctcgtcatgtggccggtgcgcatcgccgtttccggcgaggccgtgacgcccggcggcgccgtggagatctgccatatcctcggccggaccgaaacgctcgcgcgcatcgacaagggcatcgagaaactggaaaaatga

SEQ ID NO: 1615 - DNA, 1251 bp, unclassified Firmicutes
aattttatggaagaaagacgggaaacgaatccccgcgtaaacttccttatcaacattgcgtactgggcggtgatcgttgcgatcatcttcctggtgttcaagtacctcatcaacataatgatgccgatcttcctcgcgttcattttcgcggcggtcgtgcgtccgatctcccgcgcgctgagccgggaaacgcgctatgtccgcggcaaggacgggaacaaggtcctcgtgaagcggaaattccatatgaaccgcaatgtggccggcatcatcagcgtgcttgttctgttcatcgtcgtcggcggccttctgacgctcatcgtcgtccgcctgaccgatacgatcgtggatttcgtgtcgttcgcgccgacgttttatgaacagagcgtcctccccggcatcacaaagctctataactgggtgctggaggtaggcgaacggttcgatgtgtccatcatggacgctattgagcaggccctgcccggcatgatctccaatcttggcagcgcggtcaccaacctctccggcaagatcgtcagcggcgtcaccggcattgcgagccgcctgccgagcatattgctcaacagcatcatctgcctgatcgccacggtctttatttccgtggactttgaccgcatcaggctcttcattcggaaaaacctgcccgaaaaaccgctgcgcgttgctgtgaatgtcaagaactcgttccttgagatgatctggcagttcatcaagtcctatgctatcatcttctgcatcaccgtggcggagatcaccgtcggccttctgatcgtcggcgtggggaacccgctgcttttcggtatcctcatcggcatttttgatgcgctgcccatcgtcggcagcggcatgatccttcttccgtggtcgatcatcacgcttctcaccggcaacacgatgcgcggtctcggcatcctcatcatctatgccgtcgttgtaatcgcgcgccagatcattgagccgaagatcgtcggcaagcacgtcggtctgcgcccgatcgtaacgctcacgtgcatgtacgccggttccaagctcttcggcggtcttatcggtctttttggtctgccgatcaccgccgccattatcatggatctcaactcgagcggtattttccatatcttcaactccgtgggggatgacctgaacgacggggacgaaacgggagccggcgaagcggaaacaggcgaagccgggacgaacgaatccggaacggacggagagaaaaacgcatga

SEQ ID NO: 1616 - DNA, 2781 bp, unclassified Firmicutes
atggataagcagaccaagtccggaatgcctgtggacgaaagcaagtattcctttacgatcccccgcacggacgagccgagagagaagatcctcaagctcggcgcgatgatcaccgaccgcatcggcaaggtcacgggcaacgatcccgagtattggggactcgcgggcgttgttacggacgaaatggcagatgtcgcgctcaagatgaaggtgcgcaagccgaaaacgaccgcgcagatcgccgcgctcaccggcaaaagcgaggaagagctcgaaaagctgctcaccgagatggcgtacatcggccttgtcgagtacaactgggaaaatctggacgggaaaaacccgaaccacgagaagcgctggacgctgccgcagttcgttccgggcagcgcggagttcgtcaacatgcgccagtcgcagatcgacgagcacccggaggtcgcggcgttctttgagcgcatgacgttcctcccgctggagaaggtcacgccgatggtgcctcccggaggcgccggcatcggcatgcacgttatccccgtggaaaaggcgatcgagaccgagaacaagtccgtctccatcgagcacatctcccactggctgaaaaagtacgacggtgtttacgccgcttcgccctgctcctgccgtatgtcccgcgccaagctcggcgagggctgcggcgacgatccgcaggactggtgcatcgccgtgggcgatatggcgcgctacgtcgtcgagaccgaccgcggccattacatcacctatgacgaggtgctcgagatcctgcacaaggccgaggagaacggctttgtccatgagatcacgaacatcgacggcgaagagaagatcatcgccatctgcaactgcaacgtgaacgtctgcaacgcgctgcgcacgagccagcttttcaacacgccgaacctctcccgcagcgcctacgttgcgaaggtcgagagcgaaaactgcgttgcgtgcggccgctgtgttgagacgtgtcccgcgggcgcggtgaagctcggccagaagctctgcacgaaggacggccccatcgagtacccgcgccacgagctgccggacgagacagcctggggcccggataagtgggacgtcaactaccgcgacaacaaccgcatcaactgctacgataccggtacatccccgtgcaagacggcgtgcccggcgcacatcgccgtgcagggctatctgaagctcgccgcgcagggcaagtaccgcgaggcgctccagctcatcaagcgcgaaaacccgttccccgccgtatgcgggcgcatctgcaaccgccgctgcgaggacgcctgcacccgcggcaccgtcgaccaggccgtcgccatcgacgaggtcaagcgcttcattgcccagcaggatctcgaagccgccacgcgcttcatccccgaaaaggtcatcccgaaggtcgagggcggattcgatgagaagatcgccatcatcggcgcggggccggcgggcatgtcctgcgcgtacttcctcgccgagaagggctaccgcccgaccgtgttcgacaaatctccccgtcccggcggcatgctgatgaacgccattccgaacttccgtctcgaaaaggacgttgtggaggccgagatcgacattctgcgcgagatgggcgtggaattccgctgcggcgtggatgtcggcagggacgttaccatccccgagctgcgcgcgcagggctacaaggggttctatgttgccgtcggtctgcaggacggcggacgtctccgcgttcccggcgacggcgccgagggcgttatgtccggcgtggactttacaaagaaggtcaatcttgcacccgaaacgaagctcaccggcaaggtcgttgtgatcggcggcggcaacatcgcctccgatgtcgcccgcaccgccgttcgctgcggtgcggagagcgtgacgctctattgcctggaggggtacgacgaaatgcccatgggcgaagaggaccgcaccgagtgcgagcgcgacggcatctccatccatgccggctggggccagaccgcgatcgacaccgagaacggccatgccagggccattcgcttccgcaagtgcctgtccgtcaaaaatgccgagggccgcttcgcccccgcgtttgacgacgcccggaccgagactgccgaggcggacacgatcctttactgcatcggccagcacgccgactggggcgagctgctcgccggaacgaaggtcgaattcaaccccaacggcaccgtcaaggccgacccgctgacctaccagactgccgagcctgacatcttcgtcggcggcgacgcctacaccggccagaagttcgccattgacgccattgccgccggcaaggagggcgccgtgtccctgcaccgcttcgtgcagccgaacacgagccttaccatcggccgcaaccgccggcagttcatcgagctcgataagaaaaacgttcttctcgatatcaacagctttgacaacacgccgcgccagcgtcccggctacaacgaggagctgcgccgcacgatgcaggacggccgcgtgtgcttcaccgaggagcaggtcaaggccgagaccgcccgctgcctcggctgcggcgcgagcatcgtcgatccgaacaagtgcatcggctgcggcatctgcacgacgcgctgcggctttgacgccatccgtctccaccgcgagcgtcccgagtgcagcaccatggtgcgcagcgaggacaagatgaaggccatcctgccgtatatgctcaagcgcgccgtgaagatcaagctcaagggcaaaaagggctga

SEQ ID NO: 1617 - DNA, 1506 bp, unclassified Firmicutes
atgaagaagctgctcgctgaccttttcaaaaaaaaagaaaaaagccgccacgccgcagccgccaagaaaccggtgcgcctgccgcgcctgcgcgatatccatttccgctccatccgcgcccgcggtatgttcgtcggaagcggtcttgtgctgctggcgatcgttatttcgctcgcagcgtatacgctctcgctgcaggcgtattactattccgccacgcgcgcctcgctgcaggcaaaggcggagaccgcttcggcgttcctttcgtcctatgtggaccgcacctacgcggagttttatcagcgcgccttcaactatgccgagaattttgacgacaaggattcgctcgaattgcagttcgtcaacaccgagggacgcgtagagatcgcctccaccggcatttccgccggttcgatccccggctcggatgatatcaaaaacgcgctcgactccggcaggatcagcttctggcagggcaagcgcgcctccacgggggaaaaggttctcgccgtatccgcgccgctcgtttccggcagcgggagcgtcgtcggcgtgatgcggtatatcacgagtctcaagctcatcgaccgcgcggtgaacacctcctcgctcgtcgcgggcggcatcgggctcgtggtgctcgcgatcgttgtattctcgaacctttactttctgcgcacgatcaccgagccgatcgcttcgctcacgggcgttgcccgccgcatcgccgaaggaagctacggcgcgcaggtggaaaaaacgcacgacgacgagatcggagagctgaccgacgcgatcaacgatatgtcgcagaagctctcgcaggcagaacgtgtgcagacggagttcatctcctccgtttcccacgagctgcgcacgccgctcaccgccatcaccggctgggcggaaacgctcgcctacgacgaggccatccggggcgactcgcgccgcggcatcgagatcatcacccgcgaagcgggacgccttaccaaaatggtcgaggagctgctcgaattcacgcgcattcaggacggccggtttacgctgcacgtttccacggtggagctgccggcgctggtcgaggattgcctttatacctataatgaacttttccgccacgaagatctcgccgtgacctatgtttcgccggaggaagaccttccggagattcccggggaccccgagcggctctcgcaggtgttcctcaacattctcgataacgcctgcaaatacggcaaaaacggcaaaaagatcgacgtgaacatcacgcacgacgacgcgaccgtctccgtatgcatccgcgactacggccccggcattccgccggcggagctgccgcaggtgaagaagaaattcttcaagggctcctccaaggaacgcgggagcggcatcggccttgccgtgtgcgacgagatcgtcacgcggcacaacggcacgctcgatattgccaccgccgccggcggcggcgtgcgcgtcacggtgacgctgccgcgcaaggcatcttaa

SEQ ID NO: 1618 - DNA, 1872 bp, unclassified Firmicutes
gtgttgaaccagaacgaaaaagaacttttatatagaataaacagcaatgccgatctccgtgccgtaccggaacgggacattccggagctatgccgggacatccgcgagtttcttgtggaaaacgtgtcgcacaccggtgggcatcttgcctcgaatctcggcagtgtggagctgacggtggcgctgcaccgcgtctatgacccgatgaaggaccgcatcctgttcgatgtcgggcatcagtcctatgtccacaagattttgaccggtcggagagattccttcgatacgctgcgccagctcgacggtatttccggctttcccaagccgtgcgagagcaacgccgatccgtttcttgccggacacgcctccgattccgtgtcgctggccgcggggatggcacgagcccgaacgctcatgcacggaaattacgacgttgtcgccgttgtgggcgacggcgcgatgaccggcggcctgtgctttgagggattgagcgatctcggtgcgagccgcgaggctgccgtggtcgttctcaacgacaacggcatgtccatcaacgaaaatgtcggcggcgtggcgagattgctccgccgcgcacgcacgcgccccggatatctccgcttcaagcggacgtaccgccgtgttatgaaaaagcacccgcacgcttatgaagagctgcaccggctcaaggagcgcatcaaagcgcgccttctgccgtccggtatatttgacgatctcgggttttactatatcgggccggtggacggccacgatgaaaaggcgctcgaaacgacgctgcgctgggcaaaggatcttcatcgcccggtcgttgtgcatgtggtgacggtgaagggaaagggctatgctcccgcggaggcggacccgcagacgtaccacggcgtcaacccgttcgatcggaagaccggcgtcatgaccgttccggccaacgatttttctgcggcattcggcgcatcggcgattgcgcttgcggaaaaggatccgacggtctgcgccgttaccgcggcgatggaacacggcacggggctgtccgaatttgcccgccgttttccgaaccggtattttgaactcggcattgccgaggagcatgccgccgcgatgtgcgccggcatggcaaagcaggggctgacgcccatttttgccgtttactccacctttctccagcgctcttacgatatgctcatcgagaacatcgggctcatggggctgcatgttgtgcttgccgtggaccgcgcggggcttgtcgggcgcgacggcgtcacgcatcagggctcttttgatatcgcgtatctcggctccgtgccgaatatgaccgtatatgctccggcgagcttctgcgaactggactccatgctatccatcgccgtgcgtgaaaaatccggtcccgtagcgctccggtatccccgcgggggagagggcgcatatactgacgaccactcccgcgaggattcgaccgttctgcgcagcggcggcgatgtaacgatcgccacctacggcatcagcgtcaacgcagcgcttgccgcggcggaaacgctttccgccgacggcatccgcgccgaggtcatcaagctcaaccggctgctgccgctcgctccggagaccgtccgtgagtcgctgcggaaaaccggacggtttattatggcggaggaagcctgccgctccggaagtcttggtacgcttcttcttgcagacgccgcggcaaacggcatttcgctgcgcggcgcccggctgctggatctcggcagcggcgttattaagcacgcttcggtccgtgagctgcagcactgcctgcatctggatgcggatggcattgccgccgcagcaaaggagatactgcatgaaaaagatccggcttga

SEQ ID NO: 1619 - DNA, 1500 bp, unclassified Firmicutes
atgaaaaaacgccttctttccctgctgctgaccgtatgtctcgttgcagcgctcttcaccggtctcaccggcacggcgaacgccgccaacgacaaggtcgtgggctatcttacgagctatactctcaaagcgggcgacacgatctacggtgtgtgtgaagcgaaaaagatcgacttcaacgccaacctcgccatgatcggcaagatcaacggcatcacgaactacaactacatgatgcccggcaaggtcctctggctgccgacgaagacggccacgacttcggagtcgtattattctctcctctcgcacacgctcgtcgccggggagacgcctgccgcgctctgccagagctacggcattgactacaacgccaactacaagctgctcgccgcgctcaacaacaatctcaatgtgttcatggcaggccagcagttcattctgcctctgtacgtaacgcctgccggcgccgcgacgccgactccggcgccgacctccggcacctctgccgcgccgaccgccacgcccaaacccggcacgacgcccgccccgacggcgaacgttcccaccggcgacacggtgagctattatctcgcgcagcacacgctgcagtacggcgaaaccgtttccggcgtctgcgccgcgctcggcgtggacttttcctcgaacgatgcgacgatccgcaagatcaacaacatcaccaactacaactatatgatgcccggaaaggtcatcctcatcccgacgaaaacggttccgggttccggttcttactacaagatcatggcgcacaagatcgtctccggcgacacgctctacgcgctctgcgcctcctacggtctggattactacgcctattccaagctgatctccctgctcaaccccaacgcggcctattataacctgctccccggcaacattctctatatgccgcagtatgtcgccgcctctacaacggtgaagcccgccgcaacgcccgcgccggccgcctctgccggtacgacgaccgccccggctgcgacgcctgctccgagcgcgtctgccggcacaacggcttccgctgcgccgagcgccacagccgccgcttccgccaagcccactacgacgcccaacatccccgccgaggatacgctcagctatctcatcatcccgcacaagatccaggccggcgacaccgtcatgagtatctgcgataaatacaaagtggacttcgctgcgaacgacgccgcgatccagcgtctgaacccgagcgtgagctacagctacctgctccccggcaacattatcctcatcccctcgaccacgtacccctcctccggtccgtattacaagatcatggcgcacaagctcgtcgcaggcgacacggtctacggtctctgcctcacctacggcctgagctatgagaacaacatcaccttcctgcagcggctgaacaaccgcgacaatctcgccacgtactacgtcggccagacgatctacatgccgctctacgttgccggctga

SEQ ID NO: 1620 - DNA, 2268 bp, unclassified Firmicutes
atggcaagaaagaaggaaaacccgacgccgcgccacgcgacggccgaggaacagaacgtaatggggctgcgctccgccgttgtggagcagcccgtcaccgaaacgctcgagaacaactacatgccctacgcgatgagcgtcatcgtctcgcgcgccatcccggagatcgacggctttaagccgagccaccgaaagcttttgtactgcatgtacaaaatggggcttctcaccggtgcgcgcacgaagtcggcgaacatcgtcggcgcgacgatgcactataacccgcacggcgactccgccatctatgatacgatggtgcgtctctccaaggggtacggtgcgcttctcacgccgtttgtcgattccaagggcaacttcggcaaagtgtactcgcgcgatatggcgtgggcagcctcgcgctatacggaggcgaagctcgcgcccatctgcgcggagatcttccgcgatatcgacaaggacacggtggattttgtcccgaactacgataactccaccacggagccgacgctccttccgaccacgttcccgaacgttctcgtctcggcaaacatgggtatcgccgtcggcatggcgtcgaacatctgcgggttcaatctcggcgaggtgtgcgaaacgacgatcgcgctgctgcgcgacccggaacataatattctgacaacgctccccgcgccggatttcccgaccggcggcgagatcgtgtgcgatcccggcgagatggaagcgctctataagaccggccgcggcggtgtgaaggtccgcgcccgctggcgcttcgatcccaaggagcgcatcattgagatctacgagatcccgtacagcacgaccgtcgaggcgatcattgacaaggtcgccgagctcgtcaaggccggcaagctccgggagatcagcgacatgcgcgacgagaccgacctcaacggtctcaagctcgccatcgatgtcaagcgcgatgtggagcccgaaaagctcatgcagaagctcttccgcatgacgccgctgcaggacagctttgcctgcaacttcaacattctgctcggcggcacgccgcgcgtgtgcggcgtcggcgagattctggacgaatggatcgcctggcggctggaatgcgtccggcggcgggtatactttgacgtatcgaagaagaaggaaaagctccatcttctcaacggtctcaaaaagatcctgctcgatatcgaccgcgccatctccatcatccgcaacaccgagcgcgagagcgacgttgtgccgaatcttatgatcggcttcggcatcgaccaagtacaggccgaatatgtcgccgagatcaagctgcgcaacatcaaccgcgaatacatcctcaagcgcaccgaggagaccgacgagctcgaacgcgagatcgccgagctggaggatacgctcgcgagccgccgcaagctgcgcgcgatcatcatttccgagctgcagcaggtgatgaagaaatacccctcgccgcgccgcagcgtcatcacctatgccgccgatgcgcccgaagcaccggaggaggacaacgtggaggactacccggtcaacctgttcctttcgcgcgaagggtatttcaaaaagatcaccccgctctcgctccgtatgggcggcgagcagaagtacaaggagaacgacgggccgagccaaagcttcgagacgacgaaccgcgccgaaatgctcgtattcaccgacaaggcgcaggtctacaagtgccgcgcggcggactttgccgatacgaaggcctcgcagctcggcgtatatctgcccggtcatctcggcatggatgacggcgagaacgtattctctcttgtcctgcccggcgattaccgcggcgaggtgctgttcttctttgaaaacggcaaatgcgcccgcgtgccgctcgagagctacgccaccaagacgaaccgcaagcggctcaccggtgcttactgcgacaagagcccgctccgagcgctgctcgtcctcacggaggaacagaacgtggcggtgttttccacggagggacgcgcgcttgtattcaacacggcgctgctcgcacccaagacttcccgtgccacgcagggcgtggcggtcatgacgctcaagccgaagttccggctcgagcgcgccgcgttcctcgccgatacgaccatccagaatcttgcgcgctaccgtatgcgcagcatccccgccgccggcgcgctcctccgcgaggaggaccggggcgaacggcagatgacgctgctcgacggcgcggaggaaaatacgaaataa

SEQ ID NO: 1621 - DNA, 1935 bp, unclassified Firmicutes
atgaacgagagcgagatcaaatatctggagcttctttccaagagctttccgagcatccccgctacggcggcggagatcgtgcgtctgcaggccattctggagctgccgaaaacgaccgagcacttcatgagcgacatccacggcgagtatacatacttctcccatatcctcaaaaacgcctccggcgcgatccacgacaagatcaacgacagcttcggcgatcttctcggcgaggaggagaaaaattcgctcgcccggctgctctattaccccgagcgggagcttgccgccgcagcgcactccgattcctggtaccgcgtgacgatccaccgtcttgtggccgtctgccggcaggcgacggacaaatatacccgcgtcaaggtgcgcgcccgtctgccgaaggaatatgcctatattatcgaagagctcattgactccgacgagcacgatcccaacaagcgcaggtattttgaaagcatcatcaacagcgtgatcgagaccggcattgccgaccggttcatcgtggcgctcgcaaatctcatctcccgcctgacggtaaaccagctgcacatcgtcggcgacgtttttgaccgcggccccgccgcgcagatggtcatggacgatctcatggacatgcacggcgtggacttcgtctggggcaaccacgacattctctggatgggcgctgcgatgggaaaccctgcgtgcattgcgaacgccctgcgaaactcactcaagtacggcaactttgatatgctcgaggacggctacggcctgaacgtccgtccgcttgcgctcttcgccatggagcagtacggcgacgatccctgcacgaacttcctcccgacgcacgtgaccgactgcgtggcggaaaacagcgacgttaccgccaagctcctcaaggccatcacggtcatccagttcaagctggagggccagctcatcctgcgccacccggaatataaaatggacggacggctcctcctcggagagctcgtccgctccgaaggaacggtcacgctcggcggcaagatataccgcacgaacgacatttcgctccccacggtcgatcccgcggatccctatcgcctctccgagcgcgagcagcagctcgtcgatcagctcgttttgtccttcctgcgcagcgagaagctgcagacccatatccggtatctgctggaaaaaggcgcgatgtaccgcgtgtgcaacggcaaccttctctaccacggctgcatccccatggagccggacggcagctttacgcgcgtgacgatgggtgacaaaacatatttcggaaagtcgctcatggatgcctgcgaccggctgtgccgcacggcgatgtacgaccgccgtatggagaacaccgatcttctctggtatctctggtgcgggccgtattccccgctcaacggcaaggacaagatcgcaacgttcgagcgcacgttcctcgacgatccggaggcccgaacggagcagaaaaatccgtactacgatctctggaacagcggggaaacggcgcgcacgatcctcaccgagttcggcgtggacttcgagcgcggccacattatcaacggccacgtccccgtgcgcaaaacgaagggcgacacgcccatcaaggccaacggcaagttcatcaacattgacggcggcctctcgaaggcgtaccagcccgtgacgggcatctgcggctatacgctggtgtattcctcgcacgagctgtatctcgccgagcaccagcccttcgacccggacaccgccgcgcgcgagagcgcagacgtcctctcccgcacaattatgatcgagcagtaccccgaccggcttcgcgtgcgcgataccgacggcggcgcggatgtggagcggcgcatcgccgatctcaaaaagctgctcgcggcctaccgcagcggccttgtgcgcacgccgagccgcatggagtaa

SEQ ID NO: 1622 - DNA, 3933 bp, unclassified Firmicutes
atgacttccttcagcgtaaaaaagccgtttaccgtgttcgtggcggtggtagccattctggtgttcggcgtgatgtcgtacgtcaagatgacccccgacctgatgccgaacatggactacccctacgtcgtcgtggtgacgacgtatccgggcgccgcgccggaggaggtcgaagccgtcgtcaccaagccgatggagcagagcatggcgacgctcaatgatatcaagaccgtgacctccacctcggcggagaactattcgatgcttgtactggagtttgagcagagcacgaatatggacagcgccgtggtggacattctgcagaaaacgcagatgctcaccggccggtgggacgattccatcggcacgccgagcatcatccgcatcaacccgaatatgatccccgtgatggtcgcggcggtcgattcgtccgaaatggaccgctacgagctctctcgctttgccaaggacaccgtcatccccacgctggaaggcacgacgggcgtggcgagcatcacgaccggcggcatgatcgagcggacgatgaccatcgaggtcaacgaggccaagctcgacaaaatgaacgcaaagatcgccgaagccatcgacaaggcgatggaagacgccagaaagcagctcgaggacgcgcagaaggagctggacgagaaccgcgagaaggtcgaggccggcacgaaccagcttctcagcgcatcgagcggcatctccgattccatcaagcagggcgaggacgatctcgccgacacgctcaccgccgccggagagaccgcggcgaagctcgcctccgcgcgcgccgccatcgacgcgctcaacgcccagctcgaacaggcggaggccgcgctcgcggaggccgaggcgcgtctggccgaaaccgacgcgcgcatcgcctcgctggaagcggacagcgcgctttatgccaaagcactcggcgagccctacgactccatggacgcctccacgacgctggaggccgccggactggacgcggacaccgttgccgcgctcaacgccaagggctgtaccgatctcggcagcgtccgcacgatgaacaacttaaacgacgtgaatctctccgcgcagcgcaccgcgcgcgcagcgcaggccgtcgcggtggagaccgcgcgcgtgcaggccgaggagctgcgcacgcagatcgccgcggcggaggagcgctgcgcccagctcgaagaggaatccaaaaagcagatggaatcgctcgaaaacatgcagaagcagctcgaggagctgccgggcgagctcatgggcggcgtaacgaagatctccctcgcgggcggccagctcgccgcggcgcagaccgcgctcaccagcgcgcagacgcagctcgacgcggcggtgaaaacgcttgaggagcagctagcctccgcgctcgacgcggccgacctccacggcgtcatcacgctggaaacgctgagcagcctcattgccgcgcagaatctcgacatgcccgccgggtatgtgtatgacgaaaacggcaacggcatcatcgtcaccgtcggcgacgccatcgcggacggcgaggatctcgaaaaccttgtgctgctcgatctcggcatcgagggccttgaccccatccgcgtgtgcgatgtggcggacgttgtccgcgccgacaacgcgggggagatctatgcctcgctcaacggcaacaacggtctcatcctcatgttctccaagcagtcaaactacgcgacggcgaaggtgtctgacaacatcaacgccgcgtttgaagagctgagcgcgcagtatccggggctgacgttcaccgcgctcatggatcagggcgattacatttatctcctgcgcgactcgatcctctcgagccttctctggggcgcgctcttctcggtcgtcattctcttcctcttcctgcgcgactggcggcccacggtcatcacgctctgctcgatcccgatcagcctgctcttcgcgctcacgctcatgtacttcaccggcgtttccatcaacatcatgtcgctttccggtctttcgatatcggtcggcatgctggtggataactccgtcgttgtgatcgaaaacacctaccgcctgcgcgcgctcggcgaatcaacggtcaagtccgccgtgtccggcgcgcggcaggtcggcggcgcgatcgcggcctccacgctcacgaccatctgcgtctttgtcccgatcgcgttcgtcgagggccttacgcgcgagctcttcaccgatatggtgctcacgctcagctacgcgctcatcgccagtcttatcgtagcgctcacgctcgtcccggcgctcgcgggcaagctgctcgcgcacgccaggccccagagcgaaacggcgttcacgcgcttcatgccgaaatacaaaaagtccgtcctctgggcggtgaaccacaaggccgtcacgctcctcaccgcggtggcgctgctcatcgcaagcggcgcggcggtgatcgccaagggcttcacgttcctccccgatatggagatggagcagatgatggtaacgctcacgatgccggagggcagttcctttgccgacacgaccgccgcggcggacgaggcagcggcgcgaatgctcaccgtgccgggcgtggagaccgtcggcggcgccatcggcgacagcgccggctccagcctttccatgatgaccaccgagggcgacgtttcgttctatgtcctgctcgagagcggatataaggcgagccgcgttgcgaaagagatcaacgagaaatgcgccgatatggaggccgccgtgaacgccgacgcaaactcgctcatgtcctccatgacgcagatgctcacgagcagcggcatcacggtgcgcgtatactccaacgatctcgacgatctgcgcgagaccgccgacgccgtggccgatgtgctgcgcggcgtggacggcacggaaaacgtcgccgccggggaagaggagcccaccgccgagctgcacttcaccgtggacaagaaaaaggcggcaaaggagcagctcaccgtggcgcaggtgtatatgcaggtggcaaaggcgctcaccggctcggccgatctcatcgagctttcggacggcggcgacacctatgccgtcagcgtacagaccgccgggaaggacaagatcacgcccgaatacgtccgctctctcacgtttgacgtgacggcgaaggacggcacggtgcattccgtcgcgctcagggacattgccacggtcgaggagaccgagagcctttcgagcatccgccgtctcaaccagcgccggtacatcgacgtgaccgccgacatcgccgagggctgcaacgtcacgctcgtgacgaacgccgccgaggaagcgctcgcatcgttctctccctcggacggcacgaccatcggcttcaccggcgagcgcgaatccatcgtcgaggcgctcagacagctcgttttgatgctcgcggtcggtatcctgctcgtatatctcgtgatggtcgcgcagttccaggatctcaaatcgccgttcatcgtcatgttcacgatcccgctcgcgttcaccggcggtttcctcgcgctgctcattgcggggctggagatcaacctgctctcgatgctcggcatgatcatgctcgtcggcatcatcgtgaataacggcatcgtgctcgtggactacatcaaccagctgcgcatcggcggcatggaccggcgtgaggccattgcggacgccgccgtcacccgtctgcgtccgattctgatgacgagcatcacgaccatcctcggtctcatcgtcatggcgctcggccagagcgaagcaacgtcgctcatccagccgctcgccgtaacgtgcatcggcggactgctgtacgccacgctcatgacgctttacgtcgtgcccgtcatgtacgacgcgctctccaaaaaggcgctctaccacgtggacgaggccgatctcgaactcagcgaaaaataa

SEQ ID NO: 1623 - DNA, 1275 bp, unclassified Firmicutes
atgaacaagcacgaatatcccaatctcggcgaaacgctgtatgaggaagtccttccgaacgggctttccgttctcgtcgcggtcaagccgggctttcgcaaaaacgcggcctttttcgccacgcgctacggcggggcggaccgccgcttcaaggtgaacggcgagtggatcgatacgcccgcgggcgtagcccatttcctcgagcacaagatgtttgatatgccggacggacgcagcgtcctttcggacttcgccgcgctcggcgcgagccccaacgccttcaccggcaccggccacacggcgtattatttcacgggttcggaaaacttcatggaaaatctccggttgctgctcacctacgtttctacgccgtactataccgaggagagcgtcgccaaggagcagggcatcatcggtcaggagatctgcatgggcgaggacagccccggctatgccggatatttccagcttttgagcgcgctctacgaccaccaccccatccgcgagaacatcgccggttccgtggagagcatcgcgcagatcacgcccgaaacgctctaccactgccacagcgtcttttaccatccctcaaacatggtgctctgctgcgtcggcgatgtagaccccgaggcgatcgcggcggcggcgcgagagatactgccggacacgcccggcgagaagccggagcgcgactacggcgcgcccgaaacgcttctgcccgcccggacgcgcgcggagaaaacgatgagcgtttccgcgccgcagtttctgctcggcgtgaagcttccgtatcccgcgtccggcgcggcgagagcgcggcagaagcttcttgcggagcttgccggcgagtgtctgttcggcaaggcctcggtctttttcaacgatctgtatgccggcggacttctgaacggcgactgctctgtcgaatacgattcctccgccgggacagccatgctggttcgcggcgcgcagggccgcgatccggacgccgtggcagaggcggtgcacgcggccgtgtccggcgttgcgctgggcggactggataaggaagcgctcgaacgctgccgccgcgcgaagtacggccagcttctcggctcgctcgattccttcgctgactatgccgtctcgctcgccgagagcaagctcgacggctgggatgcgcccgacgcgttcgccgtgcttgaatccatcactctcgcggagtgtgaggcgttcctctgcgaaaatctcacgcgtgagcgtctggcgctctccgtgatccgtcccaacgcctga

SEQ ID NO: 1624 - DNA, 1419 bp, unclassified Firmicutes
atgcacagaacgtatttccggaccttcaccacgaccgcggcgatggtccttgtgagctttctgctcatcggcgcagccttcggctttgcgagccgtcaggtgttcgtgtccgaagcgcgcgagagcatgatgacgaactcacgcgaaatatcgcgcatggcggtcgcctatgccgccgagggcgatctgcgctcgctcgagctgcgcatgacgctcagcaccatcggcgcgagcacgaatcagcacattttcatcgtcaatccctccggatatatcatcacctgctcggactccgccgttttctgtgagcacatcggaaagcgtctggatgagagcgtaacggcgatcctgccgcagtccggcacagtcgcgtcgctcggcacgctgggcgggttttacgcgagcgagcattataccgtcatttccgcgctcaccgatgacggcgcgctgctcggccatctgttcgtttccaaggacacggtaaccgcgctctccatctgggagacgatcctgccgctgttcttctttatcagtctcatcgtactctgtctcgcactcattttcagctacgcgagctccaagtacttcgccaagcccctgcgcgacatggcggacgcggcgcggcgcttcggtcgcggcgagctgaacgtccgtgtggagccgaccgacagcaccgacgagatcggcgagctgacggaggcctttaactccatggcggactcgctcgagcagtcggagacgaagcggcgcgagtttatcgcgaacgtatcacacgagctcaaaacgccgatgacgacgatctccggctttgccgacggcattctcgacgggacgatcccgccggagtcggaaaagaaatatcttcagatcatctcctcggagacgaagcggctggcccggctcgtgcgcagcatgctggagctttcgcgcctgcaggcaaaggaccgcgcaacgctcctcaagaacagctttgatatttccgagcagctccggctcacgctcatcacatttgccgataagatcgatcagaagcatctggaggtagtgttcaacgtccccgaggaggcgatcaaagttctcggcgatgtggacgccatcacgcaggtcatctacaatctgctcgataacgccatcaaattctcccgcgaaaattcaccgctcaccatttcgctatggaaggacagcaagaaggcctacgtctccatccggaactgcggcagcaccattccggaggcggagatcccgctcctcttcgatcgcttccacaagtccgaccgcagccgcagccaggaccgcgacggcgtcggtctggggctttatatcgtcaaaaccattttaaataaccacggcgaggacattgccgtgacaagccgccagggtgtgaccgactttgtgttcacgctcgcgctcaaaccgtaa

SEQ ID NO: 1625 - DNA, 1125 bp, unclassified Firmicutes
gtgaaagctatcaatcccggacactttcttctgacctgccggctggacaactgggtgcatctgctggaagagaaccacttccatatcgcccgcgaccggctgccgcaggcgctgtacatttccgcaacggcgctcgcgctcgcgcccgcggcggcggcggaatcgctcatttaccgcaagcgcatccgtgaaacaaagatcgaaaaggacccgatcttcattctcggccactggcgcagcggcacaacgtatctgcagaacgtcctctcgcgcgacgagcagttcggctggttcgatcccgtgaacacgatcggcctgccctactcgctgctgctcggccggctcatccagccgccgatcgaaaagggcatccggaacggccgcccgcaggataacgtgcagtactcgctcgatctcccgatggaggagacattcggcgtgctgacgatctcgccgtattcgatcatccacatgatcgcgttcccggaaaattataaaaagtacatcgaaggcgcgttcgtgagcgaccttcccgtggaggaactgcgcaaatgggagcgcagctacgattacgccgtccgcaagctcaccttcatcaaaaagggcaagcagctcattctcaaaagcccggacaacaccgcgcgcatccgcgagctgtggggcatgtatccggacgcgcggttcatcaacatccaccgcgacccctacaagaccgtccgctccacgatccacatgttccgcaccgagatggactcgctccggctgaccgaagagccggataacatcgacgagctcatcgagaacacggtcatcgatattttcgagcgcatgtaccgcgagcttttcgagcttgagggctttttcccgaagaaccggtacgtagacatcgcgtacaccgatttctgccgcgccccggtcgatacgctgcgggatatttaccggcgtctggagctctccggctttgaggcagccgcgccgcgctttcaggcgtatgtcgattcgcagcgcggataccagaagaataaattcgacatttcgccccggcttgtgcgcaagatcaacgcgaagctgggcttctacatggaacactacggctacgaaatgcgggaggttgaggaagaatga

SEQ ID NO: 1626 - DNA, 1920 bp, unclassified Firmicutes
atggcgaaaaaagaatttcaggcggaatcccggcggctgctggagctgatgatcaattccatctacacgcatcaggagatctttctgcgcgagctgatctccaacgcctcggacgctatcgacaagctctgcttccgctcgctgaccgatgagaatgtcggcatggagcgcggagatttcttcatccgcatcaaaggcgacaaggaaaacggaacgctcacgatctccgacaacggcatcggcatgaccgccgaggagatggaatccaatctcggcgtgatcgcgaagtccggctcgctcgccttcaagaaggatctggacgccgccgagaaggacaaggcggacatcgacgtgatcggtcagttcggcgtgggcttctattccgcgttcatggtcgcgagcaaagtcaccgtcatctcccgcgcctacgggcaggagaccgccaaccgctgggagagcgagggcgcggacggctacaccatcaccccctgcgaaaaggagaccgtcggcaccgacgtcatcctcaccatgaagagcgacaccgaggacgactgctacagcgtgtatctcatgccctggaagatccaggagcttgtgaagaaatattcggactatgtccgctggccgatccgcaccgatgtggaaacgaccgaaaaatatgagaccggcgaggtagacgaggccggtatccagaagatgggcgtgcgcaccgtcacaaaggaagaggtcatcaactcgatgatccccatctggcagcgcagcaagaaggaagcctccgacgccgactgcatcgccttctataaggagaagttcaaggacaccgaggatcccgtgtccgtcatccgcgtgaacgccgagggtaccgtgagctaccgcgcgatgctgttcgtcccggcgaaggcgccctatgactactacacccgcgactatgtccccggcctgcggctctactccaacggcgtgatgatcatggagaaatgccccgacctgctgccggagtgcttccgcttcgtgcgcggcatcgtcgactctcccgatctttcgctgaacatctcccgcgagatgctccagcacgaccgccagctcaagctcatctccatgaatcttgaaaagaagatcaaaggcgagctttcccggctcatggagtgcgaccgcgagaagtacgaaaagttcttcaacgtgttcggcacgcagctcaaatacggcatcatcggcgattacggcatgaagcgcgatctgctgaccgatcttctgctctatcgcagcgcggagaaggaaaagctcgtctccctgcgcgagtatgtggacgcgatgccggaaaaccagaaatacatctattacgccgccgccgaaacgccggagcgcgccgcgaagctcccgcagaccgagcaggtgcgcgccaagggcttcgatattctctgcttctcgaccgacgcggacgagttcgtcgcggagatcctcggcagctatgccgagaagaagttctgcaatgtctgctcgcaggatctcggtcttgagtccgacgaggaaaaggccgccgccgacaagaccgacgaggagtttaagcccctcaccgattttgtcaaggagacgctcggcgacgccgtggcgaacgtgaagatctcccgcaagctcaagaattacgccgtgtgcctctccgtcgagggcggcatcacgctcgaaatggagcggtacttccacgccatgccgggcgccgacccgaacgcgatgcgcgcacagcgcgtgctcgagctcaatctcgatcgccccgccgtcaaagcgctcgacgccgcgcgtcaggagaacccggagcgcgccgccgtaatggcgaaggtgctcttcgcgcaggcgcagctcgtcgccggcatcaccccggacgatccggcggagtatggcgagcttgtctgcaaactattctga

SEQ ID NO: 1627 - DNA, 1200 bp, unclassified Firmicutes
gtgtgctatactcgctttgaggaacggcgcaccttgctttttgcgtatgcgccggaaaaaaataagaagagtattatcggaggaaaaaggatgaaaaagatttttgcgctcctgctcgcggtcgtcatgacgctcggcctgctggccggctgcggccccgccgccgagaccccggacaccgaagccccggctaccgaggctcccgctgcggaagagcccgctgcggaagagcccgccgccgaacccaccgcgaagaagatcgacacactgaaggtcgcgttcgtcccgtcccgcgagccgcaggagatcatcaccgtcaccgagcctctcaaggagatgctcaagaacgaactcgccgcgctcggctatgaagtcggcgaggtggagatcaccgtcggcacgacgtatgaagcggtcggcgaaggccttgaagccggcacgatcgacgtcggcctcatccccggcggcacctacgttctctatgacgacggcgccgaggtcattctcaccgccacccgcgacggtctgagcaaggattccgacaacgcgaaggattggaacgacggccagcccaccgaggcttccgaccgtcaggcggtttcctaccgcgctctgttcatcgccggcccgtccgaaaagggcaaggagctgcaggacaaggtcaacgccggggaagagctcacctgggaagacctcgacggcgccaactggagcgtcatgggcacgtcctctcccgcgggctacatttaccccgctctctggctgcaggaccactacggcaagggcatctcggatctctccagcgccgtgcagtctgactcctacgccagcgcgttcgcgcgtctcgcctccggccaggtcgacgttctcgtgacctatgccgacgcccgccgcgactatgccgagcgctggaacagcgagttcggccgtgaaggctccatctgggaggagaccggcgtcatcggcgtcaccgcgcccatctacaacgacaccatctccgtgagcaagaactcgcccatcatggatgccgatctgatcgccgcgctgcagcaggcgttcatcaacatcggcaataccgatgccggcaagcaggtcatcgccatctacagccacaacggctaccagatcgcgcagtcctccgactatgacaacgagcgcgccgcgcagaagctcatccaggagctctccgccgccaactga

SEQ ID NO: 1628 - DNA, 1230 bp, unclassified Firmicutes
atggaaaagaaaaattacgagcagtccaaaaagctcgacaacgtctgctacgacatccgcggtcccgtaatggacgaggccatgcgcatggaagcgcgcggcgcgaatatactcaagctcaacatcggcaatcccgcccccttcggcttctatgcgccggacgaggtcattctcgacatgatctataacctgcgcaactgcgagggctattccgattcccgcggtctcttctccgcccgcaaggcgatcatgcagtactgccagctcaagggcattccgaatgtcggcatcaacgacatctttaccggcaacggcgtgagtgagctcatcacgctcaccatgcagggtcttctggacgacggcgacgagattcttgtccccgcgccggattatccgctctggacggcgtccatcactctcgccggcggcaaggcggtacactatctctgcgacgagcagcaggactggtaccccgatatcaacgatcttcgatccaaggtcacgccgcgcacgaagggcatcgtcgtcatcaacccgaacaacccgaccggcgcgctctatccgaaggagatccttgagcagatcgtgcaggtcgcccgcgagaacgaccttatcctctttgccgacgagatctacgaccgtctcgtcatgcagggagagccggagcacatcgcgctcgcctcgctcgcgcccgaccttctgacgctctgcttcaacggcctttccaaatcccaccgcgttgcgggcttccgcgtcggctgggtgtgtctcgccggtgataagtcccacgccaagggatatatcgaggggctgaatcttcttgccaaaatgcgcctttgctccaacgttccggcgcagagcatcattcagacctctctcggcggctatcagtcggtggacgaatatctctgccccggcggacggctttacgagcagcgtgagctgatctggaaaacgctcaactccatccccggcttgagcgctgccaagccgaaagcggcgttttacattttcccgaaggtggacacgaagaaattcaatatccacagcgacgagcagatggcgctcgatcttctgaaggaacagaagatcctcatcaccgccggtacgggcttcaactggggcgagccggatcatttccgcatcgtctacctgcccgacctcgtttcgctgaaggaggcctccgtgcgtcttgaaaaattcttcggcagctaccggcagaaggattaa

SEQ ID NO: 1629 - DNA, 1659 bp, unclassified Firmicutes
atgaaatacagaaagatctttgctctgctgctcgccgcggcgacgctcttctcgcttgccgcgtgcggcgagaccgctgccgggccggaggcaacgcccgatcccgcgctggacgagagcgccgcgaccgtctccggccagacgctcaccttcgccggcgccgcggacgacgtgttctctctctcgctcgactacgaggagagcctcaaccccatcaagacgcagagcacgctcaatcagctcgtggactgcctcgtgtacgaccgcctcttcgaggtcgatgagaacttcaacgtgacgtcgcgcattctttcggactggtattactccaagaacgaagacagcgcgggcgtgtgggtgctcaaggtgagggagggcatccagatgcacgacggctccacgctcaccgcgcaggacgtggcgtactccgtgtcctgcatcttcacgagcgagagacacaagcatctgcagcagcaggtcgggcgtgtctattcgagcgcgtacaacggcgaggtgtatctcgccgtggaaggcgcggacaacgcgcagctcccgcagcgcatgagcatcccggtcatcaagtccggctccgtcggcgacgagatccccgtcggatcgggcccgtatatgtataatgaagaccgcacggcactcgtgaagtttgacgggtatgaaaacagcgagagtctcccgctcgacgaggtgcagctgcgcgcctaccgcggcatggaggagctcatcaccgagtttgaaagcggtctcgtcgatctcgtcgtgaacgacccgaccggcatctacaacatgggctacggcggcaaaaacgaaaagcgcaccatcaccaccacgaatctccacttcatcggcttcaacagccagagccgcttcttccagtatgacgcctaccgctacgcgatgaactggatcgtgaaccgcgacaagatcgtatcggacacgctcgacggcaacgccgtggcgacggtgctccccgtccacccgaacagcgcgctgtacgatacctcgatcgcctcgcagttttcctacgatccctcgcgctgccttaccgagctcgagcgcggcggctgccgcgatctggacgcggacggcatgcttgaatttgcgctctccggcatgaaggtggacattgagctcaacttcgccgtctgcgccgacaacgccgccaaggtgcaggaggcgcgccggatcgccgaggatctggaagccatcggcatcggcgtcaacctgcgcgagcttacatggaaggactatctcgccgcgctgcgctccggatacatcgacttcgatcaggaggagcccgagatcgttatggatatgtatctcgccgaggtcgcgctgaccggcgactggaacattctcacgctgatctccggcgactgggaggatgacaacaccctcaactacggcggctgggacaacagcgagctggaagagctcaccgaggcctatctcggcgcaaaggacgacgaccgcgcgcaggccgtaaacgactggctgcagctcctcacgacgaccacggtgatcctgccggtgtgctttgagacgcgcgaggttatctcccatctcggcgtgatctccggcatgtcgcccaaccagtacgacgtattcaataatattaccgcctggacagtcaatatcggctga

SEQ ID NO: 1630 - DNA, 1992 bp, unclassified Firmicutes
atgagcattgtagccatgaaaaagctccggctcatcggcgttcattcccagaaggaagaactgctgcgtgagctgatgcttctcggctgcgtggaggtgtcggatccggccgaccggccggaccgggaggagctggcggccttccggcgtccggacggcggaaaggtctggcagaagcgctcggaacagacaacaatcgtcaacgcgctgcggctgctggacaagcacgcccctgccaaaaagggcctgcttacgccgaagccggaggtcgaatgcgccaagctgctcgacgagagcgctttggccgccgatctcgctctggcgggagagatcctctcgctggatgcggaggcgcgcagccttctcacccgcgcaagccgggaacgcgcctcggcggaggccatgactccgtggacggcgctgaacgtcccgcttgagcgcatggagacgcaaagctgcgaaatgcagctcggcacacttcccgccgctgtccccatggaggaagtaaacgccgcgctctcggagctggaggtcagctttgatctcgtttccgaggacaaaaccagccggtatgtatcgctgctcttccgccgggaggatcgcgaagcgatcgccgcggcgctgcggccgttcggcttttcggccatttctctgccggagggcaccggaacgccggagcaggtctataacgccgcgctccgccgcagcgaggagctgacggcacaggcggccaagaagatcgaagagcttgcctcctacgcggcgcaccgcgacgcgctgcagctcggcgcggacacgctctcgacgcgcattgcgcgcgaagagacggccgaaaagctcctgcagtcggacagcaccttctattttgaaggctggctcaccgcgccggaggagaaaaagctcggcgagactctctcgaaatactgctgcgcctgggaaacggaggagcccgatccggagcacccggaggaggtccccatccagctgcgcaataacgcgctgacccgtccgtacaacattgtcacggagatgtattctctcccggcgtacaacggacttgaccccaacccctttatcatgccgtttttcgcgctgttcttcggcatcatgttcgcggatatggcgtacggcctgatattgctgatcgcgggactgctctttctctggaaggcaaagccgaagggaagcatgaaaaacgccgcggggctgctgatcgaatgcggcatttccacattcatcataggcttcctgaccggcggcttcttcggcgacgttgtctccgtcatcggcggttggttcggcagggactggtcgatcgtaccgcacctcggcacgatccatatcggcagcatcgcgatcgatctgccgctcaacctgctcgagggcaacaacccgctgtatgtcctcatcgcggcgatctgcctcggcgcgatccatctggcgctcggcacgggcatcggcatctatctcaagctcagggacggcgagtgggcggacgctctgctcaacgatctgtgctggtgggtaatgatcgcgggcattctcgtcatggtgaccggcggaacgaagatcgttctcttcgtcggcatcggcatgctcgtgctcggacagctcatcaccggcaagggcttcggaaagatcaccggcattttcggcgcggtatacaacggcgcgaccgggtatctgggcgatctgctctcttactcgcgtctgatggcgctgatgctcgccggcagcgttattgcgagcgtattcaaccagctcggctcgctcggcaacgccaacggcatgaccgtgggcggcacgatcctcttcgtgctcgtgttctgcatcggccatgcgctgaactttgcgctgaacctgatcggctgcttcgtgcacacgctgcgactgcagttcctcgagttcttcggcaagtggtaccgggacggcggcaaggctttccgtcctttgaaaattcaaacgaaatatgtagatatcaaggaggagtaa

SEQ ID NO: 1631 - DNA, 1932 bp, unclassified Firmicutes
atgtcggaaaatacaccagtcaatcccaatacctatgacgccagtcagatccaggtccttgaaggtctggaagcggtgcgtatgcgcccgggtatgtacatcggctcgacgagcacgagcggtctgcatcaccttgtatacgagatcgtggataacgccatcgacgaggcgctcgcaggcttctgcacgcatatcgaggtctccatcgaagacggcgagagcatctgcgtgaccgataacggccgcggcatccccgtggacattcaggagcagacgggcaagcccgcgctcgaggtcgtctatacggtgctgcacgcgggcggcaagttcggcggcgggggctacaaggtctccggcggtctgcacggcgtcggcgcgagcgtggtgaacgcgctctcggactggctcgaagtgcgcgtattcaaaaacggcaatatctacgagatgaaattctcccgcggccatatcacgcaggagatgaagatcgtcggcaagaccgacaaacacggcacgcaggtgcgcttccatcccgatcccgagatgtttgacgacacggtctataactatggagtgctcttcaagcgcatgcgtgagcaggcgtttctgaacgccggtctcaccatcatcatggaggacaagcgccccgagcaggagcagcggcaggggctgtgctacgagggcggcatccgcgaatttgtcaccgagctcaaccgccacaaaacaccggtgcatgagagcgtcatctatatgtccggcgagcgggacacctccatgtgtgagatcgccatgcagtggaacgacggctacgatgagcgcatcgagtccttcgccaacaacattctcacgcccgagggcggcatgcacgagaccggcttccgcacggcgctcacccgcgtgatcaacgcctacggcaaatcgagaaagattttgaaggacgaggagacgctctccggcgaggactgccgcgagggtctcaccgccgtcatctccgtcaagctcgaaaacccgcagtttgagggccagacaaaatccaagctcggcaacagcgacatccgcacgatggtggacagcgttgtgagcgacaaactcgagcagttctttgaggaaaaccccgccgttgccaagcagatcttggaaaaaggcatttccgcctcccgcgcgcgcgaggccgcgcgcaaggcgcgcgacagcgtccgccgcaagaccgggctggagtccggccagatgccggataagctgcaggactgcaacgagcgcgatccgtccctctgcgaaatttacatcgtcgagggcgacagcgccgcgggcagcgccattcaggggcgcgactcccgcttccaggccattctcgccatgtggggcaagatgctcaacgtcgagaaggcgcgcgtcgataagatctacggcaacgacaagctctatccgctgatcgttgcgctcggcgcgggcatcggcaatgagttcaacatcgataagctccgctatcacaagatcgtcatcatggccgatgccgatgtggacggctcgcacatccggacgcttttgctcacgttcttcttccggtatatgcggccgctcatcgaaaacggctatgtctattccgccgtgccgccgctcttcaagctgagccgcggcaagcagcagcgcgtggcgtactccgacgaagagcgcgacgcgatctcccgcgagctgcgcggcgacaacccggacgcgaaggtggacatctcccgcttcaaaggtctcggcgagatggacccgcacgagctctgggaaacgacgatggaccccgagcgccggacgctccgccgcatcacgctcgaggacgcgcagcgcgccgatgagatatttaccgttctcatgggcgacgaggtcgagccgcgccgcgcgtggatcgagacaaaggcgcgctacgtcgtcaatctggattattaa

SEQ ID NO: 1632 - DNA, 1434 bp, unclassified Firmicutes
atgaaaaagatccttgcactgatccttgccctcgttatgctcttcgctctcgccgcctgcggccagcagcccgctgcgcaggagccgaccgaagcgcctgccgagcagcccgcggaacagcccgccgagcagccggcggaagaggagcccacccccgataccatcaccgtgatggttcccccggtttccggcacctatcaggacgacatcgacacctggatcgccgagttcaaagagctctacccgcacctcgatgtggaagtgatcaagacctcctgggacgatcacaacggcaagctctccaccatggcgaacgccggcgaagctccggacatcgctgaggtctcctactccgccatcggcacctacgtcgagctgggcgtcgccgttgacattgcgcagtacatggaccctgagcgtctggccgactacgatcagaacgcgctcgactacatgagcattgagaacaccgtttacggcctgcccctgtacatcaccatccaggctctcggcgccaacaaggatatgctcgaggccgccggcgccgacgtggcgaagatccagtccgaaggctggacctacgaggagttcctcgaagtcatcaagaacggcaccaccgatgactgcttcggcttcgtgttcgccaactccggcgtcaccgcgtccgacttcctgaacatcttcggcgtcgccgcgggtctgaacaacgcgttcaccgacgatctcaagtatgcctacacctccgagaacatgctcaagctgctcgaggccgtggaagagatgaccaagtccggctacatgcccaactacggcatcgaggccggccagcgcatggtcatgtgccagcagggcaaggccatgatcttcggcaaggccatgccgctcttcgagaacaacatcaacaagaacaacgccgctcttgaggccaacgacggcaccgccgtggaaaactccatccccgtgaactacgcgttcctgcccgttccgacgatggaaggcgcggaagcctcctgcttcggctccgtggacggcctgatcgccctccgcaacaacaagaccaccgacgagcacctcaagaacgtgtgcctgttcctcgactacatctcctccggcgagcgcatcgctgccgttgaccagaccctgcttctcgagcccgtctgccagaccggccgcgacgcttacgtctcccccgaaggtcttgacgagggcaacgttgcctccgccgcccgctgcatcggccttgtcgttgcgcctcccgccggtgtgaccgccgagcagagcgcttctgccaagaccatcatggacgaagtcatcgttccgaagttccaggctctccttgccggcgaagccaccgcgcaggaagtctatgacgctgtctgcaccgccgctaccgaggcgttcggcgccgacggctgcgtctccggcgctctctaa

SEQ ID NO: 1633 - DNA, 1146 bp, unclassified Firmicutes
atggcgagcccccgcggctcgccatacttcgtattttccgagtattttccgaaaatatccgccaaccacccacagtccctgcaaaagagaggaaggaatgccactgtgatccggctcaataacatcgtcgtcaaattcggcgacttcaccgcgctgcacgacatcaacgtccaggtaaaagagggcgaattcttcacgttcctcggcccgtccggctgcggcaaaacgacaacgctccgcaccattaccggcttcatcgagccggccgagggccaggtgttcgtccgcgataaggacatcacccatgtgcccatcgaggaccggaacatcggcatcgtgttccagagctacgcgctcttcccgacgatgaccgtgtacgacaacatcgcgttcggtctgcgcgtcaagaaaatgaagaaggccgaggtggacgaaaaagtccgcgctatcgccaaaaaggtcgatctttcggacgagcagctcaagaaagccgtgtcgcagctatccggcggccagcagcagcgcgtcgccatcgcccgcgcgctcgtcaccgagccggcgatcatctgtctggacgagccgctctccaacctggacgccaagctccgcgtgcagctccgtctggagcttaaaaagatgcagaaggatttcggcatcacgagcatctacgtcacccacgatcaggaggaggcccttacgctttccgaccgcatcgcggtgttcaacaagggcgtgatcgagcagatcggcacgccgaacgaaatttacaaccactccgccacggaattcgtgtgcaacttcatcggcgacatcaaccgtctctcggacgatatcgtggaaaagctcaacgccaaaggcgcgcagcttgacccgacacaccaccactacatccgtctcgagcgtgtccatgtgaacgacgctcggcacgcggaatccggcgccgtttcgctttccggcaccgtggaatcgagagagtattacggtctgtatataaagtattacatcaacgtcggcagccagacgctcaaggtcatcgagcgcaacgacggcgtgcatctgcacgataccggcgacgccgtgaccgtcaccgtccaccccgacgatctcatgagctacgctcccaacggggaggaggccgagaaatga

SEQ ID NO: 1634 - DNA, 1755 bp, unclassified Firmicutes
gtgaaggccgtgaaaaaaaagaaagactttacccggggcagtgtgcaggtgttcttttcctactataccccgcaccggaagctgctgctgctcgatctcgtgatggcggtctttgcggtagcggcggagctggtgttcccgtacgccacgcgctacgcgctcaaccgcctgctgccgaacggcctctacaaagcctttttcctgctgatggcgggacttctcggcgcgtatctgctgcgcgctctcgcgcagtatatcgtgaccgtgtacggccatgagctcggcgtgcgcgtcgaggcggacatgcgcgaggacatttttgccaaggtgcagacgctctcgttcgcctttttcgataagcaccgcaccggcaagctcatgtcccgcatgacgaccgaccttttcgacatcaccgagcttgcccaccacggcccggagaccgtgatccaggcctcgctcacgatcgccggggcgatcgtcatcctcgccacgatccgctgggagctggcgctgatattgtttcttctgctgccggtgctgctcgcggtcgtgatgcggctgcggctgcggctccgggcgcgcagtctggacgtgaagcgcgagaccgccgagatcaacaccgctgtggaggcgggcgtttccggcatccgcaccgtcaaggcgtttgccaacgagcaggacgccatggacaagttccgcacgtccaacgagaaattcaaaaaggtcaaaaaaagctattaccgcattttcggcgtgttcaacgcctcgaccgagtttgccatggcgctcatgcagctcgtaacgctcgccgccggcggagtgttcattatgcagggcaaaatggacgcggtcgatctcatcacgttttcgctgtacgtttcggtgttcatggcgccgatccggaagctcacgcagttcgttgagcagttccagaagggaagctccggcttcctgcggtttctggagatcatgcgcgccgagccggacgtgaaggacgcgccggacgcgaaggagcttgaaaacgtaaaaggcggcgtggagtaccgggacgtgtcgttccactatcagaacggcgaagaggtgctgcgccatgtggatctcacgatcgcgccgggcgaaacgctcgcgctcgtgggcccgtcgggaagcggcaagacgacgctctctcagctcctgccgcggttttacgatgtgaccggcggcgcggttttcgtagacgggcaggacgtgcggaaggtgacgcaggcctcgctccaccggtacatcggcatcatacagcaggacgtattcctctttgccgacaccgtgcgcgagaacatccgctacggccgccccggtgcgacggacgaggaagtcgcgcaggcggcgatcctcgcgtccatccacgaggagatcctggaaatgccgaacgggtacgatacgttcgtcggcgagcgcggcgcgatgctctccggcgggcagaagcagcgcatcgccattgcgcgcgtgtttctgaaaaacccgccaatcctcgtgcttgacgaggcgacgagcgcactcgacagcgtgaccgaggccgcgatccaggcatcgcttgaaaagctcagccgcgggcgcacgacgatcgtcgtggcgcaccggcttgccacggtccgcggcgcggatcacatcgccgtcatcgacaaagaaggcgtgagcgagtacggcacgcatcaggagctcatggagaaaaacgggctctacgccgcgctctggaatacgcagaaactgtcgtga

SEQ ID NO: 1635 - DNA, 1560 bp, unclassified Firmicutes
atgccgcaaatgtccgtatggatgatcgtcgccagcatcattgccgtgctggtgtttttgctgatcggctttgtgctgggcgtcatgtaccggaaaaaggtttccgagcgcgagatcgccagcgccgaggatgaagcgaagcgcatcatcaacgaaggcattaaagccgctgaaaacaaaaagcgcgaggcgctgctcgaggcgaaggaagagatccatcgcacccgcaccgagtgcgaccgcgaagtaaaagagcgccgcaacgaagtttccaagcaggagcgccgtctccagcagaaggaagaaaatctcgaccgcaagaccgaagcgctcgaaaagaagaccgagactctcaaccgcaagctccaggaagccgatgcccagcaggaggagatcaagctcgtcaagaagagccagctcgacatgctcgaaaagatctccggctactccgtggaggaagccaagcagtatctcatcaagagcgttgaggccgactgcacgcacgaaatggccgccaaggtcaaggaagttgaagcccagttcaaggacgaagccgagcagagggcccgcgaggtcatcgccacggccatccagcgctgcgccgccgaccacacgagcgagatcaccgtttccgtcgttcctctccccaacgacgaaatgaagggccgcatcatcggccgcgagggacgcaacatccgttccatcgaaacgctcaccggctgcgatctcatcatcgacgatacgccggaggccatcacggtctcaagctttgatcccgtccgccgcgaggtcgcgcgccttgcgctcgaaaagctcattcaggacggccgcatccaccccgcccgcatcgaggaaatggttgccaaggcccagcgcgaggtcaaccagaccatcaaggaagagggcgagcgcgccgtgttcgagacgaacgtccacggcctgcaccccgatctcgtcaagctcctcggccgccagcgctaccgcacgagctacggccagaacgtgctcaaccactccatcgaggtcgcccagatctccggtctgctcgccgctgagctcggcgtggacattgccctggccaagcgcgccggtctcctgcacgatctcggcaagtccatcgaccacgaggtcgagggaagccacgtgaccatcggcgtagaccttgcccgcaagtacaaggagtccgaagaggtcatccacgcgatcgaagcgcaccacggcgacgtggagccgcacacggtcatcgcctgcatcgtgcaggctgccgacacaatctccgccgcccgtcccggcgcgcgccgcgagaacatcgagaactatgtcaagcgtctcgaaaagctggaggaagtctcccgctcgttccccggcattgcaagctgctacgctatccaggccggccgcgagatccgcgtcatggtcaagcccgaagaggtcagcgaggatcagatcgtcctgctcgcgcgcgacatcgccaagaagatcgaagccgagcttacgtaccccggccagatcaaggtccacgtcctgcgcgagaccaaggccgtcgattacgcgaaataa

SEQ ID NO: 1636 - DNA, 1428 bp, unclassified Firmicutes
atgaaagcaaacattcttgtttatgatgtcggcagcacctatacgaagggcgcggcctttgcccttgcggacgggaaactgacgttccttgcccgcggccagcacccgacgacgctggagaacatcagcgacggcgcacgcggcgccgaggcggagatccgtgccaagggcgtggaattcgcgcccgatatggtccggttcagctcgtgcagcgccgcgggcggactgcgcatggtcgccatggggtatatgccccgcgtgaccgcgaaggccgcgaaggaagttgccatgaccgccggtgcgcgtgtcatggaggtcgtctccgcggacgagccgcccgagttccgcgaggaagtgctgcgcgagatcaagcccgacatcatcctgctctccggcggtacggacggcggcgacatggccaacgtgctcgaaaacgcggacatcatctgcaaggtgcacggcgaaggcacggtcattctcggctgcaacaagttcgcccagcgcgaggcggcggagaaattccgcgccgcgggcattgactgcatccgcgtgccgaacatcctgccgacgatccacgagctgaacgtgaagcccgcgcgcatcgccatccacgagcagttcatcaaccagatcacccacgcgaagggtttgcaggagttccgcgattcgctcgcggatcagaccgtcatcccgacgccgggcgccgtgctccttgcgagcgagctgcttgccaagggcagctacgagcaggagggcgtcggcggcgtgatcctcgtggatatcggcggcgctacgaccgacatccattccgccctgcccgagctcatcgacatgaacatcgaagagcgcggacttgttgtgagcaacgaaaagcagttttcctaccgcaccgtcgagggcaatctcggtctgcgcgtgagcgcgaccggcattcccgaggccgtgggcgacaaggccgttctccgcgccatggaccacgattacggtctgacgccggaggatgtggaaaactatgtcgatctgctcgaagcgcacaacgatcatattcccgccgacgagaaggaggcctgtctcgaccgcgcgcttgccgcgtgcgccgcggacgtcgccatccgccgtcacgccgggtattacgcgaaggaggccgatcccgtcatgggcatcatggccggcgctccgatggggcgcgatcttcgcaacgtgcgccaggtgctgtgcgtgggcggtattttcctccactgccacggcgaggagcgcgagaacatcgtgcgccgcacgttcgataaccccggcatctccctgctgccgctcaacgacccggacatctggttcgacgaggactatatcctctacgccatgggcgttctggcgcagcacttccccgaagaagttctttcgtacatgaaagagcatgtgataaagaaataa

SEQ ID NO: 1637 - DNA, 2070 bp, unclassified Firmicutes
gtgaccggcggcgagaccgtgaccggcggcgagccagagaccgcgccgcgcgcgctcagccgcaaggagcgccgtgagcgagaagccgcggcggaacgggagaaaaattcccgcgccgcgaagcgcgcgaaacgcgaggccgaatacgccgcgcccccggcggatctcccgccgctgccggtgcgcgcgcgccgggccgagcgcgaagatccggaggagaaagcgccgaaaaagcgctcccgccgcgcgagcgaagcgcccatcacgccggatgcgcccgcgccgcgcgggggctggaagctgccggtcatcatcgtgtgcgtcgtgctgctgcttctgctcgcactcgtcgtgacaggcgcgctgctcgtgcacaaagtggatacgatctatccgggcgtgacgatcgccgacaccgatctctccggcatgacgcgcaatgaggcgcgggataagctgcttgtgctcggccacgagcgctacgacggttactccgtcacggcaaacctcccgctcggcaatacgctcgccatgtcctccgcggacgcgggcatgcgcttttccgccgacaccgcggcggacgccgcctggaactacggccgcggcgacgggctcttcggcgcgctggtgaaatatgtccagtgccgctatctcggcaagtgcggctttgcgtacgacggcgagctttttgacataacgctcgacgaggcgaagatgcgctccatcatcgaggcgaaggccgtggatatcgacgcgcagcttctcgagagcagcatcgtcgtcggcgaggacagcatcacccttctcaagggcgcgagcggcatgacgctcgacaccgattcggtgttcaactccttccgcgatgcgttcctctccggcggcagcacgtcgttcacctacgagagcgcgccgaacacggacgaatcgttcgatttccagtcgctctataacgacatttattccgaggtcgccgaagcggagatcgtttataaccccgacattgagacgaccgaccccggcaaggatgacggcaagggcgaaaagcccgccgcaacgcccgaacccaccgcgacccccgcgccatccgacacgccggaggcctccgcctccccggaggcaacgcccgcggcgggcagcaagaccgatccctcgcagatcgacttccacggcgagccgttcatcgtgacgcagtcctccgtcggccggacatttgacgtagccgaagccgaaaaggcctgggccgcggcgtcctacggcgacacggtcacgatcccgatgaccgtcacgaagcccgagcacaccacggaggagatcaacgacatgctcttccgcgacgagctctccaaaaactggacgatggtccggctctggaaccgcgactactgcaacgaggtgcgcacatcgctctccggcagcagcgacaaccgcatttccaacgtgaagaaggcgtgcgggctgctcgacgggctggtgctcatccccggacagacgctctccttcaacgacacgctcggcgagcgcacggaagtcaacggctggaagcccgccacggcctacgccaacggcgaggtccggcaggaatacggcggcggcatctgccaggtgagctccacgctctacaacgccgtgctctacgccaatctggagatcgtcgagcgcgcctgccaccagttccaggtgggctatctcccctggggcatggacgccacggtgagctggggctggccggacttcaagttccgcaatgacgccgagtaccccgtcaagatccacgcgtgggtagacgaggagacgaacgagtgctgcgtccagatcctcggcaccgatgtgaagcaccagtatgtgctcatgcagttcaacaactgggaggtcttcgacgagaccggcacgtattttgacgccaacggcaatccgctctccgtcggcatggcggcggcaacgtggcggctggtgttcaacgacggcgacgattacaacaccgccacccccatcagcaaggaatacgaggcctacagcacctacaattaccacaccgaggacatcgaagcccgcaacgtcccgcagggctga

SEQ ID NO: 1638 - DNA, 1830 bp, unclassified Firmicutes
gtgaccaagatcgaggagctgcgcgagaaagccaaccgcctgccgcttctgccgggcgtctatattatgttggacgcttccggcgaggtgatctacgtcggcaaggctaaggcgctcaaaaaccgcgtgacgagctatttccgcggcgaccatctgccgaaggtcgcggcgatggtttcgcacgtgaacgacttcaacgtcatcattgccgagacggaatttgaagcgctcgtgctggaaaactcgctcatcaagcgccacaagccgcattacaacatcctcctcaaggacgataagggctatccgttcctgcgtcttgaccggcgggagccgtacccgcgctttacgctctcaaaccgcgcgaacccggacggggcaaaatactttggcccctacggcggccggggacagacgatgagcatcatcgatacgctctgcaaaacgctgggcctgccgacctgccgccgcgtgttcccgcgcgacatcggcaaggaccggccctgcctgcagtaccagatgggcgcgtgccgcggctggtgccgcggcgagccgggcggggaagagtaccgccgcgcgatcggcgaggccgtggatatccttgaagggcgcagcgcggagctcgtccggcgcatcgagactgagatgaatgccgcggccgaagaccttcggtttgaagaggccgggcgtctgcgcgaccggatgcgcgccgtatccacactggaaaaccgccagcgcgtcatcgccgctgcccgcgccgatacggacgccgtcggtttcgtgcgcggcgcgaaaagctgcttttccgtgctgcactatacgaacggcgacctctccggcaaggatgtatcgctcattgacgatccgacggaaacggacggggaggctctgtccaccctgctgcgccaatattatgttaaccgttcaagctggccgaaaacgatccttctgccgtttgagccggaggataaagaggacattgagcgctggctttcggatatggccgggcggcgcgtgtatctcgaagtgccgcagcgcggcgaccgcgcccgctttgcggaaaaggcggcagtgaacgcccgcgaggagatattgcgctccacgaccgccgagcagcgccggagcaaaacgctctcctggcttcaggaggtgcttcagctcacggaatttccgcaccggatcgaggcctatgatatctccaacaccggcagcacgggcatcgtcgcttccatgacagtgcatgtggacggcaagcccctcaagcgcgattaccggaaattccgcatccgcagcaccgaaacgccggacgactacggctccatgcgcgaggtcatcatgcggcggttcacgcactatctggatgaggacggaaagttctccgcaaggccggacgttttgttcatcgacggcggcgcggagcacgcttcggcggcctgcacggcgctcgaagcgctgggactcagcctgccggtgttcggcatggtgaaggacgacaggcaccgtacgcgcgcgctcataacgccggagggacacgaaatcggcatacaggcaaatcccgccgcgttcgcgcttgtaggccgcattcaggaggaaacgcaccgcttcgccatcgagtatcaccgctcgctgcgcgacagcgtgcgcggctccacactcgataagatccccggcgtcggggaaaaacggagaaacgatcttttgaagaccttcggctcggtgcgcgcgatccgcgcagcgagcgcggaggagcttgcccgggccgtgccgaaaaacacggcgcaggctgtatacgactattttcacaaaaccgaggaggaaacaccatgcgagtga

SEQ ID NO: 1639 - DNA, 1374 bp, unclassified Firmicutes
ccgatggcagagactaccgtcactctcgaaagcacgctctccgcgctgatcgaggggaagaaatacgccgcgctccgggacattctcgtaacgatgaacccggcggacgtggcggcggtttttgaagagacggatgagcttgccctgccgctccttttccggctgctgccgaaggagctggcggcggaaacattcgtcgaaatgcagcccgagcagcaggagctgctcatccgcggcttttcggacaccgagctcaaagaggtcgtggacgagctgtatgtggacgacgcggtcgatctcgtcgaggagatgcccgcgaacgtcgtaaagcgcattctccggcaggccgaccccgacatgcgccggatgatcaacgagatcctgcgctatccggaggacagcgccggcagcatcatgacaacggagttcgtctccctccgcccgcagatgaccgtggaggaggcgaccaagcgcatcaagcgcaccggcgtcgataaggaaacgatcaacacctgctatgtgatcgacaagggccggctcatcggcgcgctctcgctgcgcacgctcatcctctcggacgacgacgacgtgatcgaggacatcatggagccgaacgtcatttccgtcacgacgtccgaggaccaggagaccgtcgcgcagatgttctccaagtataacttcaacgccctcccggtcgtggacaccgaaaaccggctcgtcggcatcgtcaccgtagacgacgccatcgacgttatggaagaagaggccaccgaggacattgaaaagatggccggtatggcgccttcggagcggccgtatctctatacgagcgtgctcgaaacatggaaagcgcgtattccgtggcttctcatcctcatgctctcggccacgttcacgggcctcatcatcaaccatttccaaaaccagctcgcggcatgccttgtgctctcgtcgttcatcccgatgctctccggcacgggcggcaacagcggcacgcaggcgtccgtcgccgtcatccgcggtctcgcgctcggcgagatcgagttttccgatctctgggcggtcatctggaaggagatccgcgtgagcgtcctctgcggcgtgtgcctcgcgggcgcgaatttcgccaaaatgatgctcgtggacaacctgctgctccacaacggcgtcaccgcgctcgtcgcggcggtcgtgtgtctgacgctcgtgtgcgtcgtgttcatcgcaaagctcgtcggctgctcgctgccgatcctcgcggaaaagctggggtttgaccccgcggtcatggcaagcccgttcatcacgacgatcgtggacgttctgtccctgctgatctatttttccatcgcctccgccctgctggggctgtaa

SEQ ID NO: 1640 - DNA, 1824 bp, unclassified Firmicutes
atggatgaaaagaaggtaacgtccgccccggagcagtccggggatcgggaccaggcgctgttcgcctcgatccggcgcgaaaagcagcgcaaaaagcgccgccgcatcattgtgacggtgtcgatcgttgtggtgctcgcgctcgccattttcttcggcgtgcgcgcggcaaagaaaaaggtcagtgaggccgtcggcagcatgaaggccccgaccgtgagcgaggcgaccgtcacgaccggcagcatcagcacgaccgtttccggctcgggcatactcaccgacgcggacacgcagcagatcgtcctgcccaagggcgtgaagctcgaaaagatcctcgtcaaagcgggcgagaccgtgaagaagggcgacgcgctcgccacggtggagctctcctccgttatgggcgcgatgagcactgtgcaggcggagctcaataagctcgacgagcagctgcgcgccgcgaccggcgaaacggtgcagccgtacataacgaccggcgtgaacggccgcgtgaagatcgtctacgcgcagaaggatgatgacgtctctgcctgcatgatggagcacggcgctctcgcggtgctctcgcttgacgggtacatggccgtggatatcgacgccggctctctcgccgcgggcgacaaggtcagcgtgaccgtagacgaaaagacgtaccccggcacggtggacaagctccagagcggcaaggcgaccgtcctcctcaccgacaacggcccggcggtcgatgctgcggccagcgtgcaggatgcggacggcaatgccgtcggcagcggcacgctctatatccacaacccgctgcgcatcaccggctatgcgggcgttgtctccgcggtaaacgccgccgagaaccggcaggtgtacgcgggcaactccctcttcacgctgcgcgacacggcctacagcgcgaactacgaatccgtcctcaagaaccgccgtgagaaagaggaggatctcatggcgctgctcggcatgtacagcgccggagcggtgacagcgccgtttgacggctctgtctcctccattgactacagcgacaaaacgacatcttcctccgataaaacggactcctccgccggcggcggaggcatggtgtacggcggcatgatgaatgcctacacttcctacggctcagacggctcggattcctctggagacggctcgtcctcttccggcagcacggcggcaaccggcgaaacgaagctcctcacgctctcgtcggatacgagcatgaagctcaccgtgagcgtggacgagacggatatcctctccgtgcagaatgggcagaaggcgcagatcaccgtgagcacgatcggcgacgaggtgttctccggcgtcgtaacggcggtggagcgctcggcaaagagcagctacggcatcacgagctacagcgtggagatcacgctcgacaaagacccccgcatgctccccggcatgaccgccaaggcgctcatccgcattgagggcgtggataacgctctgctcatccccgaaaaggcgctgcgccagacgcgcgacagctcgttcgtctatacgacgtatgaccccgccaccggcacgctcggcggtgaaacggcggtcattcccggtcttaccggcggcggcatggtggagatcaccgagggtctcaccgaaggacagaccgtgtactatcaggaggcctacgacccctacgcctattattacggcacgggcggcaacgcgagcggcggcgacgcgtggattgaggacgcgagcggcggcgacgccgctatcgccgaggacgacggctcctacgcggacagcgagccgctggaaggataa

SEQ ID NO: 1641 - DNA, 936 bp, unclassified Firmicutes
atgaaacgaaagatcctttctctgatcctctgctgcgcgctgctcttctctctcgccgcctgcggcaagaccgaagcgccgcagccgacggcaagcgccggaacggagaccgctccgaacagcgaaaaacccgccgcggcggagggcatttcctatgccgatgcctacgcgcagtacaccgcgatctacggcgcgctgctcaacgccgtgcagcagcggctcgacacgcacgacgccagactccaggccgcgtatccggacagctactacatgaactccgattaccttctgctcgtgtacgttccgttcacgacggcgtatccgtcgctcgggcgcgagctgcgcgccgacaatctggacgcagcgcagacgtcgctccgcgaaacgttccccgacgccgtgctcacgatgaccgcgccgggacgcttcgaggcggtatacacctatgtggataagacctccggcacggaggtgcagcgtgagggcaaatgccagtgggactgcgacgggctgaccggcgcgatccgcgtccgcgcgtacattgacggcgagctgaccgagttcaccgagtttgtccccctcggcggcagccggtacctgctctacaccgcgaccgacaaggcgatcgtcgagtacatcgagggcgagatcaccgcgctctggcacgcccaccgcatcagtgagccggcgcagggcctgttccccggcgacatgcggcttatgagcctcgccgagcaggactttttccccggtgagggcgcttccttctccggcacggactggatcaccggcgatgccgacgcgcagtatgtcatcacgctgcaaaacggcgaaatggtttataccggcaagatctcgcaggatctcgttgatcaggacggcaaccgcaccggcatcgtctggcaggacatcgcgccgatcacgctccttgcgtga

SEQ ID NO: 1642 - DNA, 2211 bp, unclassified Firmicutes
atggcagaagaaattattgaacagggctatcgggagcttgccgataccattttggaacataaccccggcgtcgatctcggtcgggtgcgcgcggcgtttgagctggccgaccgcgcccacagcgggcagaagcgcaaggccggcacgccgtatgtgacgcactgcgtcgccgccgcgcagatctgcgcggagatggggctggacgaggacagcatcgtcgcggcgctgctgcacgactgcatcgaggacaccgccatcacccacgaggacatcgcccggcagttcggcgccgaggtcgccgatatcgtggagggcgtcacaaagctcacccgcgtgcagttcacgagccgcgaggacgagcagatggaaaacctccgcaaaatgctcatggcgatggcgaaggacatccgtgtcatcctcatcaagatcgccgacaggctgcacaatatgcgcacgatggaatacatggtcgcgcagaagcagctcgaaaagtcgctcgaaacgatggagatctatgcccccatcgcccaccggctcggcctgcagaaggtgaagtgggagctcgaggatctctcgctcaaatatctcgacccggacggctaccgtgagatcatcacctacctcgacagcaaggcggacgtgctcaacgagttcatgtccgatgtcaagaagaagatcaccgaccggctcacggagtacagcatccacgcaacggtgcagagccgcatcaagcatacctacagcatttaccgcaagatgtatacgcagaagcgcggtctggacgagatcttcgatctctgcgcgttccgcgtcatcgtggacgatattcccgactgctacaatgttctcggccacatccacgacatgttccgccccgtgccgggccgcttcaaggactacattgccacgcccaagcccaacggctaccagagcgtgcatacgaccgtcctcggcgaggagggcatcatgttcgaggtgcagatccgcacctgggagatgcaccgcatcagcgaatacggcattgccgcgcactggaagtacaaatccggcggcgcgggcgtccgcgccggagatgaggagaagttcgcctggatccgccgcctgctcgaagcgcagcaggacaccgacgcgcaggacttcgttcacaatctcaaaatggatatgttcaacgacgaggtgttcgtattcacgccgcagggcgacgtggtgaaccttcccgccggcgcgtgcccgatcgactttgcctacggcatccattccgccgtcggcaaccggatgatcggcgcaaaggtcaacgggcgcatcgtgccgtttgactatacgctgcaaaacggcgatatcgttgatatcatcacgtccaaatccgcgccggggccgagccgcgactggatgacgctctgcaagtccaacgccgcccgctccaagatccgccagtggctcaaaaaggagcgccgcgaggagaacatcgtccgcggcaaggagatgtttgaaagcgagctgcgccgcgcgggacttacgacggcgtatctcgaggacgacgatcttttgcagacatgcatcaaaaagctctccgtcacgagtctcgacgatatgtacgccgccatcggctacggcggcatcacctgcacacgcgcggtcaaccgcttcaaggacgagatcgcccgcgccgcccgcgcgcaggcgcaaagccagaaaagcgagcttgaacggatcaacgaagccgtcgagcgccgcagcgcgcagcagaccaaggcggtgcagggcgttctcgttgagggcatggacaactgcctcatcaaattttcccgctgctgcactccggtgccgggcgatccgatcgtcgggttcatcacgcgcgggcagggcgtttccatccaccgcgccgactgcccgaactatctcaacagtctgtgcaagcgcgaacaggaaggccgctggctgaatgtttcgtgggccgataagacgatggggctttactccacaacgctgcgcattctcgcgcgcgaccgcaacgggctcattctggatattgccgccgtgctcaacgcgctcaacgccaaggtgcgctcgctcaacgcccgctcgctccccgaggggaacgcgctcgtctatgtcaccaccgaggtccccgatctcgcctcgctgcggcttatcatggcgaggatccgcacgctcggcggcgtgcgcgagatcgaccgcggcaacggataa

SEQ ID NO: 1643 - DNA, 1221 bp, unclassified Firmicutes
tccatggaaaaaaataatttacaaacaacggtaaagcagctcgaggagtttctctctgcctattaccgcaagaccggcgttcgccccacccttggcgaggcgcttgatatgatggaaaaggacaatctcctttccgctccgcctgctgttgccgcggccgattccaaggtccagcataccgtggaagagatctgtgatatcatcgattctcagccggtgaatgccaccgcgttccttcagaacacctctccgtcggagtccggtacggctcatgtttccggtgaggacgcgatctttgcgcccggccgcgatgttaccgtgacgcgcgttttctcctacctgagcgcggatgccgcggagtatgactactttacgatcgccgtcgttctcaagggcgagtgcgagttcttctttgctggaacgcccatccccgtcggcgtcggcagcgttatcatcgttcctccgcacacggcgcacatcaaggccgtcccgtcggacgcgtacgtcatagcgctgcatatgcgccgctccacgttcgatgcgcagttcggcgatctcatgacgagcagcgacaaaatgagcattttcttccgcgagtcgatatacggcgagaatgaaatgaattatatgagcatgacggcgaactttgagtcgggaaacgtgctctctacgctgcacgagctcgtcaaggagtgcgcgtccaaggcaccgttcgcgaatctcacctccgtgtgctggacaaagatcttccttgcgtcggtgttccgcacacaggccggaagtgccgccgtgcttcgtgctgcgcgcgatgaatcgacccgtgccgactgcggcgcaattttgcagtacatccagcagaactaccgtaccgtgcgcctgagcacgctggcgagagcgttccattataacgagacctatctctcccgtatgctgcagaactacatgggcatgagctttacggagatcgtccgcggcatcaagatgacccgcgccgaggaatacctctcgacctccacgctccgcatccatgatatctccgcgctcgtcggctacgacagcgtggatcacttctcccgcacgttcaagtctacgcacaacatgtcgccgcaggcctaccgccgtcttacgacgaagcgcgggctgcgcacgctcgcggcctcggccgtgaagggcgagagcgcggaaaagaacgcgaagacggagaaggagaagaacgaataa

SEQ ID NO: 1644 - DNA, 1659 bp, unclassified Firmicutes
atgagatacgccggagaaaagcgcttcaacggctggacagcgctgacgctcgttttgctcgcgctctttttgctgttcgtcatctatcccatcggtatgctgctcatcaagagcctttttaccggcgggaagatcgatctgagctactttgtgaagttcttcacgaagaagtattactggggcgcgctcgtcaacagctttaaggtcacggtcgtgtccacgcttgtagcgtcgctcatcggcgtgccgatggcgtatctgctgcgcagcgtgaagatccgcggcgcgggtctcatcaacatccttatcgtgatctcctatctctcgcccccgttcatcggcgcgtattcgtggatccagctcctgggccggaacggctttatcacccgcatcgcaaacgccctcttcggcgtgaagctgccgggcatttacggctttgccggtatcgtgctcgtcttttctctccagtccttcccgctgatctacatgtatgtttccggcgcgatgaagaatctggacaactccctgaacgaagcggcggagagccttggctgcaacgccttccagcgcgtaacgaagatcatcttcccgctggtgatgccgtcgctgctcgcgggcgcgctgctcgtattcatgcgcgtgtttgccgacttcggcacgcccatgatcatcggcgaggggtataagaccttcccggtcatgctgtatacgcagtttatgggcgaggtcggcacgaacgacggttttgccgccacgatgtgtctgatcgtcatcgttattgcgctgatgttcttcttcctgcaaaaggcgctcggccgccggttcacctattccatgtcggcgctcaagcccatggaggcggtagatccgaagggctggcgcggtgtcgtttcccacatcgtggtgtatctcgtggcgctcgtcgcggcgctgccccagatcacggtgcttgtcacgtccttcatcggcacgatcaacggctcgctcttcaccggcgagtttacgctcgataactaccgcaacatctttgccaagagcaacaccagcgccattaccaacagctacctcttcggcctgatcgccatcgtgatcgtagtcgtatgcggtatactgatctcgtatctcagcgtccgcaagcgcaatgcgctcacctcggtgctcgatgtgctcaccatgttcccgtacatcatccccggctcggtgctcggcatttcgttcctgtacgccttcaacgggcctccgtttatgctcggcggcacggtgctcatcatcgttatatcgctctccatccggcgcatgccgtatacgatccgatcgagcaccgccatcatcgggcagatcagccccagcgtggaggaggcgtccatcagtctcggcgcatcgcagctcaaaacgtttctgcgcgtcacgatccccatgatgctccccggcgttctctccggcgcgatcatgagctggatcacgctcatcagcgagctgagttcctcggtcattctgtacaccagcaagaccatgacgctcaccgtggccatctattccgaggtcatccgcagcaacttcggcaatgcggcggcctactccacgatcctgactctcacttcgatcgtgtcgcttcttgtgtttttcaaactcagcggcaaaaaggacttgagcgtataa

SEQ ID NO: 1645 - DNA, 1608 bp, unclassified Firmicutes
atgaaagcaatggataagctgatcgcgaagatcgacaaaaagctcgagcgctttgaccccatctggcaggccgaacacggcaccggcggccagagaacgcgctattacgataagaccggcgttgcgaagtggcgcgaatggcgcggcgtgaaggacacgctctatgactatacgcagtggctcaataacctctcgagcatggtgcagatggtggcgtccgctcccgtctcctgtctcaagggcttctgggaataccgctggatgggctcgtatctcggcacgttcatgttcatcgaccgcctgtttgagggctaccgcggctatgagctgcgcaccgcgcacacgaacatgcacgccatcgtgcagagccttaccaagcgcatcgcgctcgtcctctccaacgacaagcgcctcggcggcggcccgcgcagcgacgatttcctcccctttgacgaggtgctgcccccgctgtttctgacgggcttcaaggagctgatcccgttcccgctgcagacgctgccggagttcatcatctgcgacgtggaccagcacatcgagccgtactatatcgacgtggccgagtccttcggtctggcggcggacgtgtgctcgcgctgcgccgcggagaccggcgtcgctatcgacgatgcgttccccatcatcggcaaggcgttcctcacgacgaacatgccgtgcaacgcctccgagtgtacctccatgatccagcgccgccgcgtggcgctgccggacttccccgtaacgctcgcgatgatccacaacgagccgggcgcgcacccctattccacgcagatgctcaaggacgccattgccttcgtcgagaaggaatacggcatcaagtatgactgggacgagctgttcaagtacgcccggcttatgaacgagcagaacaccattgagctcgaaaaatgggactacttcaagaccccgtattccgcgctcgtcggcattgccgaaacgctctaccggctgtattcgtgggcgtccgtcaacggcaccgacccgtatttcaacaaggtcgatcgccgcgttatcgagattatgcgccgggcatacgaggaaaagtaccagcctttcggcggaaagacgcgccaccgcgccttcctttgggggccctctgcggtatactataccgacttcccgacctggacgcagaactgctggggcatcaacattgtgctgaacatggactccaccatgggccacaacatgatcgacaccgaagaccccgaccaggcgatccaggatctggcgctcttctccgagaaggccaccatgcgccatcacgccgtcggcggctgggagaatgtcaacgccatctgggagtgggcgaagaactttgactgcgacatggtccttttcaacgacaacatcgcctgcaagggcatgctgggcgtccacgctctcatggaggagcaggcgcgcgagctgggcttccacttcatcttcgtcgagcacgatctggaggactgccgcaccgtatcccggcaggacatgagaaactgcgtcaacaagtatatgtccgtcgttctcaacgagaagccgcttgacccgaccatcgtagagtttgacgactccatggcatactaa

SEQ ID NO: 1646 - DNA, 1248 bp, unclassified Firmicutes
atgagcgaccaagacaaacgcctgggcgtatattttcacataccgttctgcgcatcgaagtgcgcgtactgcgacttttgcagtctgccgggcagggacaagctcatgccctattaccaggatgcgctgctcattcagctgcaggaaacgatgccccgcatgaccgattactttatcgacacggtgtacttcggcggcggcacgccgagctactacggcgcgcggcgcatcgtggagatattgcaggagctgaaggtcacgaaccggctgatgaagcagagcgagatcaccgtggagtgcaacccggacagcgtccggcgcaaggagctgcgcatgctgcgcaaggagggcgtgaaccgcctttccatcggcgcgcagagcgccaacgacgacattctccggctcatcggccgccgccacaactggcggcaggtggaaatggcggtcaagcgcgcgcgcaaggccggattccgcaacgtgagtcttgatctcatctacggtctgccgagccagacgcgcgaggactgggccgacacgctcaccaaggcgctcgcgctcaagcccgcgcacatctcctgctacggtctgcgtcttgaggaaggcacgcccatgtacgacgagtatgagggcaccgacattctcccctccgacgacgatcaggcggacatgtacctttacgccgtggacttcctttcgcgccacggcttccggcagtatgagatctccaacttcgcccgccccggctacgagagccgccacaatctcaagtactggcggctggatgactacatcggcttcggcgcggcggcggcctccaacatcgggctgctgcgctatacctacacccacaacgtccgcgagtatatttccggcgttttgggggacaagggtattatcgccgaagaggaggagctcacgccgttcgaccgcgcgagcgagtatctgatgctcggcatgcgcaccgcggccggcatctcccgcgaggagtaccggagcgtgtaccagagcagcttcgacaagctcgaagagatgctggaggtatttcaggaaaacggctgggccgtgtgcgacaacggccgctggcacttcacgcccggcggattcctcgtttccaacgtcctcatcggcgtgctgctcgaatcgcagacgaaagagaaattcaacgccaacccgtggatccgcgaggcgtttgaggcaaagggacagaaggtcccgctgccgacggcgtccgagccgtatatgaactga

SEQ ID NO: 1647 - DNA, 1677 bp, unclassified Firmicutes
atgttttccgtgaaaataggcggcttctcttccgcaaaggattggggaagcgccgcgacacgggagttcactatgaaagttacctttttgggcgcgacccatgaagtcacgggcagctgcacgctcatcgagtgcgggaataaccgcggccttgttgactgcggcatggagcaggggaaggacatctttgaaaaccagaagctgccggtggcggcgggggagatcgactttgtccttttgacccatgcgcacatcgaccactccggcaatctgccgctgcttttcaaaaacgggttcgacggccccatttacgccacacgcgagacgtgcaatctctgccgcatcatgctgcgcgactgcgcgcacattcaggagagcgaggccgagtggcgcaaccgcaaaagccgccgctccggcggaccggcatatgagccggtctacacgctcgacgacgccgaggccgccatcgcgcatctgcgcccggtgagctatcacgagctggtgcaggtcggcgagcacttcgccgtccgcttcagcgatgtgtgccacctgctcggcagcgcctgcatcgaggtctttatgaccgagaacggcgtggagcgcaagatggtgttcagcggcgatatcggcaatctcaaccagcccatcatccgcaacgtgccggaaacggtcgcggacgcggactatgttatgatcgaatcgacctacggcgaccgcctgcatgaccgccatgtcccgccggtcaagctgctggccgattatatccagcgcacgctcgaccgcggcggcaatctcgtcatcccgtcgttcgccgtcggacgcacgcaggagatgctctactatatccgcgagatccgcgagaaaaagctcgtcaccggtcacgacggcttccctgtctacgtggacagccccatggcaaacgaggcgacggcgatctatctccagtgcggccacgaatgtttcgacgaggagacccgcgctctcgtggacgccgggatcaaccccatctggtcggacggcatccgcatttccgtttcgagcgaggattccaaggccatcaacgaaaaccccgagcccaaggtcatcctctcggcgagcggcatgtgcgaggcgggacgcatccgtcaccatctcaagcacaatctctggcggaaggagagcacggtgctctttgtcggctatcaggcggagggaacgctcggccgcaggctctatgacggcgaaaagcatgtaaagctcttcggcgaggatatcgaggtcaactgcgagatcggcttcctgcccggcaagagcggccatgccgaccgcgacgggctcaccgcgtggctcgcgggctttgagaaaaagccgaagcttgtgttcgtgaaccacggcgaggacgccgtgacggacgcatttgccggctatctggagaccgagcacggctataaggcgttcgcgccttacagcggcacggtgttcgatctcgccgaggggaaattcctcgtctgtccgaagggcgtgccggtcaaaaaggcggagaccgcttcgggcgccaaggcgagcgggctttatcaaaagctcgtcgccgccggagaatcgctcctttctctcatccgcgcgagccgcggcaagccgaacaaaacgctcaaacacttcctttcggacgtggaagagcttctcaaaaaatatcgctga

SEQ ID NO: 1648 - DNA, 1737 bp, unclassified Firmicutes
atggcatttcccgaacggtttctcgacgagctgaccgagcgcaacgacattgtggacgtggtgagtcagtacgtccggctgacaaaaaagagcggggcgaacctcttcggtctgtgcccgttccacagcgagaaaacgccctcgttctccgttgcgcccgataagcagatctaccactgcttcggctgcggaaagggcggcggcgtcatcaacttcatcatggagatcgaaaatctctcgttcccggacgccgtggcgtttctggcgcggcgcgcgaacatgcctctgccggaggaagcgcagagcgaggatacgtcccgccgggcgcggctattggagctcaaccgggacgcggcgcggtttttccatgatatgctcaaatcgccgcagggcagcccggcgcaggactatgtccgccgccgcgccatttctcccgcgatggtcacgcgcttcggtctcggctttgcgcccgattcgtgggaatcgctcgcgaacgcgatgcgcaggaaggggtacagcgatcaggagatgttcgaggccgggctcgtgaagcacggcaagtccggcggcgtgtacgacgccttccgcaaccgcctcatgttcccggtcatcgatgtgcgcggcagcgtgatcggcttttccggccgcattctcggcgacggcgagccgaagtacttaaacagccccgaaacgcccgttttcagcaaaagccataatcttttcggtttgaatctggctaaaaagtcaaaaaacgggtatatcattctcgtagaaggcaacattgacgtcgtctccctgcatcaggcggggtttgacggcgcggtcgcctcgctcggcacgtcgctcacgcccgagcaggcgcggcttatttcgcgctacacgaacgaggtcgttctctgctacgacagcgacgaggcgggaaaaaaggcggcctcgcgcggcatcggcattctcgaaaagctcgatctcaaggtgcgcgtattgcaggtgccgggcgcgaaggacccggacgagttcatcaagaaaaacggcgcggacgccttccgcaatctcattgacgcgagcgccggacagatcgaataccggctgcgcgacgtggaagcgaaaaacccgcccacgaccgacgaggggcgcgtggactatctcaagagcgcggcctcgcttctggcgtcgctgccgggcgcggtcgagcgcgaggtatacgccgcgcgcgtggcggaaaaggcgggcgtatcgcgcgaggcggtgctgcaggaggccgaacggctgcgccgccgccgcattgccgacgcgaaaaagcgggaagcgcgcgacgccgcccgccccacgcagacggcgcagcccgcgcagcgctccatccggtacgacgatccgcgctcggcgcgcgcggaggaaggcctgatccggatactgtatctcgatccgggcgcggcgaagggcaagaccctgccgccgccggagagcttttcctctcccgtgctcgcgcggctctaccgcgagcttctgcgccgcgtgcagaccggcgagacgatctccatggcggtgctggcaggacagttcaccggcgacgagatgagccacttcacctcggtgctcggcgcgccggaggacctttcccacgcggacaaggccatatccgattacatagccgttattaccggacgcacggaggacgccgaggacgatctccgcgctctggcggaaaaatacagaaagacaaaaagttttggaggataa

SEQ ID NO: 1649 - DNA, 2349 bp, unclassified Firmicutes
atgagcgaaaataccagccgaatcatgacattgccgacgctcgcgctccgcggcgtttcagtatttcccggaacggtgctgcactttgatgtggagcgcccgatgagcattgccgcgctcaacgccgccatcggcaccgaccggatgatctttcttgtagcgcagcgtgacatcgcctgcgacacgccccgcgcagacgatctctacacggtcggcacgatctgccgcctgagccagatcctgcgcgcgcccggcggcggaaacgtcaaatgcatcgttgacgggctataccgcgcgaagctcctgcgcctcacggcggagaccccggcgctttgggcaaatgtccgggtgcttgccgataagccggtcgatacggacacgctcgaatgcacggcgcttatccgttcgtgcaacgacctctttgccgagtacgcctccgcgtcgggaacgatcggaccggagactctgcttcgtgtagcggaccggaaggagccgggcttcgtctcggactacattgcacagaacgtctttctgcagccggcggaaaagcagctgcttctggaagagtgctcgccgcttcagcggctcaccatgctctgcgatatgctgcaccgcgagctggagatcatggatatccagcagaatctccagtccacggcggcggagcgcgtggcgaaaaatcagaaggactatttcctgcgcgagcagatgcgcgtgatccaggaggaactgggggaagcgtccgaaacggacgatctcgacgaataccgccggaagatccttgatctcggactcgatgcggagatcgagaaaaagcttctcaaggagctctcccgtctcgccaagcagccgttcgggtcggcggaaggcgcggtgctgcggacctatcttgacgtctgtctcgagcttccgtggaacgagaggacgaaggacgtcaccgacatcgcccacgcgaaaaaggttctggatgaggatcactacggtcttacgaaggtcaaggaccgtatattggagtatcttgccgtgcggcagctctccgcgcaggtcaagggcggggtgctctgtctcgtagggcctccgggcgtcggcaagacgagcatcgccatgagcattgcccgcgcaacgaaccggaaatgcgcccgcatctccctcggcggcgtgcacgacgaagcggagatccgcggccaccggaaaacctatgtcggcgcgatgccggggcggatcatcgccggcattcagcaggcgggctcccggaatcccgtgctcgtgctcgacgagatcgataagcttggctcggactaccggggcgacccgtccgccgcactgctcgaagcgcttgacggcgagcagaacggctccttccgcgatcattttctggagatcccgttcgacctctccgaggtcttgttcatcacgacggccaacaccgccgacaccatcccccgcgccctgctcgaccgtatggaggtcatttccctcggcagctataccgacgaggaaaagctccagatcgccaagcagcatctgctgccgaagcagcggacgaagtacggcctttccggaaaccagctgcgtgtttcggacgatgccgtccgcgagatcatagcgctctatacccgcgagtcgggcgtgcgcatgcttgaacgcgaactggccgcgctctgccggaaggcggcccgcggcattgcctccggggagagaaggtctctgcggctgcgcgcgggcgagctcgagccgtggctcggccccgtcaaattcaagccggaggtcaacttctcgaccgattccgtaggtcttgttcacggccttgcgtggacgagcgtcggtggcgaggtgctcgatgtggagtgctctgtcgtgccgggcagcggaaagcttgagctgaccggaaatctcggcgatgtgatgaaggaatcgtgccaggcggcggtaacgtacatccgcagccgcacttccgagctcggcattgatccggctttccataagaataccgatattcatctgcatttcccggaaggcgccgtgccgaaggacggcccgagtgccggcgccgcgatctgtttgtgcgtcgtttccgcgcttacgaaccgtccggtccgcgccgatatcgccatgaccggtgagattacgctgcgcggccgcgtgctgccgatcggcggcattcaggaaaagacgatggcagcgctccgcgccgggatccatgaggtgcttctaccggaggacaacgtgagcgatcttgccgagatggatccgaacgtgcgcaacgccgtgaactttacggcggtttcccacatggatcaggtgctgaaaaaggcgctccgcccggcgggggagaaggtggcggaatga

SEQ ID NO: 1650 - DNA, 1320 bp, unclassified Firmicutes
gccggaaagaaaaggacaaagccgatgaataattcaaacgaaacgaaagaaaggaaaaagctggatctcaaacgaatcacggacagccgtgttttctggatgatcctctcgctgcttgcggcgtcgcttctctggatgtatgtgacgacgaccgagggcgttgaggtggaaaaaacgctcaccggcgtaaagatcgagtttctcggtgcggacgcgatgcgcgcgtcgagcgatctcatcgtcaccgagcaggaccgcaccaccgttaacctgacgctctccggcacgcgccgcgtgctctccaagctcacaaactccaacgtgacggcaacggtgaatctcagcaacgttgcggcggacgggcggtattcggtttcctacgatatctcctatcccgccggcgtgaacgcgaacgaaataacgctcgtccacacgtcatcggacgtcgtgaatttctatgtggacaagctagcccgcaagaccattgaggtcaagggcgcgttcaccggcaacacggcggacggatatcttgccgacgagagcatggtgttcgatcctctggtcgttgccatcagcgggccgaagacggtcatctccaaagtcgaccatgcgtttgtggccattacgcgtgaggacgtggaccgcacgctgagctattccacgacgtattctctcgtcgattccgacgataacccgatcgaagactcttccatccagcgtgaaacggaagaagtcaccgttacgctgaacgtgctctccacgaaggaagtgccgcttgacgtaacgatcatcgacggcggcggcgcaacgcgcgacgccaatacccgcattgacattgaaccgaagacgatcatgctcgcgggagatgcctctgccatcgacagcacgacgaagctcattctcggcacgatcaatctttcgagcttcgccacggacttctccgccacctacaccatcatcccgccgaacggcaccgagaatatgaccggcgttaccgaggcaacggtgagagtatccatcacgggcgttgctacgaagtccttctccgtgaatccggaaaatatcgtctgcatcaacgttcccgacggctacaccgcggagaacatcacgcaggcgctcaacgtaacggtccgcgccccgcaggaagtccttgaccagatcagcgaggtaaatctccgcgctgtggccgatctctccaatctcggcacgaacgcctccggcgttttcaccccgacggtcgagatcaagatcgacggcttccccgaagcgggctgcgtcggcgaatataagatctatatcacgctcaaggaaaagcattaa

SEQ ID NO: 1651 - DNA, 1059 bp, unclassified Firmicutes
atgaaaaaagaaacattcaatctggtcgtccgctttctggtgggcctggcgctgtcgctgctgatctgcgccggtatgatcatgacgggaaagctgggcagcgacaagcctctgctccagcaggccagcggcctgaagggcacggaaacggtgatgaccgtggacggcgagccggtggagtcctgggagtacctgtatatggtcacttactcggcccagaacctgtcctattacggcgtcaccgatctgagcacgcagctgggcgagggctttaccgccgccgactacgtggcacagcaggcggaggctcaggtgaagcagcaggccgctgtccggaagtgggccaaggatatgggcatcacgctgaccgaggatgacggagccaccctgcagcagcagaaggaagcctacggcgaggatctgcagaaggtattgcagatcaacggtctcacggaggagcagtatgaccagctgatgagcaccacgctgctgtataaccggctgtacgccgcctattgcaccacggatggcgcgctgcgtcccagcgacaaggatctgctggcgctggcggaggagcatagcctgatgaccgccgacgtgctgttcatcagcaccgccgagctggacgacgccgccaaggcggacgccaaggccctgatgggcgattatgcccgccagttgtccaccgccgacgacaaggccgccgcctttgccgcgttggaggcaggggagaacgtgaccgttctggccagcaacacctatgacggctgcgacgagaccacgctgaacaaggcgctggccgcactggcggaggatcaggtcagcgacgttatcgaggatgagaccggctactatgtggcgctgcgccgcgctgtggatctgaacgccgtggccgagatggcctttggcgaggatctgtccgcccgtatctccggcgcacaggtggagcataacgacagcgtgtacaacgccattgacctgacgtccttctacgcccgctataccgccggccagcagaagctctatgctcaactgacagcggagcagccgcagggctaa

SEQ ID NO: 1652 - DNA, 1269 bp, unclassified Firmicutes
atggagcttctggagaagctgacgatcctctcggacgccgccaagtatgacgccgcctgcacatccagcggcgtcaagcgcagctttcagccggggaaaatcggcaacacgtcctcctccatcgccgggtgctgtcacagcttttccgccgacgggcggtgcattacgctgctgaaggtgctgatgacaaactgttgcgtctatgactgcaagtactgcgtcaaccggcgctccaacgacgtgcagcgcaccgcattcacgccccgggagttggctgagctgaccatcggcttttatcggcggaattatattgagggactgtttctctcctccggtgtgctgcgcaatgccgactataccaccgaacagatgatccgcgccctgcgcattctgcggcaggactatggcttcaacggctatattcacgccaaggccatccccggcacgtcgccggagctggtgcagcagctgggactgttggccgaccgcatgagcgtcaatatcgagctgccctctcagcagggattgcaaacgctggcgccggataaatcgcgggaagcgatcctgcggcccatggggttgatccgggacaaggcgttcgagagccgtcaggagctggtcaagtacaagcacgcgccccgctttgccccggcgggacagagcacccagctgatcgtaggcgctacgcaggacaacgaccggcatatcctgcgcttgacggaggcgctctatcagaaataccggctcaagcgggtgttctattccgcctatgttccggtggtggaaaacagccttcttccctctctggataccaagccgccgctgctgcgggagcatcggctttatcaggcggactggctgctgcggttctatgggtttcaggcctccgagctgctggacgaggcgcacccgaattttgatccgcagctggatcccaagtgcagctgggcggtaacgcatctggagcagtttccggtggaggtcatgcgggcggattatgaaacgcttctgcgtgtgccgggcgtcggccccaccagcgccaagcgcatcgtctccgcccgccgcacggcgcaccttcgatttgaagatctgaaaaagctgggggtggtgctcaagcgggcgcagtttttcctgctttgcgatggccgcgccgcgccgggactccatttttcacccgctaccctcgtgcagcagctgaaggccgtggagcgcggcgcgctcccctccggggaaatggaacagctatcgctgttcgacgcagttggataa

SEQ ID NO: 1653 - DNA, 729 bp, unclassified Firmicutes
atgagaaacgaagaatttttgaggacggaaatgattctggggggcgacgcgctggacaggctgcgccgcagccacgtggcggtgttcggccttggcggagtgggcagctatgtggtggaggccctgtgccgggcaggcgtgggtgagctgacgctgattgacggcgacaccgtgtccgtcaccaacatcaatcgccagctctacgcgctgcactctaccgtgggacagcctaaggcggaggctgccgccgcccgatgccgggatatctgcccggacacggtggtgcatcccatcgtgggcatctacgacgccgcccaccgggaggagttctttgccgcccaatatgactacatcgtggacgccatcgatctggtcagctgcaagctggatctgatccagcaggccagagagcgccgtatcccgattctgacggcgctgggcaccggcaataaattgcagccggagctgctgaccatcaccgatattgccaagacctccggctgtccgctggcacgcgtcatgcgcaaggagctgcggggacggggcatccaccacctgaaggtggcgttcagccccgaacagccgggccagacccagcagctggaaacgccgccgccgggacggcgcagtgttccggccagcgtgtcgtgggtgccgccggtggcgggattgctgatggcgggcacggtggtgcaggatcttttgaacggaggagggctgatcccatga

SEQ ID NO: 1654 - DNA, 1734 bp, unclassified Firmicutes
actgctatcttctttcatttcctttcgctggaagccgcggcgcgtatgccgcggcttttggccgttctgagaatggcggcgcagacaaaattatatccccccacccggcttgcggggcggaggaatatctgctatgctgggcacagaaactacgagagaaaggaaatcacacccatgaccatgatgaaacgactggccgcgctggtgctggcgcttgccatgctgctgacgctggcggcctgcggcggagacaataccgacgggaacgacgtccagagcggcggctccacgctggtgtacggcagcggtgactatacccgcatcaaccccaccatggacgagcacggcgagatcaatgtgctgctgttcgacggccttaccgaccacgacggcgacggacaggtcattccccgtctggcggagcgctgggattacgaccccgacacgctgacctataccttctatctggcgcagggcgttacctggcacgacggccagcccttcaccgccgaggatgtgaagttcacctatgaggccatcatggatcccgacaacggctccgagaacgcccccaactacgaggatgtgacagatatcaccatcatcgacgaccacacggtgtcctttaccctgtccgccgtcaacacggcgtttctggagtacatgaccatggccatcctgcctcagcatctgctggagggggaggacatgcagacctccgatttcttccgggctccggtgggcaccgggccttataagctggagagctgggacgtgggccagtccattacgctggtgaagaatcccgactatttcgcgggagcggccaacatcgacaccatcgtgttcaagatcgtcaccgattccaacgccaaggccatgcaactgcaaaccggcgagctggatctggcgcaggtgacccccaaggacgccgcgtcctttgaagggaaagcgggttataccgtctatgacatgaccacctccgactaccggggcatcctgtataacttcaacaatacctactggcaggagaacgccgacctgatccccgccatcagctgcgctatcgaccggcaggccatcgtggacgcggtgctgctgggccggggcgaggtggcctacagtcccttgcagcggaacatctacaacgatcccgacgtggagcgctgggactatgatcccgcccgtgctgagcagctgctgaccgaggcaggctgcaccaaagacagcgagggcttctggcagcgcagcggccagcgcatcggctttaccatcaacgcttcgccggacgatcaggtgcgcatcgacatggcgcaggccgcggcccagcagctgcgctccatcggccttgacgtgcaggccgccatccccgccgagggcatcgactggggcgggcaggagtgctgcatcatcggctggggctccccctttgacgccgacgaccacacctataaggtgttcggcaccgacaagggcgccaactactccggctactccaacgcacaggtggacgaggcgttgaccaaggcccgccagaccgacgatcccgcagagcgggcggcggcctacgacgaattccagcaggcgctggcggcggctccggcctataccttcttctgctacatcgacgccatctacgtggcggcggacaaaattcagggcattacccccgacacagtgctgggccatcacggcgtgggcattttctggaatatctgtgattggacggtctga

SEQ ID NO: 1655 - DNA, 777 bp, unclassified Firmicutes
gtgctgcgccgtctcttttccattttcctgccgcggttggtgatgttttctttacaaatgggtagaatggtggtatacttctcctgtatgaccaccgcgaaagagaggacatctatgggaaagctgatcgtttttgagggaaccgacggttccggaaaggccacacagaccgagcttctgtgccagacgctgacggagcagggcgttccgttccgccgcctgtccttcccccggtacagcgaggaatcctcggcgctgatccggctgtatctgggcggcgcgttcggcagccatcccgatgatgtgaacgcctacgccgcgtccaccttttacgcggtggatcgctacgcctcctataagcaggactggggcgaatactaccggcagggcggactgctgatcgccgaccggtacaccacctccaacgcggtgcaccagacctccaagctgcccgaggcggaacgcaggccgtttctggactggctgttccacttcgagtatgacctgctggagctgccccgtcccacacgggtgctgtatctcgacctgcccacggagctgagcgagcagatgatgcgccagcgggagcaggccacccacaccaccgccgacgtacatgagcaggatgaggaatacctgcgccgctgccgggagaacgccgcgtttgtgacggaatactgcggctggacaaagatcgactgtgccagagacggcgtgatgcgcagccgcgaggagatccatgccgaggtgctggacaagctccgcggcctgctgtaa

SEQ ID NO: 1656 - DNA, 1599 bp, unclassified Firmicutes
atgctgaagcttttgctgaaaaagcagctgatggaagtgttccgcagctacttctacgacgcgaaaaagaacaaggcccgctccaaggggacgaccatcgcctatatcgtgatgttcgtgctgctgatggtgggcgtgctgggcggcatgttcgcggtgctggccaacgttatgtgcggccagctggcggagatgggtctggactggctgtacttcgtcatcatgggcatgatggcggtgtttctgggtgccttcggcagcgtgttcaacacctattcggggctgtatctggccaaggacaacgacctgctgctgtccatgcccattccggtgcggatcatcatggcgtcccggctgctgaatgtctatctgctgggactgatatactccggcatcgtgattttgccggtcatcatcgtgtactggtgcaccgtgccccttacggcggggatcattctgggcggcgtggtgctgctgatcgtcatctcgctgttcgtgctggcgctgtcctgcgtgctgggctgggtggtggcgaaaatcagcctgaagctgaagaacaagagctttatcacggtgctggtatcgctggtgtttttcgggttgtactatttcgtctgcttccggtctcaggcgctgatcggcagtctgctgctgaatgccgccagcgtcggtgataagatcaagggcagcgtctatcccctgtacctctttggccgggtgggctgcggcgacggcgtggcgatgctgatcgtctccgccgtggtgatcgccctgctggcgctggtgtggtatctcatcgcccgcagcttcctgaacatcgctaccgcctccggcaataccgccaaggcggtctatcgggagaaggccgccatgcagacttcccctgccgccgcgctgctgcgtaaggagttgggccgattcaccgccagtcccctctacatgctgaactgcggtctgggcacggtgtttctgctgattctggcggtggcggctcttatcaagggacgtgaggtgttcctgatgatgaacgccctgttcgccggaagcgaggacttcgtgccggtgctggcggcgctgtgtctgtgcctgctggcaggcagcaacgacattaccgcgccgtcggtgtcgctggagggcaagagcctgtggatcgcccagtcgctgcccatcaacccgtggcaggcgctgcgggccaagctggggctgcacctgctgatcacggagctgccgctgatgctgtgcgccgtgtgcgtggcggcggtgtccggtctggacttccttcacgcggcgctggtggtggtcatccccatggtatacgtggtgctgtccgccgccttcggcctgttcatggggctgaagcggcccaacctcacctggaccagcgaggtggctcccatcaagcaggggttggcggtattcctgtccatgttcggcggttgggtgctggcagcgggactgggcttcctgtactacgccctgatggctcatttgggcgcggcggcgttcctgctggcggccacggcgctgattatcgtgctggcgctggtgctgctgcggtggctgaaaacctccggtgcgaaaatctatgcgcatctgtaa

SEQ ID NO: 1657 - DNA, 942 bp, unclassified Firmicutes
atgaaagacatccgccgcgttgccatcgccggtgccggcaccatgggttactcgctggcccaggcattttccgccgccggatacccggtgaaactctatgacctgttccccgccgcgctggacaaggcgcgggacatgatcgccctgaaccagcagaccgaggtgaccagcggcaagctgacggcggagcagtccgccgccctgattgggcgtatctccctcacctcacagctggaggatctggcaaacaccgattttctggtggaggccattctggaaaagctggaggtcaagcacgatttctaccgccagctgtgcgccgtcgtggcggaggacgccatactgtgcagcaatacctccggattgagcatcaccaaaatagccgaggccgtcacccatccggagcggttcgccggaatgcactggatgaatccaccccatattattcccctcattgaaatcgtggagggcgaaaaaaccgcgccggagacagcggaatgcgtccgtcaggtggcgctgggcatgaagaaaaagcccgttatcgtcaaggacgcacccagcttcgtgctgaaccgcttgcagcaggccattctgcgggagtccctccacatcgtgcagcagggcattgccagtcccgaggcggtggacgacgtgatgaagtacgcgctgggtttccggtacgcctgctttggccccttcgagacctgcgatctgggcgggctggacattcaccacaacatcgccaagtacaccttcgccgacctgtgcaacgccaccgagccgtttggtctcatcagcgagtgcattgagcacgaccggctgggcgtgaagaacggcgcggggttctatgactactccgacggcaaggacgtggaggtgatccgccaccgggatcacatgttcaataagctggcgcaatgcttgtttgaggacgaggagtaa

SEQ ID NO: 1658 - DNA, 966 bp, unclassified Firmicutes
atgaaatacatcggcattgacattggcggcaccaacctgaaggcggggctggtggacgaaacaggacagctgctggctacccgcaaaatgaaggtggccggtatcgccgatccggcagcgctggcatggacgatccacgcgctgagcgtggatctgtgtaaggatttcggctgcgagctgacggatatcttttccatcggcgtgggctgtcccggcgcggtggagatccggggcggctccatcctgtatacctgcaacctgcccctgcggaacgtgccgcttcggcggctgttccaccagctcagcgacctgcccctgtacatagagaacgacgccaactgcgcggcactggcggagtactatgtaggcggcggccggggcagcaagcgctttatcaccgtcacgctgggcaccggcgtaggcggcggcatcatccataacggaaagatcttccacggctccaacggtatggcgggcgaggtgggccatatgtccatcgaaatggatggcgaggagtgcccctgcggacgccgcggctgctgggagcggtacgcttccgccaacgcactgaagcgccagaccgccaaggcgtggcaggagcaccccgacagcattctggcgcgggtcatcgccgaaaacgacaatcatgtgtccggccaatcggcctttatcgccgcccgtcagggctgtccggtggggcaggcggtctgcgaccggtatatccgctaccttactgccggaatcgtgaacatcatcaacatcttccagcctgacacgctggccattggcggcggcgtcagcaacgagtcggatgaacagctgctgcttcccctgcgccgtcaggtagcggctcatagtctgccctgcaactacgataaaatgacgaagatcgtcaaggcccagctgggcaacgacgccggtatcatcggcgcggcgctgctggggaagaacaagcggatcatctga

SEQ ID NO: 1659 - DNA, 1461 bp, unclassified Firmicutes
atgccgcagttgctttgcgctggaaaaaccacttttattttgtacatgtctgtgttaaaatatgtaaccgtgaagagaaaatcgcttcacgggaggaacgatatgaaaattattattgtcggcaacggcaaagtgggatatgccatcgccaattcgctggcgcaggaggatcacgatatcatcatggtggacgccagcaccagcgccctgcggaaagcggaaagcaccatggacgtgctgtgcgtggagggcaacggcgccagcatcagtgtgctgattgaggccggcgtccgcgacgccgatctggtgatcgccgtcaccaatcaggacgagatcaatctggtctgctgcctgatcgccaaaaagctgggagcgggccataccatcgcccgtgtccgcaacaccgattaccgccgggacgaggagatgctgaaaaaggagatcggtctggatatggtcatcaatcccgaccttgcggcggcgcaggaaatcgcccggatactggccttccccgccgccttcagtgtggagccctttgcccggggccgcatcgacatgatcggcttccaggtaatggagagcgacaccatctgcggcattcccctgagtcaggcccaccgtctgcgccaggcggaggtgctgatctgcgcggcggagcatcagggcgaatacatcattcccgacggcagcttcaccccctcggcaggcgaccgggtgtacatgctgggcgccaagccggagctgcagcggatgctgaaggaaatgggccgcacgtggcagaaggtgaaaaaggtgtccgtgctgggcggcagccgcagcgccatgtatttggcgtgggagctgcagaagaccaacaccagcgtccgcatcgtggaaatggatccagacaagtgcctgcgcctgtcggcccagctgccccacgtgctggtgattcagggagacggcaccgacaacaccctcttacagcaggaggggattctggatacggacgcctttgtggccgtcaccaaccgggacgaagagaacctactgatggccatgcacgcccagcgcagcggcgtacccaaggtactggccaagatgacccgccccaactatatggagctggtcaacagcaccggcatcgactccattatctctcccaaggacattatctccagccagatcctgcggtatgtgcgggcactgggtaatgccgagggcagcaaggtggaaagcctttacaagatgctgggcggtcacgtggaggcgctgtccttcaccgccgcggcttccagccacgaggtgctgggcaggcccctgaaggatctgccgctgcggaaaggactgctggtggctgccatcgtgcgggatcttcacaccatcatccccagcggtatgaccaccattgaggacggcgaccacgtggtggtggtgacacgcgccacaggactggacgacctgacggacattctggcgtga

SEQ ID NO: 1660 - DNA, 1269 bp, unclassified Firmicutes
atggcagttaacaccgatctctccctgcggcggcaggtgatctacagcgtgtttgttcgaggacacaccaaggagggcacgttccgtgcgctggagggcgatctcgaccgcctgaaagcgctgggtgcggatatcctgtggctgatgcccatccatcccattggtgaggagggccgcaagggcaccatgggcagcccctacgccatccgggattaccgggcggtgaaccccgacatgggcaccgtggacgacctgtgccatctggtggacgccatccacgaccggggcatgaagtgcatcatcgacgtagtgtataaccatacctcgccggactccgtgctggcggagacgcacccggagttctttttgcgggacgagcagggaagacccacccgcaaggtggccgactggtgggatattgtggatctggattacagcaaccgcgacctgtggcgctatcagatcgatacgctgaagcagtgggctgccatcgtggatggcttccgctgtgatgtagccagcgctgtgccggtggagttctggcggcaggcccgtgacgaggtggagaccgtccgtcccggctgtatctggctggcggagagcgttcacggcgctcatgttttggccatgcggaggatgggcgcttactgcgccacggataccgaggtgcagtccgtgttcgaccttacctatgattacgacgtttggcccttctatgagggcgtgctgaccggaaaggtgagtctgcgggagtacgcggatatcctgacctatcaggagctgacctatcccggcagctacgtcaaagcccggtatctggaaaatcacgacacaccccgtgccgccagctggatgagggacgatacccagctggacaactgggtggcgttcctctacttccagcggggcactgtgatgctctacagcggcatggaatacgcccccaaggaacgggtggacttctttgaaaatcagagcaactatggcgacatgcagcgggacatgcagctctatctgcgaaagctgaaggagctgaagcagacgctgcccatcaccggcggctattggctggaggagagaaacggcctgctgctgggacattacgagggcccggagggcaaggcgctgggcgtattcgacctgtgcggacagggcgcggccgatgtggcggtagagctgccggacggcgactatcccaaccgtctgggaggcagcgtgaccgtaaagaacgggcggcttgcttttgatggtaagcctgtggtgatttga

SEQ ID NO: 1661 - DNA, 822 bp, unclassified Firmicutes
atgcgtcctgacggcaagcgggtcaaagaccttccgcccattgtggcggccattccctatatcatgcccaagcggtatgacgcccagaacaccattaccgagtatattgacgaggagctgatcaagtcctacatccgggaaaagcgccgtaccggcatccggatcaaccatatggccgtcatcatcgccgcctactaccgggccgtgatgtataaccccaagctgaactacttcatcatgaacagcaaggtatacaagcggaaccacttctgcgtgtccttcgtgatcctgaagaagctggcggacggacggcctgacgaaacatccctgaaaattttcctgacgccggaggacaccgtgttctccatccagcagaagatcaccgacgccgtgtccgccaacgccgccaccgagcagaagaacaataccgacaagttcgcccggatgatgttctccatcccgctgctgcccaagctcgtcatctggctggcctaccatctggataagctgggtctgctgccccggaagatcatcgacctcagccccttccataccagcatgttcatcaccaatctggcctccatcaagaccagctatatccaccaccattgctacgagttcggtaccaccagcgtgtttgtctgcatgggcaagcctgtgccggattacatgagcggcaatctcaacaagaagatcatgccgctgggtgtggtgatggacgagcggatctgcaccggctatgaatacgccgccttctgcaacgatttccgcaagttcctccgcaagccggaggaactggaggttccctatcaggcggaataa

SEQ ID NO: 1662 - DNA, 1212 bp, unclassified Firmicutes
atggcggatcgggtaatcctgcattgcgatctgaactgctttttcgcgtcggtggagcttctgcgctatccggcgctgcgggacgttcccgtggcggtgtgcggcgacccggaatcccgccacggcatcgtactggccaaaaacgaggccgccaagcaactgggcgtgaaaacggcggagaccatctggcaggcccggcagaaggcgccccacctcattaccctgccgccccaccacggcctgtaccgggagtacagccaaaaggtcaacgccatctacggccagtgcactgatctggtggagcccttcggcatcgacgaaagctggctggacattaccggcagcatgcacctgttcggcggcgacggcaaagccatcgccgaccagctgcgccagcgtctgcgggaggagctggggctgaccatctccgtgggcgtcagcttcaacaagatcttcgccaagctgggcagtgactacaaaaagcccgacgccaccaccgtcatcgaccgggacaactggcagcgcatcgtctggccgctgccggtgggtgacctgctgggggtgggacgctccacccagaagctgctgcggcagtacggcgtggagaccatcggccagctggcggcatttccccgtgaaacgctggagaccctgatgggcaagcacggcgcacagctgcacgactacgccaacggacaggagaacagtcccgtccgtcctcagcacgaggcggagccggtgaaatccgtgggcaacggcaccaccttccccaccaacctgacccgctgggagcaggtgcgcgccggactgtcggcgcgggcggacagcgtggcgggccgtctgcggcggtacggcatgtactgcggcggcgtggcgctgaccatccggtacgcggacttccgccagttcacccgccagacccggctgagcggccccacccatctgcaaaaggatatctatcgggcggcgctgacgctggcccagcaggcgtggcacgcgccggagcccatccgcgccctgacggtgacggcgctgtacctgacgccggacggtgaaagctaccagcagctcgacctgctggcgggcgacacgacccgccgggacgagaagcaggagcggctggaacaggccatggacgccatccgcggcaagtacggcaagggctccatcaccttcggcaacacgggaaagttcagcggctgggacgattga

SEQ ID NO: 1663 - DNA, 1383 bp, unclassified Firmicutes
atgagcaacagcagcgggactctggaaaaattcgcaggttcgttgagccagctgatccggagcgagtatcatatcggcgaagaatattaccggggcgacgtaaagcgcggtctgcgcaacaacgacggtaccggcgttctggcaggcgtgtccaaggtgggcagcgtgcagggctatttcattcaggacggccagcgcattcccaagcccggccagctgtactaccgcggtatcgagctgaacgagatcgtggaggctcaccgcaaggcgggcaccttcggctatgaggaggtggcatatctgctgctgttcggctatctgccctcccagtcagagttggccagcttcaacgagatcatgaaccgcgcccggaagctgccggacggctttaccgaggatatgatcatgcggcaccccagccggaacatcatgaacaagctggcccgcagtgtgctggcgctgtattcctatgacgacaacccggacgatacctccgtggagaatatgctgctgcaatccatcaagctggtgggctgcttcccctctatcgtggccaacgcctacgcggtgaagcggcactatttccagggagattccctgcacatccacttcccggtggacgatctgtccacggcggaaaactttctgcggatgatccgccccgacaagcagtacaccgaggaggaagcccatctgctggacatgatgctgatggtgcatgccgagcacggcggcggcaacaactccaccttcgtgtgccgcgccatgtcctccagcggtacggacacctacagcgccatcgccggagctgtgggctccctgaagggcccgctgcacggcggcgccaacgccaaggtgatggagatgttccagtacatcaaggaaaatgtggatccccacgacgacggctctatccgggattatctgaacaagctgctggacggcgaggccggtgacaagtccggaaagctctacggtctgggccacgcggtgtataccatttccgacccccgtgcggtgctgctgaagaagtacgcccagcacatggcggagatcaagggctacgccgacgagttcgctctgctgcaaaaggtggaggagctgggcattccgctggtgcaggagcgccgccacagcgacacccccatgtgcgccaatgtggacatgtattccggtctggtatacaccatgctgggcattccggaggatgtgttcacgccgctgttcgcctcggcccgtatcgcaggctggtgcgccaaccgcatggaggaggtcatcacctgccaccggatcatgcgtcccgcctaccgtgccgtgaccatcaaggggcattacgttcccatcgaggagcgtaccgccaagctggtgtcacccgaagcgtga

SEQ ID NO: 1664 - DNA, 1251 bp, unclassified Firmicutes
atgggcacgattcccattgacggacactacccccatcaacaaacaaaggagaacgccatggacaaaaatgaaaaaaccgtggaaaccacggtgttcgactatctgcgctggcggggcgacctgaccttcgcccaggacagctttaacgaggtggacaatctggtgctgtgcatcatcgcctacctgaacttccgccgctttccggagctgaaaagccgcgaggcggacaaggccgtgccgctgggcgacgtggtcgcccgcatgacggcggaggacgagcagcaagggctgtcccccaacgactacatccccctgatgcgtctggcggcggagtcccagcggttcggcggcgtgcggatgctgggctatgaggcggtgcgggacgaggaaaaggagatgcagctggacgcggtgtccttcctgattccggacggcacgctgttctgcgcctttatgggcaccgaccggtcgctggtgggctggaaggagaacctgaacctcagcttcatggacgcggtgcctgcccagaccggcgcggtggcctacgtggaggacatggcgcggcactgccccgaccgtccgctgcggatcggtggccactccaagggcggcaatctggcggcctacgccgcgctgcacatcgacggcgcattgcagcgcacccgtctgctggacgcctataacaacgacggccccggcttccgcaaggacgtgaccgacacggaggagtaccgccgggtggcggcgaagctccacacctatatccccgcctcctccatcgtgggggtactgctggagcacaccgaggactacaccgtggtggccagcagcagccgtgccgtcatgcagcacgagccgctgacgtggacggtacagggacggcagttcgtccggtgtccggagcgctcggagctgggcaaggcctccgacgacgtgctgcgccagtggatcgcctccatgagccgacaggagcgggaggagttctccgaatccctgtacgacatgctgacccagggcggcaagctgcggtcgctggaggaggtcaggcagaaggacattctccggctgctggccgccgacgagaagaacaagggcatcgtgtcggaggtgctgcgccgtctggtgacggacgtgagggacgaggtgctgcgctcggcagaggccggtctgaagggcacggcggagacgctgaaggagaccgccggaaatctctatcaggcgggacagaaggcgctggagaagcggaagtaa

SEQ ID NO: 1665 - DNA, 1743 bp, unclassified Firmicutes
gtgcgtgattttgacggtcgtgatctgccacgtgttctaaactggcatgaaatcttcgatttcattgccaagggagatgcggtcggctgcgcgcacccgttgggtgcactggcgaccgagaagaatttttctgacgcacatgtcgtcagaaaaatgattgaaatgattcgcgtctgcggacgcgaactctgcgaggcctttttggctgcggatatgaacgctgcgaggctatttgacaaagctgccgcttccggtcacggaagcggcagcttctttcttttgcttgcaaagccgggcgttgtgtggtattctgacggggaaaagaaaaccagaaggaggcatttatccatgagtgaaaagggtaagctgagcaaggcgctgctgtacgcgccggagaacggctttgaccgtctgccggagggcgaaaaggccgccatgcacgactattgcgagtcctataaggactttctgaaccacggcaagaccgagcggctgtgcgtggaatactgcattgagctggcgaagcagcacggctttgtggagtttcagccgggtatggcgctgaaaaccggcgacaaggtgtactgcaacaaccggggcaagggcatcatgctggcggtgatcggcaaagagccgctgagtgagggcgccaacatcgccgccgcccacaccgacgcgccccgccttgacctgaagccccgtcccctgtacgaggaggcggagatggcctatttcaagacccaccactacggcggcatccgcaagtatcagtgggtgacgatcccgctggagctgcacggcgtggtgacgctctcggacggcacggtgctgcccgtccacatcggcgacaagccggaggatcctcagttcatcatcaacgacctgctgccccatctgggccgcgagcagggcaagaagcccctgaacgaggccattcccagcgagagtctgaacatcctcgtgggctctcagccggtggaggacgaggacgagaagtcccggttcaagctggcggtcatgcagctgctgcacgagaagtacggcatggtggaggaggactttatctccgccgagctggaggctgttcccgccgggcaggcacgggatatcggctttgaccgcagcttcatcgccagctacggccacgacgaccgggtatgcgcctacgcggagctggcgggcctgttcgacgcggtggagccccagcgcaccgccgtgtgcatcttcgccgacaaggaggagatcggcagcgagggcgtgtccggcatgctgtccgccgcctttgacaagttcatgggcgagctgtgcgacacccagggcgtgctgctgcgggactgcttcgccaagtccttctgcgtcagcgccgacgtgaccgccgcctacgaccccaactttgccgaggtatacgacaagcggaattccgcgttcatcaactacggcgtgggcctgtgcaagtacaccggagcaggcggcaagtccggcgcgtccgacgccagcgccgaggtggtgggcaagctgcgccgcctgctgaatgaggaaaaggtgttctggcagatggcggagctgggcaagaccgacgccggcggcggcggcaccgtggccaagttcatggcccagcggaacatcgacaccatcgacgcgggcgtgccggtgctgagcatgcacgccccctatgagacggtggcgaagctggactgctacatgacctaccggtgcatgaaggcggtatttgagaaggcgtaa

SEQ ID NO: 1666 - DNA, 1104 bp, unclassified Firmicutes
atgcggatcaatgaattatccctgtcgggctttcgcaactaccatcgccagagcctgaccttcgaccccgactgcaacgtgatctacggcgaaaacgcacagggcaagaccaaccttctggaagcggtggtctatctctcttgcggcaagtcgccccgcacccacgcggacagggagctgatcggcttcgacgcgcccggcgcggtgctggagggccgcatcctgtcacgtgaccgggactttgtgacccgtatcgagctgaaccggggcaaaaagcggaagatgaccgttaacggcgtggccgcaaaaaacgccgccgctctctctgacgtgctgcacacggtgtttttcgcgccggaggatctgtttctcatccgggacggcgcggcggcaaggcgaaagttcatggatctgtccctgtgccagctgcggccccggtacgccgaggcgctggcggagtacagccgcctgtacgagcacaagacccgtatcctccgggacagcgaggactttcccggcttgctggacaccctgccggagttcaaccaccggctcattcaggtgggcgcggtgctgatccgctaccgggcgtccttctgcgaaaagctgcggcagtacgccgcccaggctcacgccgaatgcagcggcggccgcgaggagctgtccttgcagtataagaccgtcaaaactgtcaccgatccgctggcggatgcttcggtgttggcgcagcagctggcggagcatcagcagagccactacgccgccgagatcgcgtcgcgcctgtgtctcagcggcccccacaaggacgatatcgaggtgtccgtcaacggccacagcgcccggcagttctgctcacaggggcaggtgcggacggcggcgctggccctgaagctggcggaacgggagatccacaaggaaaccttcggggaataccccgtcatgctgctggacgatgtgctctccgagcttgaccctctgcggcaggagtacgtcctcaaccgcatcgccggaggacaggtgttcatcacctgttgtgaaaacgaccgtctggacacgctgctgaacggcaaagtgtttcacgtgaaaaacggggaggtgctgtga

SEQ ID NO: 1667 - DNA, 1854 bp, unclassified Firmicutes
atgctggaatcgatccacagcccctccgatgtgaagcggctgaacagtacccagacccgtcagctttgcgatgagcttcgcacctttctggtgcgcagcgtggcaaagaccggcggccatctggcatccaatctgggcgtggtggagctgactgtcgccatccaccgggtgtttgacacgtcccgcgaccggctggtgttcgacgtaggacaccagtgctatgtgcataaaattttaacgggccgccgggagcagatggataccctgcggcagtttggcgggctttccggcttccccaagccctatgagagcgttcacgacgcctttatggcaggacatgcttccaactctgtgtcggtggcgctgggcatggcgaaagcacgcaccatgcgccatgaaaactacgacgtgatcgccttgatcggtgacggtgcgctgggcggcggtctcagctttgaggggctgaataatgccggagcctccggcgagcccatgatcgtcattttgaatgacaacggcatgtccatcgctcccaatgtgggcgcggtcagccgccatttgtcccgtttgcggacgaagccgggctactatgaattcaagaagcgttaccgccagctgctggggaacggcccggtgggcggaaagctctatcacgtcagccatgacatcaagacggcgctgaaaaagacgcttctgccggacagctccatgtttgagagtatgggcttttcctacatgggtccggtggacggccacgatgtggaagcgctgacgcaatctctgcaatgggcgcgggagcagcgctgtcccgtgctgctgcatgtgcgcactgtaaaagggaagggctattctctcgccgaggagcgccccgccgactatcacggcgtatcgccctttgatccggtcaccggtaagccactgcgtactgcaaaaatggatttctcccacgtgttcggccaggagctgaccgcgctggcaggggaggacgggcgcgtatgcgccatcaccgccgccatgcaggagggcaccggactgacggagttcgcccggaaatatcccgaccgcctttttgacgtaggtattgccgagggacatgccgtgtccatggcgggcggcatggcgaagcagggacttgttccggtgtttgccgtatactccagctttttgcagcggggctacgaccagctgcttcaggatgtggcgctggatggcctgcatgtggtgctgggcgttgaccgggcgggtctcgtgggcgctgacggcgagacgcaccacggctgcttcgatgccctgtatctctctcaggtgccccacatgacggtgctgtgccccgccagctttgccgagctgcggcagatgctgcgacgggcggtgttggagctgaccggccctgttgctgtccgctatccccgcggcggcgagggtgcgtatcaggactgctgcggcaatgagacctttacgcaggtgcgtccgggagcggactgcaccatcctgacctacggcgtcctgatcaacgaagcgctggcggcggcggagctgctgcatgaagcgggggtcgagacccgggtggtgaagctgaacgccatcgcgccgctggacggcaacgcggtgctggcggcgctgggcagtgaaaagcgcctgctagtgctggaggactgcgtgggcagcggctgtgtaggccagcggctgacggccattctggctcagcgtggccggatgccggagcggcttattttgaagaacctgggggacaccatcccctgtcacggcaccgtgccgcagctgtatgctcagtgcgggctggatgcggcaagtgtggcggccgcgttgaaggaggcgtgccatgagcaataa

SEQ ID NO: 1668 - DNA, 1035 bp, unclassified Firmicutes
atgaaaaaagagatcgcgcccaaggtaacgctgcgtgtcaaattttttctgatctgcatggcagaatttatcgccgtggtgctgctgtccgaattggcgggttggctcctgaagcgctggctgggcgttaccatggacattcccatcttcgtctgggcgatactgttcagcgttgtggtgggcggcgctgtcaccaactatatcacccattccttcatcgaccccatcacccgcctgggaaaggccatgaaggaggtagcgggcggaaattttcatgtggccatgcaaagcgacagcaagttgaaggaagtacgggatatttatgaaagcttcaatcggatggtcaaggagctgggaaacaccgagacgctgcaaacagatttcatttccagcgtgtcccacgaattcaagacgcccatcaacgccattgaggggtacgcctctctcctgcaggatcaccaccagtctccggaggagcaggagacatacattgaaaaaatcctgttcaacaccaggcggctgtccacgctgacgggcaacatcctgctgctgtccaagatcaacaaccagtctatccggccacagcgcacagtattccgtcttgacgagcagatacggcaggccattgtggcgctggaacagaaatggacggagaagaatatcgactttgacgtagaactggataaggtaatgtacagcggctatgaaagcctgctgctccatgtctggagcaacctcatcgacaacgccatcaaatttgatccgccgggcggcatgatctgccttcgtctacggcaaaccggcgatgaggcggtgttcaccattgatgacaacggccccggcgtagcgccagaggagcagaagcggatcttccataagttctaccagagcgacagctcccgcgaaatgagcggcaacggtctgggactggcgctggtcaagcagatcgtggaattcagcggcggaacagtttccgttgagaatctgccggaagcgggttgccgctttacggtgcggctccccatgcagccgtga

SEQ ID NO: 1669 - DNA, 855 bp, unclassified Firmicutes
atggcaaccattaccaatcaggcggcactgtcctataacggcgtcaccaccctttccaatatcgcggtaggcgaattggtggaggtgctgaccgccaccaagaccgccgccgacaccacttacaccgcaggcggcgtcaagaccttcgtcatctcgctggtgaactccagcgcggcggcgctgacgggtctgaccgttaccgacacgctgggcagctatacgttcagcggcaacaccctgtaccccctgacctatgtgaccggctcgctgctgtactacgtgaacggtgcattgcaggccacccccaccgtcacggccaccgcgccgctgaccgtcaccggcgtcactgttccggcaggcggcagcgccatgctgatctacaccgccagagtcaacgaatacgctccgctgggggtggaggacagcatcaccaacaccgccaccatcaccggcggcgggctgacctcgtccgttaccgccacggagaccatcaacgcctcccccgcgccccagttggccatcagcaagagcatcagccccaccatggtggcggagaacggtacgctgacctatacgctgacgctgcagaaccggggcaacaccgccgccgacgcgggagatgaactggtcatcaccgacacgttcgaccccattctcaagaacctgacggtgcgcttcaatggtaccctgtggacgcaaggcgtccactacacctacgacgaaaccaccggtacgttcgccacggtggtgggcgcgctgacggtgcccgccgccacgtttacccaggatgccgccaccggtgtgttcacggtggatcccggcacctccgagctgaccatcaccgggtcgctgtaa

SEQ ID NO: 1670 - DNA, 1038 bp, unclassified Firmicutes
atggaaacggcagtgaagctgacaaaattggcctcctgcgccggttgcggcgcgaaggtgggcgcgggaacgctggtgcatctgctggagggcttccgcacccacagcgatccccggctgctggtgggctttgacaagtcggacgacgccagcgtgtactatctggacgagaatacggcgctggtacagaccaccgacttctttccgcctatcgtggacgatccattcctgtacggccagatcgccgcgaccaacgccatcagcgacgtatacgccatgggcggtgagccgaagctggcgctgaacatcatgtgcatcccagaagccatgacggccgacatggtgcaggagctgctgcggggcggctacgacaaggcctatgaagcgggcgtcatcatcaccggcggacacaccatccacggcgcggagcccatctacggccttgcagtgtccggattcctgcatccggatcgcattctcaccaacagcggcgcaaagcccggcgacatactaatcctgacaaagccgctgggcgtgggcgtgctgactaccgccgccaaggcaggactggtgggcggtgacgtgatgggccgcatttatcgccagatggcaacgctgaacaaggccgcccgcgacattatggtgaaataccgcgttcacagctgcaccgacgtgacaggctttgccctgctgggccacagcttcgagatggcgcagggcagcggctgcaccgttcatatccagagccggaacgtccccttccatccggaagcctgggaatttgccgacatgggctttctccctgccggagcctaccgcaaccgggactatgccgaggcgggcgttaccgtccgcaataacgttagccgcaccatgcaggatctgctgtacgatccccagaccagcggcggcctgctgatggcggtggacgccgccgacgctgaaaagtgcctgcgtgagctgcaagacgccatcccccaagtggccgttgtgggctatgtgacggagcggcaggaaaactggattatcctggagtaa

SEQ ID NO: 1671 - DNA, 1272 bp, unclassified Firmicutes
atgacactggacgaagccttacattacatccacgccgtctgctggaagggcagcatccccggtctggagcgtatcagcgccctgctggacaagatgggtcatccggagcggacgctgaaatttgttcacgtcaccggcaccaacggcaagggctccacctgcgccatggtggcctcggtgctgcggcaggcgggctatcgcaccggcctgtacacctcgccctacatcgtccgcttcaacgagcggatgcagatcaacggcgagcagatctccgacgacgagctgtgcgccatcaccgaggagatcaagccgctggccgacagcattttcgagcagcccaccgagtttgagatggtcacggccattgccttcgcgtggtttgcccgccgccggtgcgacatcgtggtgtgcgaggtaggcatgggcggcgagttcgacgccaccaacgtcatcggcgctcccgaggctgccgtgctgtgcaacatcggccttgaccacacggaggtgctgggcgacacactggagaagatcgccgccaccaagagcggcatcatcaagcccggctgcgacgcggtgctgtaccgctccaccgacggcgtggaagccgtggtggagcagcgctgccgcgaggtgggcgcagcgctccacaaggtggactttacccagctgcacctgcggcagcattcgctggaggggcaggtcttcgacttcggcggcaggaaaaatctccatctccccctgctgggcgagcatcagctccacaatgccgccgtggcgctgaccacgctggacgtgctgcaaaagcggggctggaacatcaccgaggaggatatccgtcaggggctgtcccgcgtcacgtggccgggccggttccagatcatccgccgcgacccgctgttcctcattgacggcggccacaatccccagtgtattcaggcgctggcccaaaatatcgcggattatttgccgaaccgtcccctgacggtgctgaccggtgtattgagcgacaaggattaccactgcatgtaccgcagtgtggcggatcacgcggtggagttcatcactgtcaccccggacaatccccgcgccctgacggcgcaggagctggcgaaatatctggccagcttcggcaagcccgtcaccccctgcgacacggtggcggacggcgtccgccttgccatcgaccacgcgggtaaggacggtaccgtgctgtgctacggctccctgtacctgctgggcgacgtgatcaactcagttgaagaaaccaaatga

SEQ ID NO: 1672 - DNA, 2289 bp, unclassified Firmicutes
atgcggacattggcgatcctggcgttctccttcgcggtgggtacgctggcggcggcactggagccgaagggcggctggtggcttcctgccgcggcggtgctgctggcactggcggttgcggcgttcttcctgcgtaagcgtttgggagacaaaggccgccgtgcgctgatctgcgcgtcgctggcggcgtcgctgctgtatttcaccggctatcagcattgggtacagcagccggtgctggacaagtgcggacaggagctgcccttctccggcgtggtctgcggcgaagcgtgggaaacggactacggcgcgcgggtgacgatccggctggacggccatccctttgccaaagcggtgctgtacggcgatgaaacactgctgacgctggagccgggcgataccgtgtccggtacggcccggtggaacgacgccgcgcaggtggcggatacccggctgaccacctttacctccaagggtatttacgccctgctgtacgccagaggggagctggacgtgaccgccggttcctccaacagcctgcggtggctgccgcaacgggcgggacttgcctttcaggagaagattcgggccatctgggacgatccccggacagcgggcatcatctctgccgagctgaccggcagcaaatatgacattgccgacgaggattacctcgtcatgcggggtgcgggtctggcgcacctgttcgcggtgtcgggccttcactgcgcctttctggtgacgctgctggctctgctgctgccccggtcacggcggcggctgttctgcggtgttaccatctgcgtgctgctgttctatatgaatatggtggggttgtcgccctcggtggttcgtgcctgcatcatgcagatcgcactgctgctggcgcccctgttccgccgggacagcgactcctttaccagtctgggcatggcgctgctggtgattttgctgggcaatccctttgccgccgcgtccgtcagcttccagctgagctttgcggccaccttcggcattgtgatcctgtccggacggctgtaccgcctgtttttcgactggtatcaggggaagaataagcatgtgcggcgtgtgctggcctttgccggcgccaatctggcggtatcgctcagcgccaccatctgcaccgtaccgctggtggcctactatttcaatacgctgtcgctggtgtcgccgctggccaacctgctggcggtgcctgtggcggggtacggcttcatggcgtccttcgtcacggtgctggcgggcttcgtgtggcttccggcggccagagtgctgggttgggcggcctatggtctgatccatgcggtgctgtggatcgcgtgggtcttgacccgatggcggtatcacgccgtctattttgataaccactatctgcggctgtggatggtggggacatatctgagcttcagcctgtgcgccgcggtgaagaaatggcgcaagcggaagtatcttatcgccctgctggcaacggtgctgacgctggcgctggccatctggagcaacacgctggtctaccgtgcgggcaacatgaacgtggcggtgctggacgtgggacagggggagagcgtagccctccattccgagggacaggcccttctggtggactgcggcagctccaacagctatatcgacgcgggcgccgtggcggcggatcagctgtccgctatgggaatccaccggctgaaggcggtagccgtcacccatttccacgccgaccataccaacggtctgtatacgctgctgtcccggataccggtggataccctgtacctgccggatatagaggacgagtacggcgtccgggagcgtctgctggaagcggcggagcagtatgatattcaggtggagtgggtgcgccgcaccacgctggcggcagcgggcgacatggtggtgacgctgtacccgccggtaggcgagggtgacatgaacgagcagggtctgtccgtgctgggcagcgcccacgactttgacgtgctcatcaccggcgatatgaaggataccactgagcgggcgctgctcgaaaaatatcccatcccggatatcgaggtgctggtggtgggccatcacggctccaaatacagctcctgccgggagtttctggcggccacgcggccggagatcgccgtcatcagcgtgggccgcaacagctacggccatcccgcgccggaaacgctggagcgcttggaggaagcgggcgctctcgtgcgccgcaccgaccgggagggcaccatcaccattcatggaggagacgaacatggcggaacataa

SEQ ID NO: 1673 - DNA, 1353 bp, unclassified Firmicutes
ctgccagatgaagctgaccatccggggcgcggagtgatgggcggcgtggttgtctgctttgccctgtttctggcggcgatggcggtctgccttgtcatggactggtcgttcctgtgggcgctgctgctgggtctggcgctgttcacgctccacggccgcaagcagggccacagcctgcaaaccatgtggggcatggcctggtcagagggccgcaaggtgctgatcgtactgcgaatctttgtgttcatcggagccatcaccgccatgtggcgcagcggcggcaccatcgtgtttttcatctactacggcgtacaggccatctctcccaagctgttcgtgctggtggcctttctgctgacggcgctgatcgcctacgcactgggcacgtccttcggcgttatcggcacggcgggtatcgtgctgatggctctggcccgctccggcggcgtcagcgaggcggtggcggcaggcgcgatcctgtccggcgcgtatttcggcgaccggtgctctcccgcgtcctcctctgccgcgctggtggcggcggagacggggacgaagctctatgacaacctgcggaacatgctgcgcaccggcgcgctgccggtggtgctgaccatcgccgtctacgctgtgctgtccgtccgccaccccatcacggcggtggacgagagcctgctgcaagccctgcgggacagcgctgtcatctccctgtgggcgctgctgccggcggcggtgatgctggtgctgccgctggtgaaggtgccggtgctcatcagcattgccctcagtgtggcggcggcgggactggtcagcgtgttcgtgcagggcatgacggtgtgggacatgctgaaaacggcggtggtaggctactatcccgccacgggacagctgaaggatatcctctccggcggcggtatcgtctccatggtgaagccggcggcgctggtgtttaccacggggctgctggcaggtctgctggacggtatcggcgtgctgaacggcgcggtgggactggtggaaaagctggcccggcgctggggccgctttgccgcttcggcggcggtgagtctgggcgcgggtatgatcttctgcaaccagtcggtggtgatcgtcatgggcaatcagctgctgcaccgctgctataccgaccccaatgagcaggcggtggacatggaaaacagcggcatcgtcctgtcggcgctgatcccgtggaacattgcgtgcagcatcccattggtgatgctgggggtggatcagcgggccattccttacgccgtgctgctgtacatgatcccgctgatctacggcctgacaaaacgatatgtgtatccccataaggagaaatgtgtatga

SEQ ID NO: 1674 - DNA, 1662 bp, unclassified Firmicutes
atgaaacctaccaaacgactactcgccttgcttctggcgctgtgcatggcgctgacgcttgccgcctgcggcgaagcggagccggagcatatgaccgtccgcgccgcattggtggacgcgccccacacgctggatccggcgctggccgtcaccgaaacggaaaagaccgtggacgcccagctgtttgaaaatctgatgaagatcaacaccgccggtgcccttacccccgcgcaggccgccagctatacctataccgacaacatggacggcaccgagacgtataccttcaccctccgcaatgatatctactggtcggacggccagaaggtcacggcgggcgacttcgtttacgcctggcagcgtctggtggatccggagaccaactccccccacgcttccatcctgaacatggtggcgggctatgccgacgcggtgtccggcgatccggcggctctgcaggtctgggccagcgacgaccgcacccttgtggtggtcatcgagggtcactgctcctacttcctgccggtggtgtgcacggcggtgtccaccatgccggtgcgcgccagcgtcacccagacgccggagggggagggcgacaccgctgacacggccgatgataccgaaccgacgcagcggcccgactggtcgctgtcctccgccacgctgctgaccaacggcccctacgccgtctcgtccatgacggcggacggcctgaacgccagcgccgccaagaagtactatgacgcccggcgccttggccccgatcagctggagttcgtctatgccgccaattccgccgacgccatggcgctgtatgacagcggcgacgtggacttcgtgctggacgccggagagacggagggcgcggtggaggcttcctccgccgtggtcaagaccgtgctggtgaaccagatggccaccagcttgagcgagagcgtccgtcaggccatgtccatggtgattgaccgcaacgcactggcggagctggccggcggggaggacgaggtgttccgcgccgccgacggcctgatccccgacggtatcaccacctctcagggcgagtccttccgtcaggccaacggcccggccatcgacaacgatccggagaaatacgaccagcggtgccagcaggcgacggagctgctgcgcagcgccggttatacccccaccacgctggagcatatgaacacggtgacgttgctgtacgaaaataccgccgaaaacgccaaggtggctcaggcgctgcaaaccgtctggcgcgaaaagctgaacatccgcatcaccgtccgtgccgtggcgccggaggatatgatgaccaccctgaaaagcggtgagttctcgctggcgctgaccagcgtcaacggcgaccgcaacacggcgctgagctacctgaaccgcttcagcagcagccagctggagaattacggccagtattactccaacgcctacgatatgctgatccgcaccgctgccaactccagcagcgacgaggcgcgggacgcctatctggcggacgcggagaccatgctgctggacagcggctacgtgatgcccctgtataacgagacgtatacgtggctgctgcgggacaccttcaccggcctgcacaccgacggcatgggggtctattacttccagaatgtggtaaaaaccagctcgtaa

SEQ ID NO: 1675 - DNA, 1344 bp, unclassified Firmicutes
atgcccacctatccggtcgttcccaccttcatcaccgttcatctgggcctgcccgacagcagcgcccccaatgtgaccgttccctttaccagctacatcaagaacgtggcctcccacgagctgtaccccacctggccggaggcggcgctgcgggccaatatcatggcccagatctcctttgccctgaaccgggtgtacacagagttttaccgcagccggggctatgacttcgatatcaccagcaccacccagcgggatcaggcctacgtgcccggcggcaatgtgtttgagaatatcagccagatcgtggacgatatcttcaacaactacatcgtgcggcaggggaatattgagccgctgttcgccgccttctgcgatggggtgcgtacccggtgcaacggcttgagccagtggggcagcgtggatctggcagaggcggggtacatcccctatgagatcttgcagtactactatggagacgatatcaacatcgtctttgacgccccggtggccgacaatatcccctcctaccccggccgaccgctggaacggggctcctacggccagagcgtccgcaccattcagcagcagttgaaccgcatccatgagaactaccccggcatccctgtcatctccccggtgtccaacgcctatgaccgcaataccgaggacgcggtgcgggagtttcagcgggtgttcaatctggataccgacggcatcgtgggtaaggccacatggtacaagatcaaggaggtctggacaggggtgaagcagctcagcgagctggccagcgagggcctgaccctgatggaggtacagcccacctttccggaggtgctgcggtatggcgacgagggggtggctgtcagcaccttgcagtactatctggcgtttctgggctacttcctgccggagcagcctccggtggctctgaccggcgtattcgacgacgatacccgtgacgcggtgtatactttccagagcaattacggtcttcccgtggatggtatcgtggggcgggatacctggaaccggctgctgaatgtctacgaccagctgctgcgtgatctgccccaggactatcagaactacatcgagcaggtgtaccccggtcgctttctggtgctgggggacgaggggcgggccgtccggcagttacaggaaaacatccgcaaaatcgccgcgcaggatccggccatccccacggtggaggtggacggcgtgttcggcccggccacccagcgagcggtgctggccctccagcggcagcagggcatcgaccagagcggcgcggtggggccggtgctgtggacccgcgtggcagagctggcgtcgggcttgtga

SEQ ID NO: 1676 - DNA, 699 bp, unclassified Firmicutes
atgtattgtgtcaaatgcggcgtagagctggccgacagcgagaaggtctgtcccctgtgcggtacgcgggcctttcacccggatatgccgccccagcagggccagccgccctatcctgtcgaccaccgtccccacacggaggaggtcagccgttccggcgtactgtttttgctgacggtactggcgctgctgtcggcggtgctgttcattctgtgcgactggcgcatcaacggctccatcgtctggtcggggtacgcctccggcggtgtggcgctgctgtatgtgctggtggcgctgcccctgtggttccgccgccccaatccggtgatcttcgtgcccatcgactttgcggccattgggctgtacctgctgtatatcaacttcgccacgggcggacactggttcttgtccttcgccttcccggtaacgggcgctatcggagtgctggtgacggccatggtggcgctgctgcggtatctgcccggcggacacctgtatgtgttcagcggggcgctgatgctttccggcggcgtggcggtgctgatcgagtttctcatcaacctgaccttccagctgcacgagacattcttctggtcgctgtacccgctgaccgccggcgtactgctgggcggcatgctgctggtggtggccatctgcaagccgctgcaaaggtcgctgcacaggaagttttttatttaa

SEQ ID NO: 1677 - DNA, 1377 bp, unclassified Firmicutes
atggcatttgaaggactgtctgaaaagttaaacgccgtattcaagagcctgaagggcaagggccgcctgacagaggccgacgtccgcaacggtatgcgcgaggtgcgtctcgctctgctggaggccgacgtcagctataaggtggtcaaggatttcgtggcccaggtgacggagcgctgcgtgggcagcgacgtgctggagagcctgacacccgcccagcagatcatcaagatcgtcaacgaggaactgaccaagctgatgggcaacaccaacgcccggctgaacaccgccaaccgcggccccaccgtggtgatgatggtgggccttcagggcgccggtaaaaccaccaacggcgcgaagctggcgggcctgatgcgccgccagttcggcaagcgtccgctgctggcggcctgcgacgtgtaccgtcccgccgccatcaaccagttgcaggtggtgggcaagcagctggacattcccgtgtttgaaatggggcagatcgaccccgtgaccatcgccagggaggcggtgaaatacgccgccgaccacggcaacgacatggtatttctggataccgccggccgtctgcacatcgacgaggcgctgatggacgagctgcggaacatcaaggccgcggtgaagcccaacgagatcttgctggtggtggacgccatgaccggccaggacgcggtgaacgccgccaaggccttcgatgacgcgctgggcatcgacggcgtgatgctgaccaagctggacggcgacgcccgaggcggcgcggcactgtccatccgggccaccaccggaaagcccatcaagttcatcggcaccggcgaaaagctggacatgatcgagctgttccaccccgaccgcatggcctcgcgtattctgggtatgggcgacatgctgtccttcatcgagaaggccgagcagcagtacgacgagaagcaggccaaaaagctggaggagaagctgcggaagaaccgtctgaccctcagcgattatctggatcagctggagcagctgcagaacatgggtgacctgagccagatcgccagcatgctgccgggtaacatggcaaagggctttgaccccgaccagatcgaccccaagcagtttgcccgcaccaaggccatcatccagtccatgactctgcaggagcgtgagaatccccagatcctcaacgccagccgcaagcgccgcatcgcggcaggctgcggccagcaggtgtcggatgtgaaccgactgctgaagggcttcgagaccatgcagcagatgaccaaggcgctgacccgcggcaagcggggcatgggtgcgctgagcggcctgatgggcggcggtggcggcatgcacggctttggccgcaagaaaagactgaaataa

SEQ ID NO: 1678 - DNA, 1083 bp, unclassified Firmicutes
atgaatgtcaaacgcgaacgaattcaaatcgtcatcgccggactgatcatcggcgtcattgcttcgctgctggtctttttcggcaatccctccaacatgggcttctgcattgcctgcttcctgcgggataccgctggtggtctgggtctgcaccgtgccgccgccgtacagtacatccggcccgagatcatcggtctggtgctgggcagcttcggcgtggcgcttgtcaagaaggagttctccgccaagggcggcagcgctcctgtcacccggtttgtgctgggcttcttcgtgatggtgggctgcctgatgttcctgggctgccccttccgcatgatcctgcgtctggcaggcggcgacctgaacgccctgctgggtctgctgggctttgcgctgggtattctggccggtgtgttcttcctgaagcggggctattccctgaagcgcacctatacccagaccaagctggacggcgtaatcttccccgtcattcaggtggtggtgtttatcctgctggtggcggctcccgccttcatctttttcaccgaagcgggcggcggccccggcgccaagcatgccgctgttgccatcagcctgatcgccggtctgatcgtgggcgctctggcccagcgtacccgcctgtgcatggtgggcggcatccgtgacgtggtgctgtttcgcgagcccaaactgctgatgggcttcggcgcaattcttgtcagcgctctggtctgcaacctgatcctcaacggcgtgggcgaggccaccttcttccatctgggcttcaagggccagcccatcgcccacacggacggcctgtggaactgcttgggcatgctgctggtgggctttggctgcgtgctgctgggcggctgccccttgcgtcagctggtcatgtccggcgagggcaactccgacagcgccgtgaccgtgctgggtctgatcgtgggcgccgccttctgccacaacttcggtctggcctccagcgccgatggccccaccgctgccggtaagatcgctgtgctgctgggcatcgccgtggtactcgtgatcgcctgcctgaacaccttcaagaagaaataa

SEQ ID NO: 1679 - DNA, 897 bp, unclassified Firmicutes
atggcgtcttacgcactgacctgctgctctacagccgatctgacccacgagcattttgccgcccgtgatattcaatacgtctgcttccacttcaccctgaacggagagacttatcccgacgatctgggccagtccattccttttcccattttctaccaggccatggccaatggcgcggagaccagcacctctcaggtgaacatctccgagtatctggattttttcacccccattctggagagcggtaaggacattctgcatgtctgcctgtcctccggcctgtccggctcctataactccgcttccagcgccgcgctgatcgcccgcgagcagttccccgaccggaagatctacattgtggactctctgggcgcgtcctccggctacggtctcattatggagacgctggccgacctgcgggacgagggcatggatatcgacaccctccaccagtggatcgaggagaacaagctgcggatgaaccactggttcttctccaccgacctgaccttctacgtcaagggcggccgcgtgtccaaggcggcaggcttcatcggcggcgtgctgggcatctgcccgctgctgaacatggacgagcagggtcatctgatccctcgcgccaagatccgctccaagaaaaaggtcattcaggaaatgctgacccgcatggagcaatacgccgataacgggctggactatgacggcaagtgcttcatctcccagtccgagtgctacgaggacgccagagcgctggccgacctcattgaagccaagttccccaagctcaacggcaaggtggacattaactatgtaggcaccaccatcggcagccataccggccccggcacagtggccctgttcttctggggccgtgaccggaagctgcccttactttga

SEQ ID NO: 1680 - DNA, 663 bp, unclassified Firmicutes
gtgcttaactcgatcattggaacggacttgagcttgtccgcgtttcttatctgtaccgccgcgtcgctggtgctgggcatcggccttgccttcgtgtcccagttccgcgcccgctccacccagagctttgccgtgacgctggccatcctgcccgtggtggtgcaggtggtcatcatgctggtaaacggcaacatcggcgcaggcgtcgcggtggcaggcgccttcagcctggtgcgtttccgctccgcacccggtacggcccgggagatcggcgtgctgtttctgggtatggccatcggccttgccaccggaatgggatacgtagggctggcggccctgacctttgtgatcgtctccactgcgctgatggcgctgacggcgctgggcctcggccaaaaggacgccggcgagcggctgctgaagatcaccattccggaggatctggactacgagggactgtttgacgacctgttcgctcagtacaccacctcccacacgctggtcagggtaaaaaccagcaacatgggcaccctgtacgagctggagtaccgcatcaccctgcggtcggagagcattcccaaggaatttcttgacgcgctgcggtgccgcaacggcaacctgaacatcgtctgcggccgggaattggtaaaggacgcgctgtga

SEQ ID NO: 1681 - DNA, 600 bp, unclassified Firmicutes
atgtggtggtgcgggaacggcaaggttgacaaatgggagaattttccgtatgataaacgaagaagggagcgtgatagcatgagtgtcggatttatccgcgacaagctggagatcaaattcctgatcctgtacgtggcggcgggtgtggccgagccaatgccgctgagcgatgtgcaggctctcaccatgatcgacgacggcattgattatttcgatttttcccagtgtctcagcgaactggtcaaaacggatcatctgcgcctgaacgagcatcagcagtatgttatcacccccaagggactgaaaaacagcgagatctgcaagtccagcctgcccctctccgtgcggctgaaggcggacaagctgatcgccgcccaccggcaggagctgattcgccgcgcacaggtacgctccaccgtggagcgccgggagaacggtacctataccgtggagctgaacctcaacgacgatgtggataacgttatgcgcctgcagctgatggtcgccacaaaggagatggcagaggatcttgcccagcggttccagaagaacccggaacaggtctattcccagttggttaccgccctgtacgggggataa

SEQ ID NO: 1682 - DNA, 729 bp, unclassified Firmicutes
atgcgagaaacggtattagaggtcaacgacctgaatgtgtggtacagaagcggcacaggcctgcgcaagcggcggcatcaggtgctgcacgacgtgagctttaccctgtaccggggcgagatactgggactggtgggggagagcggcagcggcaaatccacgctggcccgcgctgtgctgggcatggagagcgatgtgaccggcacggtgacgcaccacaccaagcggccccagatggtgtttcaggatccggcgggcagcctgaaccccgcctttaccgtgggcagagcgctggccgagccgctgtatatctacggcaagtacgacaaggccggcgtggagcgccgggtgcgggacaccatggcgctggtgggactggacgagagctactatgaccgctatccccacgagctgtccggcggacagaagcagcgggtgtgcatcggcgcggcgctgatccagaagccggggctgatcgtggtggacgaggcggtgtcggcgctggatgtgaccattcaggcccagattttgcagctgattgcccaactgcggcaggagttcggcatctcctatctgttcatctcccacgacctcaatgtggtgtatgagatctgcgaccggtgccttgtgatgaaggatggccgcatcgtggagcagggcacggtggacgagctgtacgaccaccctcaggcggaatatacgaaacaattattaaaagcagcggagtga

SEQ ID NO: 1683 - DNA, 699 bp, unclassified Firmicutes
atgtctgctattggagaaaatattgcccgcattcgcgccgagatcgacgcggccgcccgtgaaacgggccgcaccggcaaggatatcacgctggtgggcgccagcaaaatgaacgacgctgccgcctgtcaggaggccatcgccgccggcatcgacgcgctgggcgagaaccgggtgcaggagatgacggaaaagctgaaggagaacgcttacgacggtgcgccgctgcactttatcggccacctgcaacgcaacaaggtgaagcaggtggtgggcaaggcggcgctgattcagtcggtgggctctaaagaactgctggacgagatcgaaaaggtggccgccagaatggagctggtgcaggacgtgctgctggaggtcaacatcggcggcgaggaggcaaagtccggcttcgcgccggaggagctgccacaggcggcggcctacgccaagggtctggcccacattcgggtgcggggcctgatgacgataccacctgttgcggtggaaaaaggcggaaatataccatattttgagaaagttcatcgtctttttgttgacataagccgagaaatgtacgataataaatgggaatatatctccatgggcatgagcggcgactatgccgacgccgttcgctgcggcgccaatatggtgcgggtcggctccgccatcttcggcgcacgcaactatcagaaataa

SEQ ID NO: 1684 - DNA, 1224 bp, unclassified Firmicutes
atgaaaaagtttcttgctctgattctggctctggtcatggcgctgtccctggtcgcttgcggcggcggcaacaccaacactgacgacaaccagaacaccgatggcaacgacaaccccgatgccaccacctacaaggtcgctatgatcaccgactacggcgatatcaccgaccagtccttcaaccagaccacctacgaggcctgcaaggagtactgcgaggccggctctctggacttcaagtacttcaagcccgtgggcgactccaccgctgaccgtgtcgccatgatcgagagcgccattgacgagggcttcaacatcatcgtgatgcccggctacgctttcggcggcgctatcgtcgaggctgctcccaagtacaaggatgtcaagttcgtggctctggacgtctccaagggtgactatctggaagctggtgtcggcgctgccggcgagacctatgactacgaacccgacaactgggatctggccaagtacgctgacctgagcaacgtctataccatgatctatcaggaagagctgtgcggctacatggctggttacgccaccgtgaagatgggctacaccaagctgggctatgccggtggtatggctgttcccgccgttatccgctatggttacggcttcgtgcagggtgctaacgctgccgccaaggagctgggcgccactgtcgagatgaagtacatctacaccaacaccttctcccccgatgccagcatcaccgctgctatggatacctggtacgctgacggcactcaggtcgtgttcgcctgcggcggcggcatctatgtctccattgccgaggctgccaagaaggccaatgccaagatcgtcggcgttgacgtggatcaggctcccatcattgacgctctggccaatgaggacaccaccatcacctccgctatgaagggtctggcctcctccaccaaggctgctctgaagggcatcatcgaggatggcaagtgggacgagctggctggcaagatcgacaatctgggtctggtctccggcactgatatggacgccaactatgtcggcatccccaccggtgacggcaccgcttggtgcgacaccttcaccaccgacgattacgccgctctggtggccgctatgttcgatggcaccatcaccgtcagcaacgacatcaccaagaagcccgctgacttcgccaccgacatcactctgaccgatctgggcaccctgaactaa

SEQ ID NO: 1685 - DNA, 1014 bp, unclassified Firmicutes
atgatgaccaaagggtatcataactaccggggccgcggcggtcgtcagaagcggctgctggcggtggtgctggtgctggtgatcctggcggcaacggcgtttctggtgatccagaattacatcgtttatgatgacgccggaaaggcccacatcgagtggcccttccgcaaggatgagccgcagccggacgataacgccacgccgccggtgtcgcaggacgatgtgaacatcgactatgtggataacggctacgcgccccatttgcaggagctgcacgcccagatgctgccgggcaatgcgctgcggcaggctccggagactgtgttggccgacctgacggaggatgccttcgcggtggaggtcaagcgggtcaacggctccatcacctatgccaccggggtggatattccgcaggaggtggaggcggagcagtacgacaccatggacaacctgacggcgctgctggcggatgaccgctatgccatcgcccgcatgtccgtgttctgcgacagctaccttgtccgggcctatcccgacgcggcgctgcgtgtagagagcggcagcttctggtatgacgccgccagcatggcgtggctggatcccagccatccccagacgctggtgtatatcacctctctgtgtcaggagtacgcccagctgggctttgacgagatcgcgctggactacttcagctatcccaccacagggcggctggagtccatcggcggcttggaggacacggatcgggtgcaggtgctgacggacttcatcaagagtctgcgggccaacctgccggacggcgtaaaggtcagtatcgtgctgcgcagccagccgtcggcggaatttggcttgtcgccggaaatgctggttcagaactttgaccgtatttatgtggagcagggggtagatgacaccgccctacggtcggcgctgccccagcggttcgactatgacacgcggctggttcccatcgtgacggaaccgccggagagcggcagttatttgatgaaataa

SEQ ID NO: 1686 - DNA, 1566 bp, unclassified Firmicutes
atgaagctgaactacaaacgcaccattctggtgggctttgcctttttcctgatctgcgccttctggcaggcctatgacaacaccattcccctgattctgaccaacaaattcggcatgagccagacctggtcgggcatcatcatggcggcggacaatgtgctggcgctgtttatgctgccgctgttcggcgcgatttccgataaatgcagccacaaaaagggacggcgtacgccctttatcgtgatgggtacgctgatcgccgccgtggcgctgatctgtctcagctttatcgacaacgcccagctgaagcatctgggcgacgccgcacggatcgacgatcccgccgccctgtccgccatctatgaaagtcaggcggacgagcagctgattacccctcacggggagaggttcgtgctgtcggagaagttcacggaggaggaattcaccgccatccgcagccagctcaccgacgagaacggcaagaccgtcaccaatcccgactacaccaactacgtgaccccggcccggcaggcctacgcctggcatgtgacggcggcgcatcccgccacgctggggttcttcatcgctgtgctgctggtgattctggtagccatggccaccttccgctctccggcggtggcgctgatgccggacgtgaccatgaagccgctgcgctccaaggccaacgccgtcatcaacctgatgggcagcgccggcggtattctggtgctggcgctgggcatggcgttcgccaccgcgtcggtacacaacgcactgatgagctacaccgcctatttcgcggtgatcgccgccattatgctggcggcgctggtgatcttcattctcaccgtgcgcgaggtggagtgggcccagcagatgcagcgcgacagcgtggaatacggtgtggaggacacggcggaggacggcgcgtccccgcaggaggagcggaagctgacccgcggcgaggtgaagtccctcattttcattctgctgagtatcgtgctgtggttcttcggctataatgccgtcaccagcaagtactccgtgtacgccagcaacatcctgcataaagactataacctgaccctcatcatcgctcaggcggcggccatcgtggcctatctgccggtgggtgtgatctccagcagggtgggccgcaagcgggccattcagacgggcgttatcctactgaccgtggccttcggcgtggcggggttcctccacgcggagagccccacgctgctgatgaacgccatgttcgccctggcgggcatcgcgtgggccaccatcaacgtgaactccttccccatggtggtggagctgtccagcggcggcagcgtgggcaagtacaccggcttttactacaccgcctccatggcggcgcaggtggccacccccatgctgtccggccttttgatggacaagtggggtatgcgggtgctgttcccctatgccacggtgttcgtggcgctggcctttgccaccatgctgatggtgcaccacggcgacagcaagccccagatgaagctgggactggaagcattacaagattcggagatggattga

SEQ ID NO: 1687 - DNA, 906 bp, unclassified Firmicutes
atggagcaagctatggataaggtactggcattgatggaggatattgggagatacttaacgctcctgaaggtcacggacttcgtggatatcgccatcattattttcctggtatataagctgctgtcgctggtcaagagtacgagagcggaaaatattctgaagggtgtggcgatcttcctactggcgctgggcctgtcgacggcactggatctgcgggctgtcaaatatattctcagccacgtggtggactggggcattctggcgctgatcattctgttccagccggagatccgccagatactggagcggctgggcagcaagaacctgcggctgatgcgggtgttccgctcggaggaggagatcaccgaggtggaaaaggccatcgaccagacggtgatggcctgcagcgaaatgagccgcaccagaaccggtgtgctgatggtgttcgagcggaacatcaatctggacgatatcgtccgcaccggaacggagctggactgcgaggtggtgtgcgagctgctgaagaacatcttcttcgtcaaggctcccatgcatgacggcgcggtgatcgtccggcatggacggatcgtgggcggcggctgtatgctgccgctgtccaagaatgtgaacctgagccgcgacctcggtatgcgccaccgtgccggtatcggcatgagcgagaattccgatgctgtggtggtcatcgtttccgaggaaacgggctctatctccgtagccatcggcggtatgctcaagcggcacctgatgccggaaacactcggcaagctgctgcgcaacgagctgatgccgcctgaggaagaagcggacaagccacagcgtgtcccggtcttggcgtttctgaagaagctgggaaaggaggcggacgatgatggagaagaagaataa

SEQ ID NO: 1688 - DNA, 1758 bp, unclassified Firmicutes
atgggcattgcggacgtcatttcgctgctgggcggcattgcgctgtttttatacggcatggccgtcatgggcgacaatctgaaaaaggtggccggcagcaagctggagctggtgctctataagctgtcgggtacgccgctgaagggcgtgctgctgggcaccgccgttaccgccgtcatccagtcctcctccgccacctccgtgatggtggttggcttcgtcaactctggcatgatgaaggtgcggcaggccatcggcgtcatcatgggcgccattctgggcaccagcgtcaccggctggatcctgtgcctgaacagcctgtccggcggcagcggctgggtggatctgctgtccaccgccacgctgacgggactgttcgccattgtgggtatcctgctgcgaatggtaaagggcaagcccacccgcaagcatctgggcaatatcctgctgggctttgcggtgctgatgtacggcatgaccgccatgtccggcgcggtggctcccctgaaggagagtcaggccttcatcgatatcctcaccaagttctccaaccccctgctgggtattctggtgggtctggtgttcactagcgtactgcaaagcgccagcgccgccgtgggtattctgcaggtgctgtccggcaccggcgccatcacctttgagatcgctctgcccatcaccatgggtatcgccatcggcgctgctgtgcccgtgctgctgtcggcgctgggcgccaatatcagcggcaagcgcaccgcctttgtgtacctgctgatcgacgtgctgggcgcggccatctgggcgctggtgttctataccgccaacgctatcttccactttacctttatgaccgtcaccatgaccaccgtcaccgtggcgctgatgaataccctgttccgtctggctaccatcatcgtcctgacccccgccattcccctgctggaaaagctggtggtctggctgatccccgacaagggcggcgaactgatggcacagcacgacatggatcgtctggaggagcgcttcctccagcacccggcgctggccatcgagcagagccgtctggtcacggactccatggcggaaaaggcgcggggcaacctgctgcacgccatgggtctgcgcggcgcttacagcgacaagggctatgagcaggtggacgagacggagcagctgatcgaccgctatgaggacaagcttggcacgtatctgatgaagctgacggcccgctctctgtctccggagcagacggaggaagtggccaaatacctccacaccatctccgacttcgagcgtatctccgaccacgcctgcaacgtggcggacgtgtgtcaggagatcgatgagaagaagatcgagttctcgtccagcgccctgcacgagctggaggtgctggagggcgctgtgatggagatcctggctatctctgtggacgccttcatcgaggggaacttgcagctagccgcccgtgtggagccgctggaggagatcatcgacggattgtgcgacgagatgaaatcccaccatgtggatcgtctccaacagggcgtctgcacgctgaaccagggctttgtgttcaacgatctgctgaccaactatgagcgcgtggccgaccactgctccaacatcgccgtggctgtcatcgaggtggagagcgacagcttcgacacccacgaatatctcaacagcgtcaaggccataaaggacgcttccttcgcccggtactatgacgaatacaagaaaaaatacaccttttaa

SEQ ID NO: 1689 - DNA, 615 bp, unclassified Firmicutes
ggagctgaagctgttcctgatggaattggcaggtgtccggtgaagccccgcatccgtgaggtcatcatcgtggagggccgctatgataaaaacgccttgtctcaggtggtggacgccgtgatcctgaccaccgagggcttcggcgtgttccacgacaaggagaagctgtcctatttccgccgtctggcggaacagcggggcgtgatattgctgaccgacccggacggtgcgggctttgtcatccgcaatcacctgaagggggctctgccgccggagtgggtgaagcaggcctatgtccccgacgtgccgggcaaggagcgccgcaagaaaaagggcggcaaggagggcaagctgggcgtggagggcatgtctcccgccgtgctgctggaggcgctgcgccgctgcggcgccaccttcgagggggaggagcgcaggctgcccagcgccggtatcacccgcgccgacctgatggataaggggctcatgggccccaacagcgcggcaaagcgggcggcggtgctgcaaacgctgcaattgccggagcatctcaccaccacaggcctgctggacgcgctgaacctgctgctgacgcgggaggaattcgacacgctgtaa

SEQ ID NO: 1690 - DNA, 1212 bp, unclassified Firmicutes
atgagccagttgatcctgaagcatccggattttcagccggagaacgtaaaatttgacacggtggaggttcacgccggtgagccccgcgatacctacggttccctgatcccgcccatttaccagacctctaccttctactttgactccaccgacgacgcggtggaggcctgcggcgactacgccgagagcttcgcctacagccgcatcaccaacccctccctggactacatggagcagaagctggcggcgctggagcacggcaagggcgcggtgtcctatgcctccggcatgggtgcggtggccggtgcgctgttcgcagcgctgaaatgcggcgaccacgtgatcttcaccaaggccaagtactccggcaccgaggacattaccagcgactggctgccccggttcggcattgagcacgactccttccaggccgatcatctggaggagctggagccccttatcaagccaaacaccaaggtcatctacgtagagacccccgccaatcccaccatggtgctggtggatctggcggaggtggcgaagatcgcccaccgccacggcgcgaaggtttttgtggacaatacctttgccaccccctacaacaccaatccgctggatctgggcgtggacgtggtgatccacagcctgaccaagtacctcggcggccacggcgacctgctgggcggcgcggtgatctccaacgatacagaattcctgcgccagtgccgtctgggcacgctgatgcatttcggtgcggtgatggcgccctttacggcgtttctggtatgccggggcatgaaaacactgggcgtgcggatgcggcagcataacgaaaacgccctgaagatcgcccgctggctggaggccgatcctcgcatcgagacggtgcgctatcccttcctggagtccaatccccagtacgacattgccaaaaagcagatgcggggcggcggcggcatgacctccttcgacgtgaagggcggccttgaggccggcaagaagttcatcaacagcctgaagctgtgcacgctggcggtttcgctgggcgacacggagacgctggtggagcaggcggcggccatgacccacaccatgatccccaaggaggtgcgggaggccgcaggcatcaccgacggcatgatccgcatgtccgtgggtctggaggatcccgacgatatcatcgccgatctggatcaggcgctgagccgctga

SEQ ID NO: 1691 - DNA, 1065 bp, unclassified Firmicutes
atggagcagaacaaaggaaaacgggtgctggtggccatgtccggcggcgtggatagcagcgctgccgcgctgttgctgcggcggcagggctatgactgcgacggcgccatgctgaagctgatccccaacagcgacagccgctgctgcagcgccgacgacgccgaggatgcccgtgccgtggcctaccggctggggatgaaattttacgtattcaacgaggtggaggccttccgccgggacgtgatggatcatttcgtggcggaatactgcgccggacacacccccaacccctgtatcgactgcaaccgctgcctgaaattcggcgcgctgctggatcgggcggtgacgctggggtatgactacattgccacggggcactatgcccggatcgcctatgatccggcggcggagcgctatcgcctgctgcggggcgcggatcgccgcaaggatcagagctatgtgctgtaccagctgacccaatatcagctgtcccacctgctgctgccggtgggggatttcgacaagcccaccatccgggacaatgcccgcgaggcaggactgctgaacgccgacaagtccgacagtcaggatatctgcttcgtgcccgacggcgactatgtgtcgttcctgcggggacagggcgtggcgctggagcccggcgacttcgtggacgaggcgggcaacgtgctgggccgtcaccgggggttgtcctgctataccatcggtcaggggaagggccttggcatctcggtgggaaagcacgtgtacgtgctggcgaagcacgaggcggacaataccgtagtgctgggggacaacgacaggctgttccgccgggagctgaccgcctgccgggtcaactggatcgccggggaagcgcctgccgcggccttccgctgcacggcaaagacccggtacagtcaggtggaggccccgaccctggcggagccgttgccggagggacgggtgcggctgaccttcgacgagccccagcgggccatcaccgccggacaggcggcggtgctgtacgatggcgacgaggtgctgggcggcggcaccatcgaatga

SEQ ID NO: 1692 - DNA, 966 bp, unclassified Firmicutes
atgaaacgtatggtatctctcttgctgacgctggtgctggccctgctgctggcaggctgcggcggtaatgccgctgcagccgctgatagcgctgcggcgccccgcgacaacggaagcggctactggaacaccaccgccgacacggacagcatcagcgaggatcaaaacatggcctatgaagccgaggaaccgggcgcttcggcgtacaacgacagcaaagcgcagtccgacaggcccgccaaaaaggtctacaccggctacatggagatgcagacgctggactttgacaaggccagcggcgacatcgacgcgctggtgaaggagctgggcggctacttccagcagagcagcgtttccaaccgtggaaacagcggctatcgctacggcagctacaccattcgcatcccttccgcgcagttcgataccttcctgcagaaggccgggacgctgtgccatctggtttacagcagcaccggaacggacgacgtgtccgagacctactacgataccgaggcacggctggagaccgcccgcatcaagctggagcgtctgcaggcgctgctggccaaggccaccagcatggacgacatcatcaccattgagagcgccatctccgagacggagtgggacattgagaatctcagcggtacgctgcggcgctatgacgcgctggtggactacgccaccatcgacgtggagctcagcgaggtctacaagctgtccgggcaggacgaggccgtcaccaccttcggcggacggctgggtcagtccttcgtcaacggcctgcgggccgtgggcagtgcgctggaggacttcgccgtgtggctggcctacagctgggtatggctgctggtgatcgcggcggtgatcgtggtggtcgtccgcgtcgtgcgccgcaagagcggcgggaagaaattttccctgaagtggaagggcaaggacgccgatacggagacaaaggaatga

SEQ ID NO: 1693 - DNA, 1386 bp, unclassified Firmicutes
atgacattacaggagtatctggattccatccacggaaagaccgtggcggtggtgggcatcggtgtcagcaatacgccgctgatccgcctgctgctgcgtgagggcatcgccgtgaccgcctgcgacaagcggacgcgggagcagctgggcgagctggccggtgagctggagcagggcggcgcacatttgcagcttggctcggactatctggagggactggatcaggatatcattttccgcacgccgggtctgcggcccgatgtgccccagctggcaaaggctgtggctggcggcagtgtgctgacctccgagatggaggtgttctttcaggtctgcccctgtcccatcatcgccgtgaccggcagcgacggaaagaccacgaccactaccatcatcgcggagcttttgaagaaggcggggcgcaccgtccatgtgggcggtaacatcggccatcctctgctgtgtgaggcgggggagatgcagcccaccgattacgcggtgctggagctgtccagcttccagctgatgaccatgccgtgcagtccccatatcgccgttatgaccaatctggcacccaaccatctggacgttcacaaggacatggcggagtacgtggccgccaaggagaatatcttccgccaccagaagccgggcgataaggccatcttcaatttcgataacgacattacccgccgtcagggcgagagcgttcccgaccgggcggtgtatttcagccgtcaggcggagccggaaaagggcgtgtttctgcggggcgacgccatcgtctgccgtgacggcaggggagaacgcactgtgatgaccaccggcgatatcaagctgccgggcgttcacaatgtggagaactacatggcggccatcgccgctgtggacggtcatgtgccggatgagaccatccgggacttcgcccgtgaattcggcggtgtggagcaccgcatcgagctggtgcgtacctaccggggcgtgcggtactataacgactccatcgcttccagccccagccgcaccacggcgggactgcgctccttcccggaaaaggtgatcctcatcgccggcggctatgataagcacatccccttcgacgcgctgggcggcgagatcgtggaacacgtgaagctgctggtgctgtgcggcgctaccgccgccaagatcagaaccgccgtggagaatgccgagggctatcagcccggccatccggagatcgtggaggtcacgcccttccagaaagcggtggagaccgcacgggacagggccgtacccggcgatgtggtaacgctgtcgcctgcctgtgccgcctttgaccagttcaagaactttgccgagcggggaaagaccttcaaggccatcgtcaacggctggcaggaataa

SEQ ID NO: 1694 - DNA, 942 bp, unclassified Firmicutes
atgagttttacctatctgaacctgcagggcaagctggagcacgtgacggccacggctgaggatatcgaccgccagttacagcggcttttgcaggccaatccccgcattatccccgtcaccggacgggccgccgcactgggcgacgagctggtgctggactacgccggattttccgagggcgtccagttccccggcggcaccgccgaaaaacagaccctgaccctgggcagcggcatgtttatccccggcttcgaggagcagctggtgggcgccaacatcggcgatgacgtcaccgtcaccgtcacgttccccaccgagtatcacgccccggagctggcgggcaagaacgccgagttccgctgccatgttcacgagatccgtacccatgacagctaccagctggacgacaccttcgccaaggagatcggccagtgcgagaacatggagcagatgcgcgagaacatgggcaaggctttgcaggactactacaaccagcgggccgagcaggagctgcgctggcagctgatgcatcaggccgccgccaccgtggaggagcagcccaccgacgaggaactggatcgcatggtggaggcccagatggagaccctgaccgcccagctggcccagaaggggctgacgctggaggcctactgtcagttcaccggcagcgatgaaaagaagctgcgggaggatatgcggcctgacgcgctggaggctttccgcacccagaaggcggtggaaaagattgcccagctggagaacctgaccgtcaccgacgaggagatggacgccgccatccagcgcatctgcgctgacaaccacatgagcgccgaggatctcaagccctatttcgacaacggctttttgaccgttgtccgccagcagatgctgcgggacaaggccaccgaggtggtgcgccgcagcgcccaaatcacccagtga

SEQ ID NO: 1695 - DNA, 2250 bp, unclassified Firmicutes
atggcgggattgcaaaacgccgcggagcgtggtaaaatattaagactgccgcttcgacaaatttcatcctttttaaggagatttccccatatggacgaaaaccgcacccgtctggagcagccccagcaggacgcgcccaaaaagcgcagcctgtggccgctgttctttttccctatggcgttgctgtatcacgagctgctgctgcacgcctttgaccgcaccatcctgttctgggatacgccgctggtgtatatcctgctgttctccgccgcaggcggcttcctgctgtcggcactggtggatattttgccccggagggccgcccacattgtcacctacgccctgtgcgtgttctggacggtgctgacgtgcatcgaatactgctgcaagagctacttcaaaagctactggggactcagcttcatcacccagatgaccggcaatgtggtgggcaacttcttctccaccatgctggagatcatcttcggccgcattgtgtttatcctgctgtccttcctgccgctggtgctgctgatcatcctccgccgccgcctgctgccgggcaagaccctcagcgtccgctgccgcgttatggcgctggcggtgttcgcggtgtgtcaggctgtcggttccgccctgtgctataccggcgaggatcgggcggactacacctacaactacgtcaccgactacgccgtgccccgcttcggtctggcagccaccattcggctggaggcccagtacgccatcttcggtctgccggacgcgccggtgatccaggtggacgagccggtgccggacgcgccggtggtctacgactataacaagatggagctggacttcaccgccacctccgatctggtgggcggctccacgctggagaacatgcacaactacttcagcagcaagaccgccagccagcagaacgagtacaccggcatgttcaagggcaagaatctcatccagatcactgccgaggccttctccccctacgtcatcagcaaggagctgacgcccaccctgtacaagctgacccacgagggcttcgtgttcaccaactactaccagcccggctggggacagtccaccaccggcggcgagttcgcccacatgaccggcatcatccccacgtgggtcaacggcaatctcagcttctacgccagccatcaggactacatgcccttcgcgctgggcaaccagttccgggcgctgggctataccaccgtggcctatcacaacaactcctacacctactacaaccgccacctgacccaccccaatctgggctatgattactatggtcagggcaacggcctgaccctcaccgtccccggctggccctactccgatctggagatgatggagctgaccgccccggcgtatattgaggattacgtgaacaccggcaagcccttccacgcctactacatgtccgtcagcggacacgccaactggggctggggcaacgccatgtccgccaagaaccgggaagccgccgtggcggcgtatcccaacgcctctcagccggtgcagggctacatcgccgccaatctggagctggaatacgccctgacatacctgctggagcagctggaggccgccggtatcgctgacgacaccgtgatctgcatgaccgccgaccactatccctacgcgctggtcaccgatgaggtggactactatcaggagctcagcggcaagcaggacagtgagctggatatctcccgctacaagaacacgtggctgctgtggagcggcagcatggagagcagcgtcaccgtcaacaccccttgctccgccatcgacattctgcccaccgtcagcaacctgttcgggctggagttcgactcccggctcatgtcgggtcatgacgtgtttgcccagaactacaacgcttcgcaggccagcacctgcatgccgctggtgatcctacccaccaaccggggctacagctggatcaccgccgccggaacctacgacgccaagacccgcaccttcacccccaatcccggcatcaccgtggcggacgactacgtgaaaaccgtgtcctcgctgatagatgccaagtactcctatgcccgccagctgatccagtacgactacgcgggcgtggtgctgcatcatccgcaggccacccacgtgatggccgcgccgcccaaaccgcctgagcccagcacggacgaaacggcggacgacaccgtgaacgagggttacgtggatgataccggcaccggcgacaccacggaataa

SEQ ID NO: 1696 - DNA, 1347 bp, unclassified Firmicutes
atgaaaaagctactggctctgctgctggctctgctgatgcttctgtcccttgccgggtgcggcaaacaggcgcaggaggatgaggagcccgccgtgatcgagttgacgctgtggacgttccccgcaggcgactggggcgatccggccgccgtggagacgctgctgacccagttcaacagcgtataccccgacattcacgtgacggtacagtgtctggacgaggccaccggcgacgacaagctcagcaccgccgtggacggcggcgggtcccccgacattctgctggcccagccggatcgtctcatcaaagcatggggcgcagagggcatgctggccgatctgtccgacatgtgggacgacgccgacaagcaggaggtcaacgccgcctgccagagcgtctgcttcacccgggacggcaagtgctacgcctatccctttgccatgaacgtgcagtgcatggccatcaactatgacgccttcgtcaccgcaggcgccgaccagtacatcgatctggagacacgcacctggaccaccgagcagttcacccaggccgtcaaggcgctgcaaagcaagtacggcgaaacggtggccgccgtgtactgctccggccagaacggcgatcagggtacccgcgcgctggtgacgaacctgtacggcggccagttcgccaacgactcctacaccggctacgtcgccaactccgaggccaaccagcaggcgctgaccctgctgcgggacaccaagggcatcgaatttgacgacgccatcaatgggcaggaggaggccgcgctgttctatcacgaatccctgaaaatgtccttctgctggagtcttgcccagcagctggccgagacggtggacgagcccaccgaggagggcggcgagccggtggtgcatccggcgggcaagaccgtcaacggccagaccatcgagttcatggccttccccaccgatcccgagatcagccagccccggcttcagggcgatatctggggcttcggcgtgtttgacaacggcgatcaagagcggatcgaggccgccaagctgctgatccgtttcttcgccgacgggcagggcgccagcgccgccgtgaaggccgccgggtgcttccccgtccgcgacacggtggacggcgccgacctgcggaacatctgggcgggcagcgacgtgatgacggaatacgccaagctgacggacttcctgtccggctatgacgcgctgacgcccggctgggccaccgcccgtactgagtggtggaacatgctccagcgggtgggcaacggcggcgacgtggtgctggaaaccgacaccctcgtggaaaacgccaacgccgcagcgaaggagtaa

SEQ ID NO: 1697 - DNA, 2583 bp, unclassified Firmicutes
atggcgaatacaccaaagaagaaaaacgccgggagctccgccaagagcggcagcaaacgccgctctgccccgccgcctcccgcttataacgcccaggcgcggatcatcggcggcatcgtctgcctgctgctggccctgtgcgtgctggtgacgtactttaacgtggacgccattctgctgacgtttctggccaatgtgctgaagggctgcatgggctacggctactggctggcggctccggcgctgctgtatgccggcatcgtgctggtaggccacaagggccgcccggtgaagctgcgcaccacctgcacgctgctgctgccggtgctggtgggcatggtgctgcatctgctgctgtcccgcggcggctatgccttctcactggagaacatcaagcccatgtggaaggacgggcagtccctgctgtgcggcggcgtggtgtccggttttctggcggtggccatggaggcgctgctcagccgcgtggtgtccctgatcctgaccattctgctgacgctgctggcggtgctgggcgcactgcagatcaagcccgccgagctggcggcggagatgaaacgccgggccgaggaacgcgcccagtgggaggacgaggacgactactatgacgacgagaaggaagcacccgcccgtcccgcaaagtctgtaaaggaatctgccgttacaccgactgccagaaaacggcgagccaatatcgacattccgctggacgacgaaccggcgggagagcccagccgcgaggccgccgcattgcagccttccggcaagagcctgttccccggccgctccggcgacgtaaagaccccggcggagctgctggatcccacgctggctccggcggaagcgcctgcggcgccccagcctgaaccggcgccgactcccgctccggtcaaggagccgctgtcggagaagaagcggaaggaagccgtccgggcggaggtggaaagcgccaccgccgaggtcagtgaggccatcgaaaaggagttggccgagggggagggagcctaccgctacccgcccatcacgctgctggatgaaaataccgacgacaaccatcaggaggtgggcgcggagctgcggctcaactcccagcggctggcgtcggcgctgtcctccttcggggtagacgctcatcccggcgaggtcgtccacggccccagcgtcacccgctatgagttcacactggatcagggcgtgaagctcagcaagctcaccaatctcagcgatgatatcgctctggcgctgggcgctaccggcgtgcgtatcgcacctatccccggcaagatctccgccgtgggcatcgaggtgcccaacaaggccgtcaccgccgtccgtatccgggacgtgatcgagagccgggagtttaccaaccatcccagcaccgtggccttcgccgtgggtaaggacatcggcggcagcgccatcgtgggcaatatcgcccggctgccccatgtgctgatcgccggtaccaccggttccggtaagtccgtgtgtaccaattcgctgatcgtcagcctgctgtataagtccacccccgacgaggtgcgcttcatcatggtggaccccaaaatggtggagctggccccttataacggcatcccccatctgctgatccccgtggtcaccgacccgaaaaaggccgccggtgcgctgcaatgggcggtgtacgagatgatgaagaggtataagatgttctccgagcggggcgtcaaggatctggcgggcttcaacgccctgtgcgagagcgaccccgagctgaagaagctgcccaccgtggtggtggtcatcgacgagctggccgacctgatgctggtggctgccaaggaggtggaggaatccatctgccgcgtggcccagatgggccgtgccgccggtatgcacctggtcatcgccacccagcgaccctcgtctgacgtgatcaccggtctgatgaaagccaacatccccagccgtatcgcttttgcggtggcgtcgtcgctggaatcccgcatcattctggataccaccggcgcggaaaagctggtgggtaaaggcgatatgctttacttcccgctgggcaaccagaagcccacccgtgtacagggctgcttcatcacgccggaggagatcgagcgtgtggtgaacttcgtcaaggagagcggcgccgccgactactccgacgaggtcatggagaagatcgaggaggtcatgaagcagagcgaaaagggcggcggcaagtccgccggcggcagcgctcccgccgatggcgacgagggctgcgacgagctgctgggcgcggcggtggaggtcattctggaaacgggacaggccagcgtgtccatgctgcaaagacgcttgaagctgggctattcccgcgccgcccgtctggtggatcagatggaggagaggggcatcgtgggccccttcgagggcagcaagccccggcagctgttgattaccaaggagcagtggcaggagctgaagatgaagggcagcttcgacgccgcatcgccggagccggaaagccatcccgacccctacggcagcatcaacgatgtgtttaacagcagagatgcattagattaa

SEQ ID NO: 1698 - DNA, 1233 bp, unclassified Firmicutes
atgaaacgaaagcttttcgccctgttgctggcgctttgtatgctgctgaccgcctgcggccagcagccggacaattctccggcggagaacggccagacacagacgaaccaggggcaggaggagcagaccgcaccgccggacgacggcttttccacctccgtcagcggacgggtggaagatccggagggactggtgacggagacgcagaagcagctgatgacccggctgctgaccgactggtacaccgatatcgccctgtttgacgagcctcaactgacggcgttgttttccgatgaggaggacgccgccatgcatcaggcgtccatccgcaccctgaacgccatccgagcccgggcgctgatcgacctgcggatgaaggacgtggactatgtgctgaccgtcaccaaggcggagccctccaccgaggaggacgccgtggaggggcagatacatatcgaggccgacgagtcggcggtgatgcactttgccgccacgccggaggtggacagcaagctctatgacgtgccccacatcttcgagctggtgccggagggggacggctggctcatcaagcaccacgaggctgacgacaacccttatttcagcctgacctatcaggagggcaaggaggaggacggacagctccagcagctgctgcgtgccatcgaacggcggcagctccagcggcaggagacggtgcaggtgacgctgacgtgcgaccatccctatgaccgggcggcggcggagcagtacatgcggcagtacgaccaccagcgcagcagcgcgtggcatgcctatgacgacgtgggcggcaactgcatgaacttcggctcacaggtgctgctggcaggcggtattcccatggacgagcagggcggcagcaagtggtactggtacggccagaacagccttgacctgtcgtggatcaacgtgggccggttctacagctatgcccgtgagaacgagggctacggtctggtggcggacaccgaggccaactactacaccggcgaggtgggggatatcctgatccttggccctgacggcggacacaaccacaccaccgtgatctccggcatcatccgggacgaggcgggtcagacggtggactatctgctgtgctccaacaccaccaattatacggacttccccgcaggcgcgtattattacaccagccagcggctcattaaaatttacgggtggaacgaaagcacccctgacggggcgcagtga

SEQ ID NO: 1699 - DNA, 1428 bp, unclassified Firmicutes
atgaaaatactgtttgccgccagtgaggcgtttcccttctgcaagacgggcggtcttgcggacgtggccggcagtctgccggtatctctggccgagaacggcgatcaggtggcggtgatcctgccgctgtatgataagatcccctacgagtggcggcagcggatggtctaccgcagctatatctatgtggacgtggcatggcggcaccagtactgcggcctgttcgtcatggagtatcggggcgtgacgtggtatttcgtggataacgagcactatttccgccggggccggttgtacggcgagtatgacgacggcgaacgcttcgcctttttcagcaaggcggtggtggatctgctgcccagtctggactggatgccggatgtgatccactgcaacgactggcagacggcgctggtgcccatctacctcaaggacgttgccacccgctgggacgcggtgcggggtatcaaaaccgtgtttaccatccataatatcgagtatcagggccgctatggccccgacaccgtggccgaccttttcggtctgcacgagggctggtggaacgatggcacgctgcaaatggacggcgacgtgaatctgatgaaggccgccatgctggtgtccgacgcggtcaccaccgtcagccccacctatgccgcccagcttcacgacgattactatgcccacggcatggcttccatcgtggacgccatcggctataagctgcacggcgtgctgaacggcatcgacatgacctcctacgacccggcccatgatatggccatccctgtgcactacggccctgacgacatgaccggaaaggccgcctgcaaggctgaccttcaggtgtcgctgggactgcgggaggagccggacacgccgctgctggcggtggtcagccgtctggtgggccacaagggcatggagctaatccgggacggctttgacggcattatggccaccggctgccagctggtggtgctgggtcagggcgagggctactacgaggactttttccgggcgcaggcgggccgttatgtaggccgcaccgccgcgctcatcacctattccgaggggctgagccgccgcatttacgccggtgccgacctcttcctgatgccctccaggagcgagccttgcggcctttcccagatgatcgccatgcgctacggcgcggtgcccatcgtccgccgtaccggcggactggccgacagcgtgcattcctgtcaggtgggccagccggacggcacgggctatcttttcgaggactatgacgccggggccatgctgtccgtcatcgggcaggccaccggactttacaagggcgacagggcgggctttgccgccgtccagcggcggggcatgaccgccgacttcagttggacgcgcagcgcccgtctctatcacgatatctattccaagctgtaa

SEQ ID NO: 1700 - DNA, 2379 bp, unclassified Firmicutes
atgagcaagaagcatctggtgatcgtggagtctccggccaaggccaagaccatcggcaaatatctggggcctgactatcaggtaacggcctgcatgggccacctgcgcgacctgcccaagagtacccttggcgtggacattgaacacgattttgaacctgaatataagcccattcgcggcaaggaggagctgatccgccagctgaaaaaggacgccgccgccagcgataccgtctacctcgccaccgacccggaccgcgagggagaggccatttcctggcatttgcagcatctgctgaacctgccggacgataagaccagacgtgtcaccttcaacgagatcacccgcaaggtggtgggcgagagcatcgcccatccccgcgccatcgatcaggatctggtggacgcccagcaggcccgccgcgtgctggatcgcgtggtgggctatcagatctccccggtgatgtggaagaagatccgccgtggtctgtccgccggacgggtacagagcgtggctacccgcatggtgtttgatcgggatcaggagatcgccgacttccagcctcaggagtactggacactggacgcagtgctggaaaacggggaaaaagtggcctttaaggcccattattacggccaaaatggcaagaaatacgagccccagacccaggcggatgtgcaggccatcatggacgagctgcgcagcgccgctttcgccgttaagtcggtgaagcgcaccgacaagaaccgttccccctcgccgccctttaccacctccaccatgcagcaggaggcgtcacgcaagctgaacatgacgccccgccgcaccatggccatcgcccagcagctgtacgagggcgtagatatcaccggcgagggcaccgtgggtctgatcacctacatgcgtaccgactcgctgcgcatcagtgacgaggcgcaggccgacgcccgcggcttcattcaggagcgctacggcaagggttatgtgcctgccgcgccccgccagtacaagaccaaggccggggcccaggatgcccacgaggctatccgccccagcaatgtgaccctgacgccggaagccatccggggagacctgacggcggagcagtaccggctgtaccgcctgatctggagccgttttctggccagccagatggccaacgccatctatgacagcgtgtccgtggatatcagcgccgacgcgcatttgttccgggccaccgccagcaagctgaaattctccggctataccgccgtgtacgaggagagccgggatgacgacgacaaggaggagaaggagcccaccctgcctgatctgaaggagggcgagcccctgacgctgaaggacttcgcgcccgcacagcacttcaccacgccgcccgcccactataccgaggcggcgctgatccgggccatggaggaaaacggcatcggtcgtccctccacctatgcgcccacggtgtccaccattcttgaccgccgctatgtgaagaaagagggcaagtgcctgtatatcaccaatctgggcaaggcggtcaccacgtggatggagaagtatttctccgatatcgctgatttgaaatttaccgccaacatggagcagcgtctggacgacgtggaggagggcaagctgccctggaagcaggtgctgcgccagttctatgacgacggcttcgcccaacacctgaccgacgccgaagcgggcgactatatccgccccgagcccaccgtcagcgatgagctgtgccccgtgtgcggccacaatctggtggagcgggagggtcggttcggcccgttcctggcctgccccggctatccggagtgcacctttaccatgccgctggtggtggagatgccgggccgctgccccaagtgcggcggacggctcatgaagcgcagcggcaccagcaagacctccggcaagcagtatacctactactgctgcgagttcgccaacaacaaaaaaggcgaccgcacctgcgatttcatgacgtgggatgtgcccaccaaggaggactgcccgctctgcggccagaccatgttcaagcgggcgggccgcggcttcagcaagcccttctgcatcaacgagaagtgcgccaacttcctgccggaggacaagcggggctatcaccgcaagaaggacaccgccgccgagggcggcgagaccaccgctgagacggctgcggagcctgcggccgaggaaaagcccgccaagaagtctgctgccaaaaagacgacggccaagaccacggcggcaaaaaagacgacgaccaccgccgcgaagaaaaccacgacggcgaagaaaaccaccacaaagaaagcggccaccaccaaaaagactactgccaaaaaggcggcggagaaaggcggcggggaatga

SEQ ID NO: 1701 - DNA, 441 bp, unclassified Ruminococcus
tacaaaaaggaggcgtttattatgaaattcagaatttataccgccggactgccggaggaagcgaaaaaaatacggctcgaggttttcgtaaaagagcagggcttcaaggaggaattcgacagcgtggacgacaccgccgcgcacatagttctatttgacggaaaaactcccgtcggggtgtgccgcgtctttaaagacagcggaagcggcaagacggtaatagggcgcgtcgcggtcaaaaaggagctccgcggcagagggctcggtacacgcataatcgaggccgccgagaaatacgccgcgggcacgggaataagtgcaatacgaatacattcgcaggagcgggccgccggcttctacagggcgctcggctacagagacacgggagaaagcgacctcgacgagggctgcccgcacatatggatggaaaaactcctgtaa

SEQ ID NO: 1702 - DNA, 846 bp, unclassified Ruminococcus
atggataacgggcttatgtccataggaaaagcagccgaaatgagccatttgtcggttgcgacgctgcggctctacgacgaattgggactgttgaagccgaagtataaagacccggagacgggataccgctattatgatatcgctcagaacgcgcgtctcgatatgatagtctatatgaaggagctcggaatgagtctcacagagataggcgacgtgctcgaaaaagaggatatagtgctgatagagacgatactgacccaaaaaaacgagcagctgcaccgtcagatgcgcgagcttcgggcgcagcacgacgcggtggagcgcgccatagcctctatcgaacggtaccgcaaatcgcccgaaaccggcacggttgttctcgaatatatcgatcggcgttatatctggggcgtgccgtgtgcctgcaatttttatgaggagggcttacgcgccttcgagcaggagcttgtcgttctgcgcaaggcgcttatggagcgcggatttttgcaggctcattcatataatgtcggcacatcgataaaaaaagaggatttcatcaacggaaactttgttcctcaggatacgtttgtttttgtcggttatcgggatcagccgactctgcagggaaccgtcattgtcgacagcggtatgtatgcctgcgtctatcttgacagctttgacgatgaggttgaatatgcaaagctgttgctgcagcactgcaatgagaataaccgcaccgtctgcggggactatttttgcgaaataatgacggaattcaatgtttttgacgacagtcgacgcaatatgtttttgcgcctgcaggtaccggtagaatttaatcgataa

SEQ ID NO: 1703 - DNA, 933 bp, unclassified Ruminococcus
atggtattgacaccctttgtctcggagacggtctggggcgggcgcagactcattgatgaatattccgtcgtcaccgacaagagaaacgccgccgaggcgtgggtcatgtccgcgcacaaaaacggcagttcgactgtagcaaacggcgaatttgcgggagagacgctgcgcgaggtatatctcgcccatccggaaataggcggcaaaaactgcgcgggcttctcggattttcccgtgctgataaaatttatcgacgcggcggccgacctgtcggtgcaggtgcatcccgacgatgcctactgcctgaaaaagggcgcgggcgcaggaaagaccgagtcatggtatattctcgactgcgagccgggcgcgcatcttctgctcggcttcgaaaaagacctgacccgcgaggagttcagacagtctgtaaccgacggcacgctgaccgattttgtgaagaaggtcccggtcaaaaagggcgacttcttctttatagaatccggcacgctccacgcgatatgcaagggcatattgctcgccgaggtccagcagaactcggacactacatacaggatatacgactacggacgtttggggcttgacggcaagccgcgcgagcttcacgttgaggacgcagtgaacgtcacgcacacgggcgtatacaaaaacccctgcgtccccgaaaaggacggcaacgttacaaagctcgtatcctgcccgtttttcaccgagcgggtcattgatattgacggctcttttgagggagacgcggacgaaaaatccttcgtatcgctgctgatcctcgacggctccggcactctcgaatgtgcgggcgagacactcgaattttcaaagggcggcagtattttcattcccgcaggctgcggaagctataaaataaacggagaagcaagggctctggagacgagggtctga

SEQ ID NO: 1704 - DNA, 480 bp, unclassified Ruminococcus
cgactgcagcaggcctatcgcggtatcaacatttttcggcatatccatcttcaaagccaaatctcccttgcatactttacaacatatatattttatcatataattgtcctcggatacaagagaaaaaggagtctatatatgaacatacagatattcggaaaagccaaatgcttcgatacgaaaaaagccgagcgctggttcaaggagcgcagaataaaatatcagctcatcgacgtcgcaaaatacggcatgagccgcggcgaatatgcctctgtcaaaaaagccgtcggcggcatggacaaattgttcgacgagaaaagcaaggcctatgagcagcagtttattaaatatctcgcgcacgacgaggacaaggaagaaaagctgttcgagcacccggagctttttaagaccccgatagtccgaaacggcaggcaggcgacggtcggctattgcccggagatatggaaggactgggagtga

SEQ ID NO: 1705 - DNA, 744 bp, unclassified Ruminococcus
ttgccgcaagttgatgccttttcccccgacggccgcgcggacacagagcctgtcttgttggcgctcgacgaatacgaggtcatacggcttgtggatttagagaagctgacccatgagcaatgcgccgcacagatggacatctcccgctccaccgtgcaggaaatatacgagagcgcaaggcaaaaaatcgctgcgtgccttgtctacggaaagccgcttcgcataacaggcggatgctaccgcgtctgcgcggggcgtgagcattcgcgctgcgggcgctgtacacgctcaaacgaaagagacacaagcaaaaccgacaacgactataaaggagaacctatcatgaaaatcgcagttacctatgaaaacggtcaagtttttcagcacttcggccatacggagcagttcaagctctatgatgttgaggacggaaaaatcgtccgcgaggctgttgtcggcacaaacggcagcggtcacggtgcgctggcgggctttttgacactcaacggcgttgacgctcttatctgcggcggcagcggcggcggcgctcaaacggcgcttgcagaggcgggcataaagctctacggcggcgtcagcggagatgcggacgcggcggtgaacgcgctgcttctcggcaagctcggctacaatcccaacgtccgctgcagccatcacgaccactcccacgaaggcgagggtcatacctgcggcgaccgcggctgcggcaagcacgactgccactga

SEQ ID NO: 1706 - DNA, 396 bp, unclassified Ruminococcus
gcgataaacgttgaaagggggcggcggacggtggatatgccgcagcattccgttttgcgggacggtaaagagacaaaaaggacgcttccgtacaatcggcaatatgtcattcttgcgatatatgaggtgctcgataaaaacggcgccgggtatgaaaaaacggatgcttcaaccgtcatatcgaatatgtcggtgtacgggaatttaagtcgtttttcaatctgcgtaaccgagcaagagcacgggacggagctgtccgtaacaatgcttcaaccgtgcgaggggctttctgcatccggtgtgcagcgggccataacagccgttgccgacagcatctcgcagtatctggaaaatgagcttgtgatgaatgggatattcatgcagaagaatagataa

SEQ ID NO: 1707 - DNA, 606 bp, unclassified Ruminococcus
atgcgtttcagaataaaaaatacccgcattgagttcggctttccctttgccgtgacagcagccgttatacttatgctcgaccgcagcaaaactgcacctgccgtgttcctgtgctgcgccgtgcatgagacggcgcatattctgctccttgcgctctgctccgcgccgcccgatgcgatagtcctcggtgtgttcggcatgaggatagacaggggagagacgtgcctcgattaccgccgcgaagcgctctgtgccttggcgggacccgcggcaaacttcctgctttcgctctcggctctgccgtttgcggaaaaatatcccgccgccttgaatctcgcggcgctgagcgcggggataggcgttttcaatctcctgcccgtcgagcctatggacggcgctttggcgctgaaaagtctgctgctgctcaaatacggcgagcgcacggcggacagagccgttgatatctttgccgccgtcctgctcgttccgcttactgtgtgcgggatagtcctgctgataaaaaccggaagcaactttactctgctttgcgtgtgtgtttatatatccgtctatcttttggcaaaaaagcggggcagccgtatttag

SEQ ID NO: 1708 - DNA, 381 bp, unclassified Ruminococcus
atggcaaaccagaatctcgagtttggcaacagactcaagacctttcgcacccttaacggtctgacacagggggaagtggccgaggtgctgaagcttgaccgctcgacctacacctattatgaaaaaggccgcgttccgaatctcgatactctcaacaagctctcaaagctctttaacgtgtccgtcgccgagctcatcggcgagcgcgacgacggtgcgcttgacgttatcaaaaacgcaagcagggagctgcacgttgagagcatctttttgagaccggacgaaaaacagctgatactcaatcttcgcctctgctccgcctcggacagacagaagatagcggaaaaggtcaatcaatacgtcgaaaagagatccaaataa

SEQ ID NO: 1709 - DNA, 1236 bp, unclassified Ruminococcus
atgcttaaacccgaacagctcaaatctcatcgttttatttccgccggacgcgggacttatgaggcagaagatgttgattcgttcttacgcgaggtatccgcatcttacgaaaagatgtttaaggaaaacggggatctcgttaaaaaaatgagccttcttgcagagagagtttctcagtataagaaggatgaggataatatcaggcgtgcgttgcttaccgcagagcgcatggcggacaaaattcagcgcgaggctcagcagagcgcgcaggagcagctcgattccgccgaaaagagagcgcaggagcttgtttcctcggcgcagaacagagccgatgtccttgaaacagcggcttcggtaaaggcgtcgcagctcactgaagagtcaaaccgcaacgcaaccgagcgcataacctccgcagagcgcaccgcctccgccatgataagcaatgcggaagcaaaggctaacgagataatcgagagcgcaaagaaaaatgcacagcttgagcttgacagaataaatgccgctatacgcgtaaattcggcggcgctcgagaagcttgaaaacgaagttgcggcatttcgcaattccgtgctcgacgcttaccgtaagcatatagatatcatatcttcgcttcccgagcagcaggatgtgcctgttatcccgactgtaaatacggacgagtatatttcggacagccccatatctgtcgaggatgagacaaacaacgtcgatatcgttgaagaagtcgaagaagcagaagtgacagaagagcccgaagagaccgaaaccgcggaaaacgacggcgattcggttgaagacgccgaaccgcaggacgctgttgcagcgtttgaggacgagcccgaattcagcgaagagaatgcggctcccgatgaaattgtagccaacgatatactcatgcagtcgcaagattcggagagcgatacatacgatcccatggccgcggcggaggagactgtctccgattccgacgagacggaggacggcggcgattccgcaaacggctttgtgataaacttcggcgttatagagcatcatatcacgcccgacgagtttgaggatgacgacgacgcggaggacgacaccgacgaagttcttgccaatgtcgataattttttagacggcgacgatgatgacgataatgacgacgatgatgatgataatgacgacgatcatccccgccattctcgcttcagaggtttctttaaaaaataa

SEQ ID NO: 1710 - DNA, 1428 bp, unclassified Ruminococcus
atgaggtgcggcatgggagatataattaagctttccgccctcgctctgggcgaaaaaatcgggcgcggcgagataaaagtcgccgaagtcctcgacgcggtatataagtcggagggagaaaacagacgactcaactgctttatcacgctctgccgcgaacgcgcatacgaaaagggcgcggagatacagaggcggctcgacgcgggagagtatatctccccgctcgcgggcgtgccgataggcataaaggacaatatcgcggtcgatggagttaaaatgacctgcgggtcgcgcatactcgaagattatgtgccgcccatcagcgcggcggcggtaaaaaagctcgaggacgcggggcttatcgttgtcggaaagctcaacatggatgaattcgccatgggctcgacgggcgagacctcatatttcggcgcggtactgaatcccctcgacgaaacgcgcgtacccggcggctcgtcgtcgggcgcggcggcggctgttgcggcgggtataatcccgctcgcgctcggctcggacacgggcggctccgtcaggcagcccgcggcgttttgcggggttttcggcttcaagccgacctacggcgcagtctcccgaaacggccttgtcgcctacgcctcgtcctttgatcagataggcgtgacagcggctgcggcagccgactgcgcggctctcgaaaatataatctccgggtgcgactgcggcgacgcgacgagcgaagaaataaagccctctcgggcagacggcgaagaattttcgcttcgcggcaaaaaaataggcgttcccgaagagtttatctcctcctgcggcaaagatatccgcgaggctgtcgcagccgcgctgaaaaaggctgaggcgctcggcgcggaagtcgaatatttctctctgccgccgcttgaattttccgtgcccgcctactatataattgcctgcgcgcaggcgagctcgaatctcgcgcggtacgacggagttcgcttcgggcggcgcgccgaaaacgccgccgacccgaccgaaatgtatatcaaaagccgttcggagggcttcgggcgcgaggtcaggcgcaggataatgctcggaaacttcgtgctcggcgcggggtactacgacgcatactacaacagggcgctgaaggcccgcagagtaatacgcgacgcggttttaaacgctttcgaaaaatatgattttttagcgtgtcccgtatatccgtcggcggctccgaggctcggcgagagccttaaagacccgctgaaaacctatctcggtgacgcatacactgtcacggcgaatctcgcggggctccccgcgataagcatcccgtgcaaaaatatgtgcgccctccagctcatggcggctccgtttgacgacggaaatcttttaagcgcggcgggtgctttgggggaggcggtaaaatga

SEQ ID NO: 1711 - DNA, 768 bp, unclassified Ruminococcus
atgggaattataaaaaatgagataccgatattagagtttgattcggagcagacagcagtcataagtcctgttcatgaaaatctaaacctcaatcttccgaagaaatgtgtattcgcatttctcggcaattacatagacgagtatgcaaacagctccgacaccaaacaagtatcgacttttatcagcgcaacaaagaactatcctatttatataacaaaatacaaaggcgaggaaatcgttctctgtcaggcgcctgtcggtgctgccgccgccgcacaaatacttgactggctaatcggttacggagtttgtgaaattatttctgcgggcagctgcggtgcacttgaacatttcgaggaaagtacattccttgttccgagcaaagcattgcgcgacgaggggacatcgtatcattacgctcctccttcacgctttatggaaatcaacgaaagagcaaaaaaggccattgaaaaaacaatacttgagcacaacatgaaatatcaagaggttattacatggtctaccgacggctttttccgcgagacaaaagaaaaagtcgaatatcgcaaaagcgaaggctgttctgttgtggaaatggaatgctcggcactttcggcgtgtgcagctttcagaaaagcaacatggggaatgatactgtatacggcagacagtcttgccgatgttgataaatacgatgagcggcattggggcggcagcgcatatgaatatgcgcttaccctgtgtctggacgcggtattagccatataa

SEQ ID NO: 1712 - DNA, 1200 bp, unclassified Ruminococcus
atgggagatatttacatatctggcaacggaaaaagacctcaggatactcaggatatcccgataacaccgcgcagagtcgatataaacgacctcggtgcgcagaacagaaacgcgcagcagccacagcgtcggggacagcagcccgacccgcgccgcgaacagcgcagacctaatccggataagcagcctcagcgcagcagcaacggcgatcggcagggcgaagagccggcacgtaaaaagccgaagaagaaaagccgcgccgcaagagcccttttcatagttcttctggtgcttgtgcttatcgcttcgagtatattcggagtcgtgtatgccacggcgagcaagatagactataagcccgagacgcataaggagaatgtctatgtcgattcctcgacccttatgcacgacagcaaggttactaatattttacttatcggcgttgacggttcaagctccgatacttcgcttcgctcggatacaatgctgatgatgtctatcgaccgcaacaacaagaagataaagctgacatcatttttgcgcgacacttgggctgttattccttcgacaaaggcctataacaagcttaacgccgcctgcgcatacggcggagcgcagctcgttattgacactatcgagtataactataatgtcaagatagacaactatatgctcgtcggattcgatatgttccagacaataatcgattccgtcggcggaatagatgttgaagttaccgagaaagaggcgcagtttatgcgcgccacggcaagagcgacgagagagatacagtcgggcgagagcgtccatatgaacggcgcgcaggcacttgtctactgccgaataagaaagctcgattcggatttcatgcgcacacaccgccagagaaaggtcataaccgccttgataaagaaggcggaaaccgcaagtccgctgactctcaagaagcttgccgacaaggtgcttccgatggttcagaccgatatttcgcccatggagcttacaaagcttgttttcggcgcgccgaaatatatcggatatgatataaaatccgagcgcgtgccgcatgaaaacacatggagctctcagaccaagaaagggcagtcggtcatagttaccgactttgatgcgaatatacagttcctcaaaacgtatctgtattctaccgatcccgttgaggaggacgagaccgcaagctga

SEQ ID NO: 1713 - DNA, 1170 bp, unclassified Ruminococcus
ttgcggatagggggcggggatatttccgatttgtttaattttctgcgcggatatgtcggggtgaaagcgagcgggggtttcccggagcgctttctgaatctctgctcgcgcgggaatattccgtattgggatgtctgctgcacaaacggcacggttttcatgcgaaccacgcccgagggctacaaaaagatgcgccgctgtgccaaaaaagcgggaatgcgaatgaaaacggtcaaaaagagcgggcttccgttttggctgtttaaaaaccgcgtccatgcggggctcgccgtcggcgcgctgtgctttgttctgataacggtagcgctctccggtcggatatggaccgtaagcgttacgggctgcgagactgtgccgcaggaggatataattgaggcggtcgggcgcctcggcgtttgcccggggatgagaaaaaagcaaatagacacgcactctgcagcggaggaggcgatgtccgtgctgccggaggtttcgtggctgtcggtcaatataagcggctgctcggcgattatagacgtgcgcgagggcgtgggcaggacggttaaaaaagacgactcgccgtgcgatatagtcgcagcggaggacgggcagatacagaccctcgaggttttcggcggcactgccgtgcaggagcaaaactccgccgttttaaagggcgacacggtaatcagcggcatagtcgaaaaccgcgacggcggaatgagcctgcgccgcgcctcgggctatgttaccgcgctgacaaagcacgccttttcgaccgaatcccgcccgctgccgtcgagaaaaataagcggaataaaaacgcgctatacgctcctgtttttctctttgaaggtgccgctcggggcgcggacggacgcggattttacggagaacagattcctgactctcggcggagtgaagctccccatcggcataagagccgagcgaaaatatattttcgagcccgcggacgcggcggcggatgacctcgccgacctcattgcgctcgaaacgcatttttataaagccgcggacggtctgcgcgatatgctgacaatgagccgcacgaccaaagagcgccgctcaaacggtcgcgcgatattttcgagcgaatacggctgcctgcaaaatatcggcgaggagagaagaatagaggcgggggaatga

SEQ ID NO: 1714 - DNA, 945 bp, unclassified Ruminococcus
gtgaaacatattttccttatcaatccggcagcaggtaaaaagggtaattccgagagtattatccgcccgcagatagaggactattgcggcaaaaacggtctcgactatgagatctatgtcacaaaatgtcagggagacgcacagaactattgcgccgagcgcgcgaagtccggcgaggcgctccgcttctatgcttgcggcggcgacggaacactctacgaagtggtcaacggcgttttcggaaaccccaactgcgaagtagcggtcatccccatgggctcgggcaacgattttattcgtctgttcggcacaaaggagcagttctgcaatgttgaggctcaggtcacgggtatccccgtcgagctcgatgttgtcaagtgcggcgacaagatagctatcaaccagtgctcaatgggcatggacgccgaggtctgcgcgaagcagtcttcattcaagaagcttccgctcgtcaacggcgaaatggcttacttcctcgcggcaattgaggcgctgttcaagaaactcggtcataattttactataaaaatcgatgataacgagcccttcgaagacaacgttctgttctgcgtcgcgggaaattcccgctggtacggcggcggatttatggccgctccgcttgcatggcctgatgacggcaagcttgactttgttatcgtccgtctggacagaggccgcctgcgcctggcttcgctgctccagaagtacaagaagggtcagcatctcggcctgccgatgaccaagtatatcaacggcagccgccttgaaatacatagcgacgttcctgcagcggtcaatatcgacggcgagtgcgagtatgtcaacgatgctgtgtttgagatcgttcccaaggctattaagtttgtcgtgcctcagttctccgaattccataagggcagagccgagcgcgaagcggcaagaaaataa

SEQ ID NO: 1715 - DNA, 1200 bp, unclassified Ruminococcus
atgaaaatgaaacgaatttctgcctgcctgcttctgctctgcctgctctgctcatgcgccgtcccgccgcaaaagccgtcggacacgacggataaaagcctgatggaaactgcggaatacacgccgggacccgacgagctgcgcgccgtttggataagctgctacgagctgccggacgttgctcaaggggaggaaaaattccgcggggcggcgaacgagatgtttcgcaatatcgccgatatgaagctgaacaccgtctttgtccatgtccgcgcctttgctgacgcgatatacccgtcgaagcttttcccgtggtcaaaatattcctgcagggggagcgacccgggctttgacccgctgaaaatacttgtcgagtgcgcccacggagcggggctgaaattccacgcatggataaacccgtttcgcgtctcgtcctccgaggataccgactctctgccgcagggcagccccgcccgaaagcttctcggcacgactgctgttatcgggcttaaaaacggaatatattttgaccccgcgtccaccgatgtccatgccctgatatatgacggagtgcgcgagatactcgacggctacgacgttgacggcatacacatcgacgactatttctatccaacgcgcgacgggagcatagaccgcgcggaatacgaaaaatatgtctccgacggcggggaaaagggacttagcgagtggcggcgcgacagcgtcagcgcgtttgcggcgggactctgtgcgctcgtcaagagctacggaagcaataagattttttcgataagccccgcggggaatatcgacggcaacgaaaatgcgctctttgccgatgtcgagctgtggctctcggctcccggctatgcggattatattatcccgcagatatatttcggcttcgagaatcaaatcctgccgtttaaaagcaccgccgagcgctgggccgaaatttccgacgggcgcgtagggataatctggggactcgccgcctacaagtgcggaacacgggacaaaaacgccaaaacggggagttgcgagtggacggaaaacacggatattatagcccgtcagctctcgtttgtccgttcgctcaacgcctattgcgggttcgcgctcttttcttattcatatatgttcggaaaaatcaacgaaaacgcaaaaaaagaaatgaaaaatctcgaaaatatgttataa

SEQ ID NO: 1716 - DNA, 984 bp, unclassified Ruminococcus
atgaatattaagagaagtatcgcgttcatgctgctcgcctcattcttgctctgcgtgttgttcggctgcgaaagcggaagcggctttgcccccgaatatccgagagttgccataataataaagggaagcgaatccgatttctggaacgacgtgaaaaaaggtgcgtattcggccgcgaccgagttcaacatcgatatcacctttgaggggccggagaacgaggaggattacgagactcaaaataaaatgatagaaaacgccgtttaccgcaatgtcggcgcgattatcctctctgcaatcgattttgaaaaaaacgctcccgccgttcgcaaggctgcggagaagggtataaagataataaccgttgacagcgacgttgacgtagccgaaaaggagctgtatatagcaaccgacaattattctgccggtcaaaaaacggcggatgtcgcgcagaagctctgcggagacaaagaaagcatcaatatcggaatagtcaactacggcgagaacaccgaaaacggcagcaagcgtttgcagggttttaaggacggcataaaaaatattaaaaacgcaaggatagtcgccatgataagcatatcgtcgaatgcccaaagcgcgacggcgggctcaaggaagctgctcgaggaaaatccggagataaatgttcttgtcggcttcaacgagtggtcaactttaggcgtgggcacggcgataaaggagctcggagtcaaggacagcgtctgcggcataggttttgacaacaacacggagtgcgtcggaatgctcgagacgggcgagcttgatactctcattgtccaaaacccgttctccatgggctatctcgccgtcatgaatgcggcaaacatactctcgggcaagaagaccgagcatgagattaaaaccgacgtctatgtcgtcgaccgcagcaatatgttttcagcggacgttcagaagatactcttcggctttgacaaatacaaataa

SEQ ID NO: 1717 - DNA, 1290 bp, unclassified Ruminococcus
atgagtaacgcaaaagcactgaaaagaattccgtcaatagaccgtttccggggtactgttatcttctcgatgataattttccagttcattgagtattttaagaacctcggagcagcggcgaatattgctctccatgcacccaaggaggacgcgttctatattctgccgaattttgcgatcgcggatattatcgcgccgatgtttattcttgcaatcggacttacctacattccgtcgctgaaaaggcgcattgagcgcgacggaaagaaaaaggcgagcatccactttgtcggacgttatctgacccttatcggcatcggaatgacgatggacggggtgaacgacctgctcggcggaaaagataaccccattgaaaaggtctgcaagattgtctctctgacagtcgtggtgcttctgctcctttacggggttctgcgtctgtttaaggcgaagaaaatagcccattatatcggagttgcgctcggagcggttgtagttatatacggcgttttcggaatagttctcgcggccgtcaacggcgttatgctcgttagcggaaagaccggagattcgtaccatcactggatggtgctgcaccatatcggcttttccggacttgtggcgttgccgtttgctctgatagacgggaagagggcgacgctcatccgttttataagcgcggcggtgatccttgcgcttttcacgctgttccatgaggcgagcttctcatggactcagttcccgaacaatatggagcttgtcgataaggtagccgacggcggaatactcggcggcttcgcgtggggagctatgcttatactgtatcttgcattttccgatttgtactataagggcaaaaagcagttcgggatcgcgctcggagtttttgcgctgataacggcgggaataaccgcaggcgtatttgcgactctgcccgcgggcacagacacatgggcgggagccctgagctcgttcctgccgataaacaaaggtagcgtcagcccgtcatatgttattatctccgcattcctttctctcctggcgttctcgattttcgatctcttcaacggctttatgccgaagtttgatccgctgcgctggtggggcaaaaacccgattctcatgtactgcatagagttcgcggtaataggcggattgactgtcgcactggaggatttctttaagacagcttccgtgccggtgtcggtgctgataatcgcggcggtaattgtggcgttgacgtctctgacatatgtccttgacaagaaaaatattattgtcaagctttaa

SEQ ID NO: 1718 - DNA, 468 bp, unclassified Ruminococcus
ggaatgatgtatgctgttatcgccgctgttgtttcggcggctctgcttgtgtattttacggtgcgtattgcccgcgagcccaaaaactccgactgcgtcgtgtatattccgagatggctcttctttttggggctggtcgtctatattttcggcgcgggggtcggcgttgccatgctcgccgtcgggagattcttctttgcgattccctgcttgctctgtatgctgttcggctgcgccgccatgctctgctgcctcaatcagaaggccgtgtccgtcggggacggggagtatgtctattcgactatgttcggcagggagaagcggttcaacgcctccgactatgtccgaatgacccgcaattccgattcgctcaccctgaagtttaaaaacggtaaaatgcatattgataacctcgccattatcggcgacgacttcaaaaacagtctgattgaaggcaaaaaagactga

SEQ ID NO: 1719 - DNA, 1341 bp, unclassified Ruminococcus
atggatgacaggctattcacaaacaaagatttgcgggcgatgataattccgctttttgtcgagcagtttttgctgctactcgtcggtatagcggatacgtttgtcgtcagctttgtcggcgactccgcggtttcgggcgtgtcgctcgtcaattcctttaacaccgttataattttcctcttttccgcccttgcgtccggcggcgcagtcataatcagccagtatatcggcagcagggataatgtgcaggcgggcaaagcggcaagccagctgttgatgttttcgaccgtcagctccgtctgtgtgtccgcgctcatattgatttttacccgccctctcctcaatctgcttttcggcagggtggaggacgatgttatggcggcgtgcgtcgagtatatgtgcataaccgcgtgctctttcccggcgctcgcggtctataatgcgggcgcggccatgtgccgcagcgtcggcagagcggatgtgtcgatgtacatatccgcctttgcaaatgccgtcaatataataggaaatataataggcgtgtttgcgctcaaggcgggcgtcgcgggtgtcgcttatccgtcgctggcagcgcgaattatttccgccgtcgccattaccctctattgcttcatgcacaagaaaacgcctgtcagatatactttatcgggcatattcgcatggcacggctcactgctcaaaaaggtgctcggtatagccgttcccaacggagttgaaaacggcgtgcatcagctcgttaaggtcgctttgagcagcatggtcgcgcagttcggaacatatcagatagccgcaacgggcgtgtcgcagagtatatggtcgctcgcggcgcttatgggtatggctatggcgcccgtctatactaccgttataggccggtgtatgggggcgggagatacagatgccgccaatcactatttcaaaaagctcaacaagctgacctttatcctgtctttggtgtggaacgcggcagtgtttgcgatgacgccgctgtttttgaagttctttgcgatatccgacgaggcgaagcatcttgcgctcattatggtgctcataaataacgccataaacgcattcgcatacacctttgcaggacctctcggcaacggactcagggcggcgggcgatgtcaaattcaccatgacagtctccgttgtgctgactattgccgcgcggctgttcttctccgcgctgttcggactgtggctcaacatgggcgctgtcggcgtggcgataggcacgagtatggatttgctctttcgtggggcgatattcttcgtgcgctataaaaaacagaaatggacagagtttaagcttatataa

SEQ ID NO: 1720 - DNA, 2334 bp, unclassified Ruminococcus
atgcgaaaaacaacgcctaaaaaagaaaaagacaggcgcgcaaaaaggacatttatatgtattgccgtagtttttcttgtctgcatcggtaatctgttttttatccagataattcgagccgattattacaagggcaaggcagaggagaatcagctctatgataccgccataccggctcagcgcggaacgatatatgactcggagggcaatgtcctcgcccagagcgcatcggtgtggctcgtgtatatcgacccctacagcgtaccggacgataccgttcgcgctcagctctgcctcgatttgagcgagacgctcgggataaacggcgacagcctgatgaaaaagctgcagatgacaaagtacagatatctggtcatagcaaagcaggttgaatatgacagaaaagaaaaagtagtcgagataaaaaagaaaaagtacgaatacgtaaaagacggaaagaagcagtatgcctacggcagctccatggtcggcatagacccggacgtcaagcgctattatcccaacggaaaccttgcgagccatatcatcggctacacaaattccgagggtaacggtcaggcgggcgtcgagctctactataacaatattctttcgggtatacccggcagaaaggtcacggcaaaggatgcctacggcagagcgatgccgctccaatatgagactctttacgatgcgtcaaacggtcaaaagctccagctgacggtcaactccaatattcagcgctatcttgaggacgcgttgagacaggcgtatatcgacaataagtgcgcctacgcaaacggcatagttatggatgtcaacaccggcgcgatactcggcatggcgactatgggcgactatgacccgaacaacccgcgcgagacggacgaggcagaggtagaggaggagtataagcgccttcaggagcttcgcgccgcgaagtacgaggagtcgggaaagaccccgacggaggaggaaaaaaagaagggtcaggaagaggacagaacgaacgcaaagctcaatgttttctataacaatgtcagaaaccagaatgtcagcagcacctatgagcccggctcggttttcaagacgataaccgcgtcggcggcgctcgaccagggcgttgcggatcagtcgacgaaggtcgattgcgtggcgggcggcataagggttctgacccagacctaccactgcaacgcgcacacggttcacggcacgctcgatatggtcggcggactcaagcgctcctgcaactcatatttcataaccatgggtcagcgcctcggcgttgataacttctataaatattttgaagcattcggcttcacggaaaagacgggcatagacctccccgccgagactcagcccaaggcgggagtcacctaccacgcccacgagggcatgactcttatcgaccttgcgagctcgtctttcggtcagtcgttccaggtcacgcccattcagatggtgacggcgctctccgccatagcaaacggcggaaagctgatgaagccctatgtcgttgcaaaggtgctcgacgacaacggcaacgtggtcagcgagactcagcctacggtcagacgccaggtgataagcgaggagacctccgcaaaggtcgccgagatgatgcgccgagtcgtcaacgaaggtacggcgaaaaacggctatgttatcggctaccgcgtcgctggcaagaccggtacatcgcagaagctcggcaagtcgggcgagcacgtcgcgtcctacggctgctttgctcccgcggatgacccgaaggttgcgataattattatcattgacgagccgcacggcggtcagatacagggcggtcagatagccgctcctgtcgcggcgcgggtcatggaaaagacgctcaaatatctgaacgtcgagccgcagtataccgagagcgagcttgcaaaactcgacacgacggtttcaaactacgtcggcaagagtgtttcggaggtctcctccgagctgcgttcggcgggcttcaactgcagagtcgtaggcaacggcgacaaggtcgtaagtcagctccccggcgcatatcagagcgtacccaagggcggcatagtcgtgctctacaccgagggcggacccgttgaaaaaaagaccaaggttcccgatttaacggggctttcgataacccaggtcaaccgcattgcggcggccgcgggcataaacgtcaagatatccggcaacaccctcgtcaattccgagctcgtttcctacggacagagtgtagcaaagggcgagagcgttgattacggcacgacggtcacggtgtatttcaaatcgaataccggcgtggccgattctccgggctga

SEQ ID NO: 1721 - DNA, 1416 bp, unclassified Ruminococcus
atgagaaagacaaagatagtatgcacaataggtcctgccagcagcgacccgaaaatattcaccgaaatgtgcaaggcgggtctcaacgttgcgaggctcaacttctcccacggcactcatccggagcatctcgaaaagctcaatatgataaagaaagtgcgcgaagaactcaatctcccgattgcgataatgctcgacacaaagggtcccgagtacagaatcaaaacctttgaacatggaaagatatttcttcaggacggcgacgagttttcgttcactaccgaggatattgtgggcaatcaaagccgcgtcagcgtgacctacgcgggactcgtcaacgatatctctataggcgaccgcattttggtaaacaacgggcttgtaattttcgaagtcatcggtaaaaccgacacagatgtaaggtgcagggtcatcaccggcggcgagctttcaaacagaaaaagtatgagctttccaaataaggtgctcaatcaggtatacctcagcgagcaggacaaggaggatctgctgttcggtattcagaataacgtcgactatatcgcggcgtcttttgtttcgcgcaggcaggatctcgttgacctcaaggcatttctccgcgagaacggcggcgacggcatagacataatcgccaaaatagagaaccgcaccggcatagataacatagaggaaatctgcgaagagtgcgacggaataatgataggccgcggcgatctcggcgttgaagtccccttcaccgagctccccgcacttcaaaaatatataatcactaaatgccgtctgctcggcaagcgcgttatcactgcaacggagatgctcgaatctatgataaccaatccacgcccgaccagggcggagatctcggatgtcgcaaatgcggtctatgacggcacgagcgcggttatgctctcgggtgaatcggcggcgggtaaataccccgtcgagaccgttcgcacgatggccgagatagttgaggagaccgagaagcacatacactatgcaaagcgtttccgcaacaacgatttcaagataaagaaccgcgtcgacgctatttcccacgcaacctgcggaatggctattgacatagacgcaaaagctattgttgtcgcatctatctccggcatgacggttcgcatggtatcgcgtttcagagcgccgacggacataatcggtatggcgacaaacagggctgtgtggtacaagctcgcgctctcttggggtgttatgcccgtgctcagcgagaaattcaattcgaccgacgttcttttctatcatgcgcagaaggtcgcaaaggacgcgctcaatcttgagccgggcgacaatatcgtaatgacatgcggcgcgataaacggaaaatccggcaacacaaatcttataaaaatagagacaatcgaataa

SEQ ID NO: 1722 - DNA, 1344 bp, unclassified Ruminococcus
atgaaaaagcttcaaaaaatccttaccgtcgtctctttcagcgttgttctggcagtctttgcttctgtcggcttctacagcttctttgacaaggacgaaaagtcttcggcgatggaaaacaggaatctcgcgcaaaagcccgctatatcaatcagctcatatttttcgggcgactttgcctcaaagtttgaggaatactacaacgaccagttccccggcagaaacgggcttgtcaaaataagcaacaagataaaagctttctactcgttccttaaaatcggcgacggagccaccattttgcagaacaaaggcggagtaggcgacggcgaggctctctcacatgaggcggagggcaacaccgccacctccgagcagaccaccgccgccccctctcagactgaggcaaacaccgaaaccacccaacccgaaaacgcttttaaagttaacgagggcgacaaagagaccgtctacacgaacaattatatagtcctcctcgacaaccgcctcatggagcagtacacaaatgtctacaagaagatggatgtctatgccgagacgctcaataagctcaaatctcagatgcccgacgtcaaggtatacagcctcatggctccgacttcgatagagttctacgctcccaagaagtacaactccggcaaatcacattcgcagtatcagggcatcaactatatctacggcgagctcaaaggcataactcccgtcgatgcctatccggagatagccgcccacacgaacgaatatctgtatttcaggagcgatcaccactggacggctcgcggcgcatattatgcatacagggcgttcgcaaagaccgcgggattcactcccgttgacatcaacacactcgagaccggcaaactctccccgttcctcggcacgctttacagggcgacgcagagctcggcggttgaaaagcatcccgactatgtcgaatatttcattccaaagacccacaccgaggccattgcttccgacactgacccgacactcggcagcaactacaaggtcaaggtcataaacacggaaattaaatcctcgaacaagtatcttgccttcctcggcggcgatcacggagtaacgaagataaccaccgacgcgccgggcgaccgcagcatcgtagttataaaagagagctacgcaaatgcatttgtgccgtggctttgcaacaactacaagaccatctatgtcgtagacccgagacagatggacgtcaatcttgcgagcttcgtcaagacaaacgctatagatgaggtgctcttcctcaactatatgttcatcccgacgaacccgaaatatatggcggctctcgaaaagatgggttaa

SEQ ID NO: 1723 - DNA, 594 bp, unclassified Ruminococcus
ttgggaagggatgacggaaaaatggacggaaaaatgaagctccccattgtggaaaagggatatgatattgctgcggccgatgcatatatttcgatgctgcaggaggaatacaataagctttacgcctggagttcggagctcgaaaagcgcaccaatatgcccgcgggcgagaccgcttcgagcgaggagttagaggcgctcagaacgcagaaccgcagcctctacaacaactgcgtggcatttgcaaagcacataaagcgccttgaaaagctcagagacgagcagggcagatatatggttgacgagctcaacgccgcagagagcagaaaaaagtgcctcgaaaaggagatagccgaccttgaggcgaagaagagcttgctcgaggtcagcaacgaatcggctcgcggccaagcggatgccgtaatttcggcagcgcgcaatcaggcgcagaagaccgtcgccgaagcgcaggagcaggcgaatctgatagtcgccgaggcgcagaagaaggccgagtccatactccgcgagcgtatcggcagaatgtcggcggtgtgcgcccagctcaacgatatgttcgacaaggacgaataa

SEQ ID NO: 1724 - DNA, 867 bp, unclassified Ruminococcus
atgagaaatgtttttgtgaagattttttcgttgctcctgtatattttctctatcctcgctttgggagtgaaaaatcctactttcccgaatccgtacaaaaccgttgatatgtcgaaattcgagatgacgtttgaagaggaattcgacggtgaactcgaccgcagtctttgggtcggtcattacacatacggcaaaacctcatccgtccgccgcggctcttactggaacaattacatggcctacacagaaaacggcaatcttgttatccccttgaaatatctcgatgagggcatgggcggaacgggcgccgggtggtacacggcggggctcgacacatcctcacgcgagacgggttttcggcagaaattcggctattttgaggttcgctgcattctacccaagggggcagacatctggagcgcattttggatgatgaacgaggatgtggtcaatgtcgacggctccggtcaggacggcaccgaggttgatgtaatggaaagcccgtattacgggcgcataccgttcaacaatgtcgtttactgcaatctccactatgacggctacggcgaggcacacaaagccaaacaggtctcgagaacctatgtcaagggaaatccctatgaggagttcaacacatacggtgtcgaatggaatgagaatgaatatattttctatctgaacggcatggagtatggccgcagcgatttcggcggtgtttgccaaaatccgctttttctcattctctccgttgaaatgtacggcgagaacggagttccctcaagcagagacaaaaatgcggatgaggcgcagtttattgtcgattatgtaagagcttatcagtacaaggatttgttaaacacaaagtaa

SEQ ID NO: 1725 - DNA, 1263 bp, unclassified Ruminococcus
ccctgccagcagtggacggaaaccgccgtgctgcggagcgcttctatagctttttcggtgtcaacgccgagggaagcatatatctctcttgcgctttcgtatctggtcataattctcctccttttatccttaaacacaatcaaagtttatcacaaaaaacggcgggaacaatgcttattcagaataaaaatttttctttacttatttcatacagatagctataatattgttggactaaagctgtgcatatgcacgcaaaaatatcgaaaaaaggtgataataatgaatactgttgagataacagcgatagttgcggcgtccgttctcctgtttgccggaatagttttcggcatagtaagctatgttgtcttctatgaggtcatagctcgaaaagcaaaaatacccgggaagatggatgccgacgtaaaaaagaagatgatggagacaaatcccgaaaagttccttcccgatccccgcgaggagtggctcaatgagcagacctttgaaaattactccataaccaatgcggatggaaataagctcaagggttatcttctgaaggcggacaagccgtccgatgtctatgtctttgcaagccacggctatcgctgctggggcaagcgcgagttcaggctcatgacaaagttctatcacgacctcggctttaacgtctttatcgtcgaccatcaggcgcatggcgacagcgagggcaaatatatcggcttcggctcgcatgagtctcgagacggtatgcagtggctcaggtttattaacgataccttcggcagtgatattcagataatcctgcacggcgtgtctatgggctgcgccaccgtcaccttgatgagcggcaacccagatctgccgaagaatgtaaagttcaccgtcgccgactgcggttatacaagcccgtgggcggagttcgattatcagctcaaaaacgcccatgttccttcttcgcctctgcttgacggcgctaacttcttcaataagcgcattgcaaaatacgacttcaaaaaggttgactcggtcgagagcgtcaagcacgcgcaggttcccatgctctttatccacggcacaaaggacgattttgttccgacctatatggtcaacgagctctatgacgcgtgcagcagcgacaaagatatactccttgtcgagggcgcgggtcacgccgagagctacccgaccgactccgccgcatacgaggctaaggtcaggagctttatcgataagtatatcacagttccgtcaaaggcgtaa

SEQ ID NO: 1726 - DNA, 1086 bp, unclassified Ruminococcus
atgcaggaaaagctcggcaaaacaaagacagacctgaacggcaaaaccgtgctcgtgacgggcgcggcgggattcatcggctcttttctctcaaaacgtctgctcacggagtttgaagatatccgcgtcataggcttcgacagcgtcaacgactactacgatgtccgcctgaaggaatcgcggctcgaagagctccgccggtatgagaacttcacttttatcaaggcgaatctcgcggacaagagcaaggtcggggaggtcttttgcgaatatgccccgcagatcgtcgttaatttggcggctcaggcgggggtgcgctattcaatcgaaaatcccgacgcctatatcgagtcgaatctcatcggcttttataatatcctcgaggcgtgccgtcactcctatgacagcggcagaaccccggtcgagcatctggtatatgcctcaagctcgtcggtctacggcggcaacaaaaaagtgccctacagcaccgacgacaaggcggacagccccgtcagcctctatgccgcaacgaagaagtcgaacgagctcatggctcacgcctactcgaagctctataatatcccctcgacgggactcagattttttacggtctacggccctgcgggtcgccccgacatggcatatttcggcttcacggacaagctcctgcgcggcgagacgataagcatttttaacttcggaaactgcaagcgggactttacttatatagacgacatagtagagggcgtggttcgcattatgcagggcgcgccggagcgcaaaaacggcgaggacggtctgcccgtgccgccgtatgcggtctacaatatcggcaaccgcagccccgaaaacctgctcgacttcgtcgagattctgagcagcgagcttatcgcggcgggcgttttgccgcaagactacgacttcgaggcgcacaaaaagctcgtccccatgcagccgggcgacgtgcccgtgacctatgcggacacagagccgctcgagcgcgactacggctacaagccctcgactgaccttcgaaccgggcttcgcaattttgcccgctggtacaaggagttctacaaggtctga

SEQ ID NO: 1727 - DNA, 528 bp, unclassified Ruminococcus
atgtattcggaaataaaaatcgatttacgggacacgcagtggccccttgattatatcgaccatgacagaaatattgcccgggcaatcgtctatgacgaaagcgggctgctctattttgtaagagcggagcgcgacgatgatttcgggcgggcgacgcttatcgaaacgtcgggcggcggcgttgaggagggcgaggatcttctctgcgccgtaaagcgtgagctccgcgaggagttgggcgcggaagcggaagtaatttgcaaaatcggagttgtgagcgattattataatctgattcacaggcacaatatcaataattattttttgtgcaaggttaaatcgtttggcgacaaaagcctgacggaagacgagataaagagctttcacttatcgacactgaaattgtcttatacgcaggcggttaaagagtacgagcgaagagccgacacaaaaataggcagacttatcgcagacagggagctgccgattttgcgccgtgcgaaggaaataatcgattccttagcttga

SEQ ID NO: 1728 - DNA, 1056 bp, unclassified Ruminococcus
atgaaaaaagcgggcgtttgcggtcatttcggaatagggcgcaatttgctcaacggccaaacggtcaagacgaaaactgtgacggaggaattgaaaaacctactcggcgagactcaggttgccgttgcggacagctgcggcggatttaaagccatgccgaggatggcggtagatgttttgaggctgttcaagggctgcgaaaatgtaataatgatgcctgcaaacaggggactgcgtttttttgcgccgctgtttttgacttataacaaattttatcgccgcaggatacactatatagttatcggcggttggctcgatacttttctggaaagtcacaaatggcttgtcagactgctgaaaaagttcgacgctatatatgtggaatcggaaacaatgaaagcggctctctgtgagcgcggctttgataatgcggtagttatgcataacttcaaaaagctccactcactgtcggagaatgagcttgaatatcccgacggcgagccgtataagctctgcaccttttcgcgcgtgatgaaagaaaaggggatagaggacgcgattgacgccgtaaagactgtcaacagccgcctcggacggacggtatacacgctcgatattttcgggcaggtcgataaggattacgaagaacgcttctcagagctaaaaaaaacattccccgatttcatccgctgcggcggcgcgatagatgccgacaggagcactgaaacgctgaaatcatattttgcgctgctgtttccgacctattatcgcggcgagggctttgcaggaacgcttatagacgcaatgtccgccggagtgccggtgatagcgagtgactggaaatataattcggagtttgtcgtgcccggaaagacgggggttataatagaaaactgcaatttggaaaaactcgcaaaagtgcttgccgctattgctgataatccggaaaaatggaattcaatgcggctttcggcattgagagaggcggaaaaatacagtcccgaaaaagcttcgcggccgctcatagacaggataaacggcagggattgcctttga

SEQ ID NO: 1729 - DNA, 846 bp, unclassified Ruminococcus
acggcggttcttctattctcggaaaggacaagtgccatggacgttaaaaaagccggggcggttctgctgatacccgtagacagaataagaacaaatccgaatcagccgcgaaaacacttcgactccgccgagctcgcgtctctcggcgagagcatacgccgcaacgggattttgcagccgctctccgtgcgcgcacaggacgcggacggcagctatgagctgatagcgggggagcggagactccgagccgccgcggaatcgggctttgatcgcgtgccgtgcattgttatcaatgcggactcggcgcaggcggctgtctactcggtgatagagaatctgcagcggcgcgatctgaacttcttcgaggaggcgcttgccattgagtcgctcggcgaaaaattcgggctcgacagggcgcagatatccgagaagctcggaaaagctccgtccaccgtgtcaaataagctgcgccttctgcgcctgcccgaggaggtgcgcgagaagataatcgcggccgagctgacggaacgccacgcccgagccctgctgagaatcgaaaacgaggacaagctgcacgccgccgcagacacggtgataaagcgatctctcaacgtcgcgcagaccgagaggctcgtcaacgcgattctggaggacgagaccgcgcagaagccgcgggtcataaagctttttaaagatgtccgcatcttcgtcaacacaataaaccacgcggtggacaccatgcgcgaggcggggataaaggccgaggctctgcgcacggagacgcaggacagcatagagttcacggtgcgaatccccaaggaattcgcctgccaaagcgcgggctga

SEQ ID NO: 1730 - DNA, 1461 bp, unclassified Ruminococcus
atgagaaaaataatatatcgtttcgcggctctgatgtgcgctgtgctctttgttctcggcgcggcgggctgcgcggtaaaaagcaataagcagaagctccgctttcagcacaccgcccaggacagggaggtaggcgagactcagtcaatgatagtgtacgaaaatcactatgcctacggtatccactatcccgcgataggcgtagagtcgatagacagcaagataaaggtggcggcgcaggagatagccgacacttttgtgggcgaggtgccgagctcaaaacccaagggcgagaagccgaccctgagcgccgactataagagctatcttgtctcggacaacggcaagaacaaatatgtcagcgtggtttttgagataaagacagatatagccgacaagggcataaagacggacacgataaagacgcttgtctttgatatcccgtccggcaagcttttgagcgcggacgatttcttcacggacggctacgagaagcttgcgagcatgagagtcgtatcgtattttatcgacaaccgcctgtttaatgcaggcgtcggctcggataaattcaagcagaatacctccgcagacaagaaaaatttcacaaaattctcgataagcgcggatagcctcgttttctatttcgactccggcacgctttttgatgaagacaagggctgcgtcgaggcggtgttcaagacgagcgatataaaggcaatcttttccgccgagaccgctaaggctctgttcggcgaggcgccttctcagcagcagacaccctccgagcccgagagcaaaaagccaaacctgcccgagggagtcaaatatatcgcgttcacatttgacgacgggccgagcaaggatgccaccaaccgcattctcgatacgcttcaaaaatataacggcagggcgacattcttcgttctgggcacccgcgtaggcagctatccggacgaggtcaagcgcgcctactccatgggctgcgagataggcagccactcgtggagccatgcgaatctcagaaagataagcaagcaggagcgcaagcaggagataaacaagactaacgccatagtcaaagaggtcatcggcgttgagccgaccctgttcagagtgccctacggcgattataagggcattcagagtgacttcaacctcccgcttatccagtggagcatcgacaccgaggattggagatacaaggataaacccggctcgggaagaactcaggcgcagcgcaacgctgatatgcagaagataatctcctccgttgtcgaccatgcgacgggcggcgagatagttctaatgcacgacctatatgatatgaccgccgacgcattcgagcagatagccgctcagcttaacgccgagggcttcaaattcgttaccgtccatgagctctataccatctacggcaagacgcttgaacccggtgtggtctacttcacgcccaaacggtaa

SEQ ID NO: 1731 - DNA, 684 bp, unclassified Ruminococcus
atgcacgaggaccacagaaaaagagtaaaggagcgttttctcaaggacgggatagaaaatatgcccgaccacgaggtgctcgagctgctcctgttcttttcaataccgcgcaaagacaccaacgctttggctcatgagcttatcgaccatttcggttcgctcaactgcgtgctcgaggcctcagccgaggatttgatgcaggtcaacggaataggcgagacctccgcaacgcttataacgctcacttttcagatgacaaagaaatatctgaagaatgcctccgacaagaagctgaagaaatatgacggccccgactcggtcaaggagcttcttatgtcaaaatatctcggcgcccgcgaggagatggtttttatgctgtctcttgattttgacgacaacattcttgccgttaacaagatagctcacggcacgttttcggccgcgaatatagacaaacgctttgtgcttgaaacggcttttcgcaacaaggcgcgttccgtggtgcttattcacaatcatgtaaacggaatacccgtgccctcgcgcgacgatttgaacaccacaaaggcggttggcgatttctttcaaggtgtaaacgtccacctgcttgaccaccttatatatactgatgaggatatcttttcaatggcgcagataaagaaatttgcacctctgtttatataa

SEQ ID NO: 1732 - DNA, 1620 bp, unclassified Ruminococcus
atgagtcaatcggtaaaacctgtgagaggctctgcggaacagccggatcacataatgctcagcatcaagggcgatgccgcaacctccatgaccgtcacatggcgaacctgcacggatatcaaggaggggtatgttctctgccgcgaggacggcagcagtgaagctatgcgcgtcgatgcggcaacggatgttttcaagagcgatatcgacataagcaatatgttctgggcagaccttacggggctgaagccggacacgaaatatttctacacctgcggagacggcgaacacagaagcaaggaattctttttctcaaccgcacccgaaaatctcactaaattcaaatttctctgcgtctccgatcagcagaagggcgagcctttcgattgccccgactactcccatttcaacagcttcgtcaaggagatgctcgaaaagaaccccgacacccgctttatcctgaccggcggagacaatacggactgcggtcagcatgaggttcagtggaacggcgcgttcagcgggcttgtaggaatatcggagcacatcccatttatgatgacgctcggcaaccatgacaaccgcggctttaaagattataaaaacgccataggcagatattatgccgagcctgccgaatttttcggcaagcaattcaagggctcctatcccgataacggccctgaaaactggaaaaccgaaaactacacctttgactacggcaacgtacacttcgcggtaataggaataaacggccctgaagaagtcaacgaatggctgataaaagacctcgactccaccaaaaagcagtggaaaataggctcgtatcatttcccgatatgctattccggctccgactgccagaattacgatgcatatcccgccatgcgcgagggaatggagaagcttgacatcctgttttcgggtcacgagcacaatttttcgagaagcttccccgtcagaaacgaggaaattttcgacagaccgtcgcagggcaccgtacactatatgctcggcaactcggatatgaacccgcccggaacgcgcgccgtccccaaggtgtggcacagcgccttctattctcaggaagagccggtctcgatggctgttgtcgtcgaggttgacggggcgaagataacactgacggcgcatctgaatgacgggcgcatagccgaccgctgcgtgatagataaaggaacaaactcaatcgacccgcctgcgctcgccccgatatataacaccacccgaatgaaattcaagggcatggatctcgggctctgccaatgcacaactccgtgcgaattaaaagacggaatatggttcgctcccctctccgttctcgtcggattcatcggcggcgaagtaagaaaaacacccggaaaggtctatctcgaggtctacgggcacagcgcggaatttacccttgacagcgacacggcgcaaaccgaccgcggagaatttaagctccctgcaaaggtatacaggggcagacgcgatcagctctacataccgctcgacggcgtaaaagctttcgaaatgcgctgggcatatgcgccgcgcaacaacttcgtctctatcgagcacgagagcgaggataagcccataaccgttcagccgtaa

SEQ ID NO: 1733 - DNA, 2070 bp, unclassified Ruminococcus
atgagcaatctacttaacacgccgatgaacatcggctcatgcgagataaagaatcgcgtggtcatgtcgcccatgctcatgggcttcggtcagttcgacggaaagcccacgaagaaaatgatggactactacgaggagcgcgccaagggcggcacgggacttatcataaccgagataacccgcgtcaacgatcagaccggcgcgagcgcatttgcgcagctcgcagtcagccatgactaccacatcaagccgctttccgagttcgccgagcgcatccaccgccacggcgcgaaatttttcgtgcagctccaccacccgggcaggcagaatgtcggtctgctcgtaggtaccgttccgctgagcatcaaatgcgaaagtcttacccgcggcgcatacgggaagcttctctataaattgactccgaaggtcggcccgaccatgcttgagcacaatatagtgccctcgagcgtcgcgccctcaaagtgcagcccggcatacttcgccggcgggcgcgtcagagcgctcagacacagcgaaataaaggagctcgagcagcagtttatcgacggcgccgtgcgcgtaaagaaagcgggctgcgacggcgttgagctccactcatcgcacggatatctccttcagcagttcctcagccccgtgacaaaccggcgcaccgacgaatacggcggctcgctcgaaaaccgcatgaggttcattctcaacataatcaagggcatcaagacggcctgcggcgaggatttccctgtgatagtcagactgaccgtcgacgagtgctatgagaaaatcggcgaaaagggcaagggctatacgctcgacgagggcgttgaaattgcgcgccgccttgaaaaagcgggcatagacgcaatagatgtttcgtgcgcgggctatgacaccttcaactactggctcgagccggtctcgtttgagccgggctggagaaaatatatggccaaggccgtcaaggacgccgtgtctatccccgtcatagcggcaaacctcatccgctcgcccgagcaggcggagcagcagctagaggacggcattcaggacttcgtttccctcggcagaccgcacatcgccgaccctcactggaccgaaaaggctattaacggcaaaacaatccgtcgctgcatttgctgcctcaactgctttgaatcgatggaggcaaatgcgtttgtcggcactcacggcgattgctccgtcaacccgtttgtcggccacgagggcgacctgctcaagaaggacgggaacggacgcgcagccgtcgtcataggtgcgggccccgcgggactcaccgccgcagatattctcgctcagcgcggcttctccgtcacggtatttgaaaagaatatgatgcccggcggtcagatcaatctcgcctccgccccgcccgaaaaggccaagaccgcatggatgatagacgacctcgtgaaaatttgccgcgaggagggcgttgaaataaagctcaacacccccgctaccgttgaggccataaaagagctctctccctgcgccgtcatagccgcaacgggaagccgaccgataaagccgcgctttgccggcaactgccccgccgaagatattctcacgtttgaagatattctcagcggcagagtcgagctcagggactgcaatgttgccgtcatcggctcgggtcttacggggctcgagaccgctcacgcgctttgcgagaacggctgcaaggtgactgtcgtagagatggcgaaggagattgcacccggcacatggatgcagcacaaggacgatattcttccgaagctcaagaaggcgggcacaaagattatgaccggcgaaaagctctgcgaggtatacaccgacaggatagtcaccgagaatgtcgatacaaagaagagaacggatatcgcctgcgaccgcgtggtgctgtcgctcggctcaagacccgatgcaacggtggtcgaggagctcaaaaagaacggcttctccccactggtcatcggcgacgcgaaccatgtgggaaaaatagctcacgcgacaaaggcggcatacgaagctgcgatatcggtaaaataa

SEQ ID NO: 1734 - DNA, 315 bp, unclassified Ruminococcus
atgctcggaacaggcacatggcatctgaaggtaggcaatattttctacaacggagacatcacacttcgcgtctttgacaacggcggcgaatacggcttcgagctcattgagccgaagatggatattcctgagattgaaataaagcaaatttcaaccgtcggaaatcacctgtccgctaccgttacggcaaaagagctgcgaggcagagacgcacagctcgagctcgactttaccgacacctccgtcagcggaagcgcaaaggttccgctcatcggcactgtggcgataaaagagggcacgaagatagccgactga

SEQ ID NO: 1735 - DNA, 765 bp, unclassified Ruminococcus
atggatacaaaggatattattcttaaactcagaacaggcaagggtatgtctcaggacgagcttgcggaaaaagtatttgttacccgccaggcggtttctcgctgggaaaccggcgaaactacgcccaacacagagacattgaagctgctgtcaaagctgtttgacgtttctatcaacacgcttctcggctctccgagacagcttatttgccagtgctgcggtatgcctcttgacgacgccgatatcagcagggaaacggacggctttttcaacgaggaatactgcaaatggtgctatgccgacgggcaatatatgtatcacaacatggatgacttgatagaggtttgcgtgcagaatatgacaagcgagaacttctcggccgagcaggcgcgcgaatacatggcggatatgttgcccaagctcaactattggaaacggtacgaatatctcggcggcgcggaaaaattcgaggaatacaagcaaaagcttatcgatgaaataaacggcttaaatatcgacgggctgccgaaggttgaaaagctcaacgctcttgtcggcaagttcatcaacctcgaataccgactgccgaacgggacggtcgtaaaatttcttgacgacaacgccacatatctcggcaacgagctggaatgcgaatacggcggcttgccccgcttcggaatcgccgcaagcatggattttttacttatttgcacctacgaagaaaacggcaaaaatccggagctggtcgtctacaaaaaaagataa

SEQ ID NO: 1736 - DNA, 1026 bp, unclassified Ruminococcus
atggaaaaaattaaagttgtacagtacggctgcggaaaaatgagcaagtacattcttcgctacctgcatgagcacggcgcacagatagtcggtgcgattgacgttaaccctgcggtagtgggacaggatgtcggcgattttgccggcttgggcatcaagacaggcgttataatctccgacaaagccgacaaggttcttgacgagagcgacgctgatgttgcaatcgttactctgttcagttttatagacgatatttacactcacgttgaaaaatgcgtttcgcgcggtatcaatgttattacaacgtgcgaagaggcgatttatccatggacgacggctgcggtgcagacaaaccgccttgatgcaatcgcaaaagcgaacaactgcacaataaccggcagcggtatgcaggatatcttctggatcaacatggtcggtcttgttgccggaggctgccataagattactaaaatcaagggtgcatacagctacaacgtcgatgaatacggcttggcgcttgccaacgctcacggttgcgatctgacgcccgaggagttcgagcagaagatagctcatcccgatgagtttgagccgtcatatgcttggaacgcaagcgaggctatctgcaacaagctcgggctgacaattaaatccatcgaccagaagcacgtgccgtgcattattgaccgcgatatttattccgagactctcggcaagactatcgaagccggacgctgcataggaatgtccgccgtcgtgactatcgaaacgatgcagggcattacaatcgaagaggagactataggcaaggtctacggtcccgatgacggcgatatgtgcgactggcagattacgggcgaaccgaacaccgaattccacgtcgtaaagcccgcaacggtcgagcatacctgcgctacggtagtcaaccgtatccccgcgcttctctgcgcacctgcgggttacgtcacagccgatcagcttgatcccaacgagtatctcacttatcccatggagttctattgctga

SEQ ID NO: 1737 - DNA, 1128 bp, unclassified Ruminococcus
ttgacaaaaaagcttctgcggcttgcgtcgcttttgctcgcgcttatacttatcttctcgggctgttcgctgcttgaagaagaagataccgttcccccgtccgaagaatcggccgccttcggcagcttcaagcactacttcgcaaagctaaacgaggacgagaagcgcgcctacaatgccgttttgcgcgacattgaatcgttccccgaggagattgaaatccccgagcttgataacggcgagcttgaaaacgtctggctcgccctgatgtacgacaatccggagctgatgatgctcgggcgcgagtgcgtgctcgtcgcaagagggcgaaagtacttcttcagctgcgaatattccatgacgaaagaggaatatgagcagaaaaaggccgagcttaaattgaaggcagacgagctcggagctaaaatagaaaaagagccttctgattttgacaaggagctgcttatccacgacgcaataatcgactcgtgcagctacgcagactccggtcagctcatagcgagctccgcctacggcgtgctcgtcgagggctctgcctcctgcgagggctacgcaaaggccgcaaagctcctgctcgacagatccgggatagataactacgtcataaccggcaccgcaacgcgcgacgacggcgagagcgagggtcatatgtggaacgtcgtctttctcgacggtcagccctataacttagacctcacctgggatgaccctataggcgagggcgcggagcagaacaaacgctatgcctatttcaacatcaccgacgaagagcttctgaaaactcacacgttttttgacgaggctccctgctgcacggcaacggacttcaactattttataaagctcggcagacagtttgacagctacaacgcggagacgaaatccgcgctctcgaagctgttcggggggctcaaatcaggcggcaagctcgatatcaggttctcgtcggataaggcttacagagccgccctcaacgggctgataaagaaagaggaaatctaccgcattctgagcgtcgccgacgcgggcaggcgcggcttttcaacgacacagataaactatatcaccgacgacacccaccgtgtcatcgaatttattctcgtataa

SEQ ID NO: 1738 - DNA, 939 bp, unclassified Ruminococcus
atgagcagaatcgataaattcaaaggaatcatcccggcattctacgcctgctatgattcgaacggagaagtaagcattgagcaaaacaaaaaactcgcccgctatttggcggacaagggcgttcaggggctgtatgtaggcggctcctcgggcgaatgcatctatcacagtgtcgaggagcgcaagaaagctttgaaggccgtcatggaggaagtcggcggacagctgacggtcatagcccatgtcgcttgcaacaacacgagggacagcgccgaattggcggcatatgcggagcatttgggcgtggatgccatcgcctccattccgcctatttattttcatctgcccgaatatgccattgccgattactggaacacaatttcaggcgccgcctgtaatacgccgtttataatctacaacattccgcagcttgcgggggtcgcgctcagccattcccttctcagggagatgcttaaaaatcccaatgtcatcggcgtgaaaaattcctcggtcagcgtgcaggatatacgggatttcaaggacatcggcggagaggatttcattgtattcaacggccccgacgagcagctcgccgcagggctgatgatgggcgcggaggcaggaatcggcggaacctatgccgtaatgcccgagctgttcctcgccgttcgccgttttctgcaagcaaatcaggtcgaaaaagcgcagcagcttcagggcgatattgttcgtatcattgaagccatgctgggcggacgcgcgaacctatacgccgtaatgaaggagtatttgaaacggtataagggtctggatttgggcggcgttcgcgcacctctgacagggctttgtccgcaggacgaccgcattgtgacacagacggcaagcatgatcgaagcagtcgtaaaaaaagtacggcgcactgtaattaaaattaaataa

SEQ ID NO: 1739 - DNA, 1185 bp, unclassified Ruminococcus
atgaacatacttcagtcaatcaaaagaggatttaaaactactgacaagccgcttctgctgctctgtctgctgacttcgctgttcggcattcttatggtttacagcgccacctacagcagccttgaggacggcggcattatcagccgtaccgcacttgtcatgctgcttgctgtgcttgtcggcgcggcgatgtgtatcgtcatatctttcattgactacgaaatagttctccgcttttggatgataataggcggagtgtgtctgctgatgatgcttctgctgttcccgttcggcagcggaacggaggacagaccggatgcaagaacctggttcgacttcaaggtaatcaatttccagccgtccgagcttttcaagatagcgttcataataaccttcgccgtccacctcgactatgtcggcgaggatataaacaagctcaaaaacgctcttcttctctgcgttcacggcggagttccggctctgctggtcattctgacgggtgacctcggctccgcgctcgtattcgtctcaatatttatcggcatgatgttcgcatcgggtcttgcggcaagatattttgccgccgccggcgcaatgatagtcgcggccgtgcccatcctttggttcgcgttcttcagcgacttccaaaaaggccgtattctcgccgtatatgccccgaataagctcgataccgcactatacaagaaatatatcttccagcagcagcagagcgtcaatgccataggcagcggccgattcttggggcgcggctttctcaagggcgcatatacccaatcgcactccgttcccgtcaacgacagtgatatgatattctccgttatcggcgaagagctcgggtttgtcggcgcgtttgcggcgcttgcgctcattgcgctgataatcgtcagtatagtgctggtcggaaaaaaagccaatactaatatgggctcgctcatctgctacggcacagccgttatgataggctctcaggctatcatgaatatcggaatgtgcttaaagctcctcccctgcatcggtataacgcttcccttcttcagctccggcggctcatcaaacctctgcatatatatcgcaatagggctcgttatgagcatttacagatgcagtcaacgcggcgaggtcacgaatttcagatataacaggataagcacgcctttcaactaa

SEQ ID NO: 1740 - DNA, 705 bp, unclassified Ruminococcus
atgaaaaaaagcaggtcggaaaggaaaaataatatggacgtttatcttgtgaggcacggagaatctttatccaacatcggcgaatcgcgcgaattcgacagtatgctctccccaaaaggtgaacagcaggcggaatgcctcggtcggtatttagcgaacgtaaggtttgacaagatatattccagccatatgtgccgagccgtgcagacggcggcggccgttgcacggcatcaggagggaaaccccgaaattattattgtcccggaattctgcgaaacggagacgcccggtgattttgaggcaaacacagagcttctcaggtcggtctacccgaagttgaacataacaaaaacgagcatgggaaatggctgcggcgcggatatagagcgtcttgaatatgcggttgataagtacatcaatctccccggatattcgaacgccacggagacggttgtcacggacggaaagcagaagaggtataatccggaaaaaatccttatcgtctctcacgcgggagctatctgctatatgctgagcagcctcgtgaacttccgttacgacataaacgtaaatatcgttcaacacaatacctgcataaataaattcgagctttttttgataaacgacgttccgcgcaaaagatttctgagatataacgacgttccgcacctgccgcaggagcttcgccttgaaagtcagttctaa

SEQ ID NO: 1741 - DNA, 546 bp, unclassified Ruminococcus
atgaaatggttcatcgcttccgacattcacggcagcgcatactactgccgcagaatgcttgaaagatataaaaaagagaatgccgaccgcctgcttctgctcggcgacgtgctctatcacggcccgcgcaatgacctgccggagggctacgcgcccaaagaggtcattgaaatgctcaatgccatgaaggatgatatactctgcgtgcgcggcaactgtgaggcggaggttgaccagatggtgctgaagttccccgtccttgccgactacgcgataatagacctcggagacagcttaatatacgcgacgcacggacatatatataacgaaaacaacctcccgccgcttaaacgcggagacgtgcttctgcatggacacacccatattccggagtgcacagagcatgaaaattatatttatatgaaccccggctcggtctcaataccgaaagagaacagccatcacggctacatgacgctcgaaagcaaaaaatttatctggaaggatctcgacggaaacgtcaaaaaagagttcgttttaagataa

SEQ ID NO: 1742 - DNA, 621 bp, unclassified Ruminococcus
atgccgacggttgaggaaaacaagaacgagaagcgctcgaagcttatggatgccgcgcattcgctctttacgagcggcagtgcgctcaagcccccgacgatagacgaggtcgtcaagctggcaggcgttgcaaagggtacgttttatctctatttcaaagataaatacgagcttatggatcagctctttttgaaaaagctcgccgaatgcgtcaattccgcgctctttaaaacgcggcagcattttgcggggcggcagacggacgacgcggagcgggtgaatacctttctcgataacgtctttgtgtatatcgaggagaacaaagcgtttttgccgcttgtcagagatcgcgtgtcctcctgctaccgcatgatgctcaagggcagggaggccgagctcaaggacgcttacggcagccttgtaaagctttttcttgcgcacggctataccgaatatgagagcgagatgaacatatatatgttggtttcgatgctcacatccgtaagctgcgacggtgcggttcacggcgagccgtataagctcgacgagataaagcacggtatgcagcgtcttgtcaataaacttttagccaataaggaggagagggattatgatatctaa

SEQ ID NO: 1743 - DNA, 561 bp, unclassified Ruminococcus
atgaatttcgaaaaaatcgacatctgcgatgtaaacgacagctttgtccgccttatcagagatgactgggcgctgctcaccgccggggagaagggcaactataacaccatgaccgtaagctggggtatgctgggcgagctgtggggcaaggatgtggtgactgttttcgtgcgcccgcagagatacacctatgaatttatggaaaagtacgataattttactctctcgtttttcggcagcgaatacagaagggcgctctccttctgcggctccaagagcggacgcgatttcgacaaggccgagaaatgcgggcttaccgcttttgagacgggcgaaagcgtggctttcgaggaggcaaagctgattatagcctgtaggaagacagcctttgccgacatggatccgtcgaagtttattgcgcccgaaatagaggataactacagcaacggcgactaccaccgcgtctatatcggcgagataacggaggtctgtaaaaaattaatcgctcgggaacttccgtctgagtcgcgagaagaaaaggctttgcgaggcagttgttaa

SEQ ID NO: 1744 - DNA, 1437 bp, unclassified Ruminococcus
tttattatggacggcatcttaaaaaaaataaagcagagcgatgcatttaacagggaaaacagagttccgtatctaaaagtaatagttcttatgagccttttcacctttgtgttcttgggcgcggagtttttgttcgtaaacatgatttcccgaatcgtttcgggacaccgttcggtggcggctcaaaattatgcgctcggcgtcagcgcggtcggctttgttctgtatcctcttttatgccgattttgcaaaggaaatgcacaaacttccgtttcggtttgcgcagccgttatctcaaatgcctgcctttttctgatgtgccgcagcggctcttacacgcttacgctgattgccggccttctgctgtttttgattctcggcgtgttcggaagcgccgtgttctataaatccctttgcctgttggaggacaatactcatattgcgcggcttacgggtatctcctatatgctcggtacaatgctccagattgcgaacagcaatcttgttcatatagacattgccgaagccgcgatactttcggtgtttataatgcttttggcgcttatgctgatacgcgcggaaaaaaacagcgttgtcccggcgctctcaaagagcgaacccgacggcggcaacggcagggagagcttgaaaatcagcgtgattcttgtcttttttgtcgcgctcatgacctgcattttcagcacgcttgataatgccgtcaccctcatccacgcaagcggaaaggcgaatatcgggcagtggccgcgagtcctgctcgccctcagcgggcttttggcgggctttttgtttgacacggcgagcagaaaatacatgagcatagttatgtactgcatcaccgttctgtcaactacctgcctcgtcgttcttcagtttgccggaccttttacggtagggctcgtcatattttatctggccgcgggcttcttcgccgttttcttcacggtttcctttatggaaatcgcccgatacactgaaacgccggagctgtgggcggggctcggcagagccgtcaacaatcttgtcgccgtattgatttcgggcggctcgctcgcacttttgaattcaggcaacaatattgccataataacgatcgagctgcttttgttcgtgctcgcgagcgtcgctgcgtttgcctatatgaataagcgaaaagccttctttgacgggctcgaagcagaggcggccgataagctgagcgacggcgaaaggctgcaaaagctcgccaagcagttctcgctgactccgcgagaagccgaggtgttcggattgctggtgaataccgaggacggactgcaaacgatagccgacaatctctatgtgtcgaggcgaacccttgagcggtatgtctccgcaatatatgaaaaaaccggcgcgagatcccgcatcggacttgtcacgctttacaacaatgcataa

SEQ ID NO: 1745 - DNA, 777 bp, unclassified Ruminococcus
atgaaaattttcataacggtgctcgtgacattttttgcaggcatgggcgcggggctcggcacgggctttgcgggcatgagcgcggcggcggtcataagtcccatgctgataacctttctcgatatggatccgtatacggcagtcggcatcgcgctcgcatcggatgtgctcgcaagcgccgtctcggcctacacctacggaagaaaaaagaacctcgatatcaaaaacgggcttatcatgatggcgacggttctgacctttaccgtcgtcggcagctatctcgcaagcctgctcccgtcggctgccatgggcggtttttcggttgtaatgacattcctgctcggagtcaaattcatcgtccgtccggttatgacgacaaaggaatcgatggaaaaagttcccgcgaaaaagcgcgcgatacagtccgttatctgcgggactttaatcgggcttatctgcggctttgtcggcgcgggcggcggcatgatgatgctgctcattctcacatccgtcctcggctacgagctcaaaaccgcagtcggcacaagcgtattcataatgaccttcaccgccctcaccggcgctgtgtcgcattttgcgataggcggtatgcccgacctcacggtgcttctgctctgcgttgcgttcacgcttatctgggcgcgtatcgccgcggttatagccaacagggctcagcccaaaactctcaaccgcgcgacgggcgttgtccttgtcgtgctcggagcagtcgtgttcgcgttctcgcggataaagtaa

SEQ ID NO: 1746 - DNA, 912 bp, unclassified Ruminococcus
atgagggataaaagcatggcaaaagatgtgcttttcaaaacgatgaccttcggcggcttcaacaaagaagacgtccttgaatatattcgcgcccagcagacgcagttaacggacacgcagaaaaagctcaaggagaccgaggagagcgcctcatccgccataaagcggacaaaggagcttgaaactcttctctccgagcagcagacccgcgttgaggaatattctgcgctgagcgaggagtatgcaaagaaaatatttgctctcgaggacgaagtcaattccctcaacgagaagctcaacagcgttgaagtcggctgcgaacgcgccaaggatgttgagggtcaaataggcgctctcgttctcgatgctctgctctattctgataagataatccgcagcgcaaaggcgtccgcaaagggcatctccaatcagacgaagcagaccattgaagaggccgcaagcggagttgacgagataggcgaggatatttctcagatgtccgataatttcggcgttgtcgtcgcctcccttgtctcgaagataaattcgctttcgaccaacttgagcagcgttgccgataagctcgactctcaggaggacgagatagacgagcatcagtttaccttcggcgagaacggcgaggtcaagctgccgagccttaccgatgaggatttcggcgattcggacggctccgatattgaaatatccgatgaggaaataagcaatcttgtcaatgtcctcaatgcgggcggcgggcttgattttaaatttaccgcacccgacgaagacgaagccgcagatattgaacctgacggcgtacatagcgaagatgccgtaacggaagagcccgtcaagtccgatgaatccgaggatatatcggagcttacaaaaaaatttctcggagaagactga

SEQ ID NO: 1747 - DNA, 1134 bp, unclassified Ruminococcus
atgagaagcttaaaagtatttgcggctctgctcattctgctctttttgaatgccgccgtgtgcttcgccgtaggggaggagacgacggatgattactcgtccttttatgagtcgagcggcgcagacaggctcggcgacaccttgccggatgatataaaggacagccttgattctgcggggattgacattgccgattggcaatctctgctctcgccctcgccgaaaaagctcgtttcgatgctcggcgatatggcgcgcggaagcttttcgaagccgataaaggacatggctttgatagcgggtattgtcattcttgtcggactcataaagggcactgccgccgccgaaaacttctccgagcctctcaatacggtcataggctgcgcggttgcgataaccgtgttcgcctcgtctgcgggggtcatctctcagggggtgagcgcagtcaaagctacctccggctttatgctcgcgctcattcccgtattggcgggcataataacggccgccgggaatcccgcactcgccctgacctacggctccttcgccatggcggcggcgcaggcggcggcgcagaccgcggggaatgtgataatgcctctgtgcggcgcgttttcggctttcggcgtgtccgcgtcgctcagccccgagttaaggctcacgaagctcgccgagatgataaaaaagcttgcgataggcgttctgtcttttgccgcggcggcgttttcggcggttctgggactcaagagcctgctcgccgggagcgcggacacgctgacctccaagggcataaagctcgcgctcagctccgccgtgcctatagtcggcggcgctctgagcgatgcgtattcctcgataatcggcagcgtggcgctgctcaaaagcactgtcggtgtgttcggcgttatcgccgttgtgcttatggatctgcccgttattctgcagcttaccgcgagaatcctgcttttgaagcttttaggcgtgctgtcctcgtccatgggcgacgacgcttccggcgaggtgctcgaaacgctctcgtccgctttgacggtaataaacgcggcgataatttttacggcggctctctttattatatcgacgggtatagttatctcggtgaaagcgggtgcatag

SEQ ID NO: 1748 - DNA, 606 bp, unclassified Ruminococcus
atgaacggaggaaatgaaatgaacgagacaagagtattcatgctgaacggcacgcaggtgcaggatatagtcacccgcctcgagggctttttccgtaccgagaagggtatggacgtccagagctctcagaccacggacggttatgttatgcaggcgagtcagccaaaggacggctggaagacgctcacgggaatgcgccttgctgttaccgttcagatggcggttgcgggagatcagctgaatgtcagcataggcgaggggcagtggtccgataaaataggcgccggagcgataggcctgtttgtggcgtggccgctggcgataaccgccggaatgggcgcgtacaagcagaaaaagcttccctccgaagtgtttcaggttatagagaacaccattatgaccggcggacagccggtggtggtgtccggcgcaggtcaggccgtggcggacggaatgacgctgtgcccgagctgcaaggcgcagcttgcccccggctcgaagttctgcaaccgctgcggagcaaagctcggacaaaaatgcccgaactgcggcgccgaaatcaccgccgacagcgccttctgctccgaatgcggagtgaagctataa

SEQ ID NO: 1749 - DNA, 348 bp, unclassified Ruminococcus
atgcttgaattcaagccttttgatatagattcaaaaacttacggttatcgtgccgaggaaaacggcgaaaaaatcggcgaatgcatattctcgctcggcggaacctatgcggagattttgagcataaagacccgcaactcggacaggctcgttgcggagggacttgtacgcagtgcgttgaattttgccgccaaccgcagcgcttatatggcacgcgccgatatcggcaaagtcgaaaaggagccgttcataaccctcggctttgaagaaaaaaacggcttttacgagtccgatatcccgtccgcactgacgggaagctgcggacattgctccaaactacccctttaa

SEQ ID NO: 1750 - DNA, 1131 bp, unclassified Ruminococcus
atggcaaagcgcagcaaatatgataagtatttttcacccggcactcacaggagcataaccgaattcagcaagaatgctgccggcggctcgaagcgccgcaaaagctactccgagcgcaggcgcaacagaacagtgggcatagtcctcgcgtgtattttaggcgcggctgctgtattcactgcggcattttttgtcaccgacacgctcctgggcatctccgactccgaggttgaaaccaccgtcgcccccggcaagagcgataagggcgataagggcaacaagggcaacaagggcggctcaaacgataccaccgcgcccgccgcagccccgcagagctccggcgagctgaaggctcgcgtcggcaatgtctccctgctcgcgggcggaagcggactcgacagctatatagcctctctcaagagcgcgggtcaaaatgccgttgttatagacttcaaggacgcgtccggctacctctcctatccctcgtcgatagcggcggtcaaggacaagaccccctcgtcaagggctcaggccaatgccgctcagagcataaagaaacttcggcagtccggcataaaggtcgttgcgcgaatatactgcttcaaggattcgcagatgccgcgcgttgaccgaaccacggccgttcactacaacaagacacagactatctggctcgacaatgaggcgtccaagggcggcaagccgtggctcaatccctattccgaggcggctcgtaattatcttctcgaagtcgtaaaggaagtgaagaacctgggcgtcgacgtgatattgctcgacggcgtgcagttccccgacctcaactcgaagatagcgacgtttgacggcgagggctcggtatcgagaaacgccgtgctcataaacttcgtcaactcctgcgtctccgcgtgctcgggcacgcccgttatctgcgcgatgaagggcgaggctgcggcaggcggcagcagcgagatatataacggctctctctggagcgcgaacgcctacgcctttgcggtagacctcagctccctcaaggcggactttaaacgcagcttccccgcctcaaagaaagtaatcgaaatcaaagcctcggcctcaaatgccgacagcacatatattttaacaaagtaa

SEQ ID NO: 1751 - DNA, 846 bp, Firmicutes bacterium CAG:270
atgaatgaaatatatgataaagtaaaaaaatgctacaaacaagtgagagaaaaaacagatttcaaaccgcagatcgcaatgatcttaggatcaggacttggagattacgcagaaacgatcgagattaaggagattattgattatcacgagattgatggtttcccgatttcaacagtacagggacataaaggacgttttgtattaggatatgttgaaagtgttccagttatgatcatggaaggtcgtgttcattactatgaaggatattccatgagcgatgtagttcttccagtacgtttgatgaggatgatgggagcagaaattttatttttaaccaatgcatctggaggaattaataaagaatttcatgcaggagatttcatgttgatcacagatcagatagcaagttttgttccatctcctttaaatggagtcaatatagaagaatttggagaacgttttccagatatgagtcacatttatgatgaagatctacaggatatgatcaggcagagtgcagatcacctgatgatcgatctgaaagaaggcgtctatatccagcttgcaggaccgaattttgaatcaccagctgagatacagacgtgtaaagtgatcggtgcagatgcagtcggaatgagtacagcatgtgaagcgatcgcagcaaaccatatgaagatgaagatctgtggaatttcctgtatttcaaatccagcagcagggatcagtgagaatccgctaagtcatgagaatgtacaaaaaatggcagatgaagctgcaccgaaattcaaattgcttgtaacagaagcggtgaaaagaatggggaaatatttagaaacaacgaggtaa

SEQ ID NO: 1752 - DNA, 1701 bp, Firmicutes bacterium CAG:270
atggaacaagatgagaaatttgataaccagttcaatctggcactggatcttacgaaagaagaacgggaaaggtcagaagatttaaatgctggatatgatcagacatttgatcgatgggagattatctttcgttatgcaggtgatctaaagacattaaaaaaatcatcaacaaccaatattgaaccattgagcatgggatatgcgatcgcatatatgaaagaaaatgatttagaagcattttcaagaaatgaacaagtgatcttcatagaaaaaccaaaaaatttattattaaaccgacaggtatcaatttcagcttcctgtatgttgtcggtaaagaatacacctctttcattgactggaagaggtgtttttgttgcagtgatcgatacaggaatcgatatatttcatccggattttatcaatgaaaatggagatacgaaaatttatgagttatgggatcagacgatttcgggaatcccaccacagccatttataaatggaactttgtatacaagaaaagagatcaatgcagcaattcattcagaaaatggacggcaaatgtttcaaagtcgtgatgatcttggtcatggaacgcatgtagcatccatctgtgcaggaagaaatggtgtggcaccagaggcagaactgatcgttgtgaaattaggagatataagcaaacaaggatttccaaggacgacacagttgatgacagcactgcagtatgtgatcgatacagcgataagggaaaacagaccagtggcagtgaatatcagttatgggcataattacggggatcacagaggaaattcgttgttggagacatttgtttcacagatcgcagggcagtggaaaagctctatttgcataggaactgggaatgagggaaatagtgggcgtcataaacaaggaaagatcacgacaaaaacggagctgattttatttgatgtggcaccatttgagcagaacttgaatctacaggtctggaaagattttgtggatgaattcaagatcagacttgagtctccatcgggaatcacatatacgatcgtggaccagcaaggaaaatcgcaatacacatataaggatacaacggtttacgtgtacaatggatactcaacgccatataatgttaggcaggaactatattttagttttataccgatggaaggaaattatatagaaagcggtcagtggaagatagaaatttcaccagtgaatataaaaaatggtgaatatcagatgtggcttccggtatctgcaggaagcaatccagaaaccagatttttagaaccagataaagtatttactttaacaattccttcaactgcaagaaatgtgatttccgtaggtgcttatgatgtcagatatcaggcttatgcagatttttcaggaagaggagatcagaaattttgtgtagataagccggatcttgtagcaccaggtgttggaattttggcagcagcagttggaggaggcgagagtgtaagatcaggaacatcgatggcaacaccatttgttacaggatcagcagctcttttgatggaatggggaattgtaagagaaaacgatccatatctttatggagaacgaatgaaggggtatcttcataggggagcgagacgattacagggatatgatagatatccgaatgatgaaattggatatggacggttatgtgtgtctgaaagtttgtatcaataa

SEQ ID NO: 1753 - DNA, 1134 bp, Firmicutes bacterium CAG:270
atggaattaatttatcaggaagagaaagaagtaaaaccagtctatgacatgtatcagaagatttttgaagatcctgaagaatttgcaaagtattattttgaagaagtctatgcatccaatgaagtgcttctggcaagagaaggccagaagatcttaggaatgatacatttgaatccataccatataagaacaggggaaaagacatacacattaaattacattgtagctgtagcggtatggaaagaatacagaagacaaggaataatggcagcaatgcttacaaagtgcttaaatgacatgcatcagaagagacagccgtttacttatctgatgccggcgaataaagcatattatgagccatttcagtttacctttgtgatggactgggaagaaacgatgattcattcaatgaatgattcggacaagataattccagcaatacaacaagatgcaagaattgtcacagcaccagaagaagaatatgaccgaattactatatttttagaacaatttatgcagccatatcagatttatacaattcctgataagcaatatttaagaagactttcaaaagaaagccagagtggtgaagggaacctcatggtatattatgagggagaacaattgacaggtgtttttgcagagagttttgaagatgatgaagtgtatatccgatgggcatattcaacgcagccagagaatatgctcaatgagataaaatatcgatataagaataagaagatttatattacagaaggtaatttaaccaaaggagaaaaaataccaaagattatggcaaggatcacagatctcacagcgtggggagagatccttcatggaaagagtgattttacattcaggattttggtcaaagatccgtatatcaaggatcagaatggtgtataccaattccaatgcctgaatcataagatatccattcaatgtgtagattcatcaaaagaaaatgcatgcaaagaaggacgatcagatgcacaagaatgggaagatgaaatttcaattgacgagctgacacaggtgttttttgacaacaatgcaggacagatattaaaacaacatgagtatctgaaagatatcgtgccggctggcccaatctatatttcagaggaggtataa

SEQ ID NO: 1754 - DNA, 2190 bp, Firmicutes bacterium CAG:270
atgaaaaaaagacctatggttcttatatttaccggagtattatccggaatggccgttgtatggaatattttatccatggcaacggctttttatttacttgcaggactctgcattatggtgtgtatgttttgctttgataagggatatggatggatcatcgcaggaatgatcttaggaattatatttgctgcatctgctaaaatctcgatgaatcttgatttttcacaagtcagatataatgaaacacaggacatcataggaaaggtagttgaagtatcgcaaacaaaaaccggaaagcaggcattgcttcttaaaaatgatatgctggaaggaaaaattttgttatatacatcaaatgacgaagaaataagttcaggcgatgtcgtatcttttaggggtagccttaaagtctttgatggagcaaccaatccaggacagttttccaacaggcattattattttagcagaggtatttattatcatgcatattcaaaagacatacttattaaaaaatctacagagttatgcttagatcaaatgatcgcaagatgcagaaaatatttaaaacaacaacttagtatgcagtatgatgaaggaatttcaaatttcctgaatgcaatgatgcttggagataaaacaaagcttaatgatactgtaaaagatgattttaaagaaagcggtctgattcatttaatggcagtatctggacttcatatttcgctggcaggaagaagcatttatcggctgtttcgcagactttgtggcagctttatgatcagttcagttattggaacgatgtcagcggtattttattgtgctttaacgggattttcagtatcttctttaagagcattgatcatgcttttgatctattttttatcgcagattttaggagaacattacgatttattatcatcggcttcttttgctggtgtgatattgcttcttatacgtccatacaggatttatgatacagcgttcctttactcatttacagcggtttttgtgatcggatgttatcagaggatcaagccaaggcttaagggcaagtttcaaaaaataagagaatctttattgttttgtacagcgattcagattggaatgtttccaataataatttattttcaatatgaagcaccgcttctttcgtttttggcaaatgtgatagctgtaccattggcatcgacggcatttacggtggcgtttgttttgatctttcttccacatacaatttttcacgatatcatttcgtggatgatatatgtgatcttatggctttccaaacgatcatatggaatgcttacaatcgggcatgtaccatttttctgggtgattttgttttatagtctgcttttgttgtgtacttctaaaagaaataaacttcaatttaagatcaggattggtcttgtttatacaggaattgtgcttcttatatttataccaaagtttcgaaagaagacgatcacttttcttgatgttggacagggagactgttttattgctgataccaatgcaggactgatcatatcagatggaggaagcagtagtgaagatcaagttggaaaatataggattctcccatatataaaatatcttggatatcaaagggtcaaaattgcagttatcagccatatggatgtggatcattattctggaattcttgaacttcttaagatgggaaggattgaatatcttggacttcctgaaatacaaaaggatgcagcaatggaaaagatcatagaagcggcaagacaaaataatactaaagttttttatttatcgagaggaagaacaattaagacgaaagatgattatcttaaagttctccatccggtaaaaaacagtaagatggaaaagaatgcggcttcaattgtcatgcaagggaatgtgcttggatacaaattacttcttacaggggatgtagaaaaagaaggagaagaacagcttctgggagaaggacttagccacgcagaaatattaaaagtagcacatcatggttctaagaattccacgagcagcgaatttttgcaaaaggtattgccggaacaaacgatcatatcctgtggacaaaataacagatatggacatccgcataaggaaacaattcacaggttaaaaagctgccatacgaagatcaaaagaacagacacaaatggagctgtcatttttcgagagaaaagagatggttga

SEQ ID NO: 1755 - DNA, 993 bp, Firmicutes bacterium CAG:270
ataatgctgcagaagagctttataaacgtgttacaggacagatggaggaataattgtatgaaatatatctatggaattgatatcggtggaacaactataaagatgggactgtttgcagaagatggaacattaaaagaaaaatgggagatcaagacaagaacagaagataatggaaagaatattatttcagatatcgcaacagcagtgaatgatcatatgaaagagaatgatcttacacgtgaggatgtgatcgggattggagtcggagttccaggtgcagttttggaatttgcaagggtaaatgaatgtgtaaatcttggatggggaagtgttgatgtggcaggtgagttgtcaaaacttacaggatgccctgtcaaagcaacaaatgatgcaaacgcagcagcattaggagagatctggatgggtgcagcagcgaaatataacagtgcagttatgatcactcttggaactggagtcggtggtggaatcatcattgatggaaagattgttgacggaagtcgtggatatggaggagagatcggccatatgactgtggatccttttgatgatcgagtgtgcaattgtggaaaaacaggatgtttagagctttatgcttcagctacaggaatcgtatatgagacaaagaaagcactcaaaaaatacgagaaatcaactacactgaaagacattactgaagtaacatcaaaagacattttcgatgcagccaaagcaggagatgaatttgcagccacacaggtagacaatcttggtaagaaattagcacttgcagcaggaaatattgcattgatggtagatccagaagtatttgtgatcggaggaggagtatccaaagctggacagatccttttagatgcgatcaatgcacattataagacatatacatttggaaaagcacaggaaacaaaatttgttctggcaacacttggaaatgatgcaggaatctatggtgcagccagcctgatgctttcataa

SEQ ID NO: 1756 - DNA, 960 bp, Firmicutes bacterium CAG:270
ttgcaaaaggaggacaacattttgatagaagtaaaacatctgaccaaaaaatatggcacgcatctcgctgtggatgacttgtcatttacaattgaaaaaggacggatttacggttttcttgggccaaacggagctggtaaatccacgactatgaatattatgaccggatatatcggtgcaacaagcggagaggttatcatcaatgggcataacattcttgaaggacctgaaaaagccaaaaaatgcatcggatatcttccggaaattccaccattatatcttgatatgactgtttcggaatatctgcattttgtagcagaattaaagaaaattccgaaaactgaccgtgattctcaggtcttaaaagttatggaactgatcaaacttgttaatatgaaagaccgcttgatcaaaaatctttccaaaggttaccgccagagaacaggacttgctgccgcaattcttggtttccctgatattatcatcttagacgaaccaaccgttgggcttgatccaaaacagatcatcgaaatccgtgaactgattcgtacacttgccaaagatcatacagtgatcctaagttctcatattcttgcagaagtgcaggaaatctgtgacgatattttgatcatttccaaaggaaaattagttgcagaaggaagtcctgagcaattagaagatttaactcatggaaaagaatctgttgaacttaccattcaggcagatcaagtttctgtaaaacagatcctttctgatatttctggcattgatgatatcagctggctgaatatcaatgaaaacagttgtcatattcagatcaatacaagcaacgatacgcaggaattatgtgcggatctctctcttgcatttgcacaacagaaaatgcctgtgacacagatgtttgtaaataaggcaactctggaagatattttccttgaattaactggaggtgaaaaataa

SEQ ID NO: 1757 - DNA, 1302 bp, Firmicutes bacterium CAG:270
atgaattacacaactcagatgaatgcagcaaggcagggaattataacaaaagaaatggaagctgttgctacttatgaaggaattgatgtgaaagatcttatggctgaagttgcagctggcacgatcgttattcctgccaacaagaaccataagtgtttaaaaccttttggtatcggaaattccttaaagacaaagatcaatgtaaaccttggtacatccagagactgtttaaacttagatgttgagatggaaaaagtaaataaagctgttgagatgggtgctgaagcaatcatggatctttcttcttttggacatactcacgtatttcgtaaaaaacttgtcaatgaatgtcctgcgattcttggtacagttcctatctatgatgcgatcgtttattacaataaagcactcaaagacatcacatctcgtgaatggatcgacgttttcaagatgcatgccgaagatggcgttgattttatgacgatccactgtggaatcaatcgtaacactgcagatcgtttcaaagcgatgaagcgtaagatgaacattgtttcccgtggtggttccttaatcttcgcatggatggaagcaactggtaatgaaaacccattcttcgaatattacgacgaaatcctcgatatctgtaatgaatatgacgtaactttaagccttggtgatgcatgccgtcctggatgccttgctgatgcgagtgatatttcacagatcgaggaactggtaacacttggtgaattgactgcacgtgcatggaaaaaggatgttcaagttatgatcgaaggtcctggacatatgccaatggatcagattcaggcgaatatgaagattcagcagacgatctgtcatggagctccattttatgtactcggacctcttgttacagatatcgctcctggatatgaccatattacttctgcaatcggtggtgcgatcgccgctgcatctggagcaagctttttatgctatgtaactcctgcagaacatttacgtctgcctaatgttgacgatgtaaaagaaggtatcatggcttctaaaatcgcagctcatgcagcagatatcgccaaaggtgtaaaaggtgccatggactgggataaccagatggcagctgccagacagaaacttgactgggaaaaacagttcgaacttgctcttgaccctgaaaaggcaagaagatatcgtgcagaatctactcctgaaagagaggatacctgtacaatgtgcggaaagatgtgttccgtacgtaacatgaatgccgtccttgccggagaagatgtggacgtcatctaa

SEQ ID NO: 1758 - DNA, 1341 bp, Firmicutes bacterium CAG:270
atggatgaagcatttatcaagaaagtgcagccaaacagcccagaggcagaacagtctgtgatcggtgcaatgatcatggatagagacgcgatcgctgatgttattgatattgtaagtgcggatgatttctatcagaagcagaatggcattttatttgaagcgatgacagaattatatcgggaaggaaagccggtggatctggtaacgcttcagaataaattaaagaaaaaagatgtgccggaatctatgaaatctcttgaatttatcagagatcttctagaagcagtcccaacgtctgcgaatgcgaaacaatatgcaaagattgtcagtgaaaaggcaacacttcgtaaactgatcaaagtcacagaggacatcacaacggaatgttatctcggcaaagatgatgtgacagagattcttgaccatacagagaagaatgtgtttggacttcttcagcaggcaagtggaagagaagattttgtaccgattgataaagtcgtgttaaatacgctggacgcgatcgaggaggcagcaagctctgagggacgagtgacgggtattgcaacaggatttacagatctggattacaaattatctggattacatccatccgagcttatcatcgtggcagcacgtcctgctatgggtaagacagcattcgtattgaatattgcacagagagcggcagtcagagatcatgttccaaccgcgatctttagtctggagatgtcaaaggaacagcttgtaacccgtatgatggcgatggaagcgatggttgattctcagtccatccgtactggtgatcttcaggaaacggactgggagaagatcatggaaagtgccggaacgatcggacgttctccattgatcattgacgatacaccgggtattacaattgcggagttgcgatctaagtgtcgaagatacaaacagacacacggacttgatctgatcattattgactatctgcagctgatgtcaggaggaaaacgttccgaatcaagacagcaagagatttctgagatttccagatcgttaaaagcactggcaagagagatgaatgcgccagtgatcgcattatctcagttaagtcgaagagtagaagagcgaaaaccagccaaaccaatgttatctgaccttcgtgagtcaggatcgatcgagcaggatgccgacgttgtaatgtttatttaccgtgatgaatactataacgaagattctgagaagaaaggaatcgcagagatcatcgtggataaacagagaaatggttcaacgggtagtgtagagcttgtatggctaggacaatacactaaatttggaaataaagaaagagcaccacattaa

SEQ ID NO: 1759 - DNA, 2025 bp, Firmicutes bacterium CAG:270
ttgaataatcaacagaataataaaaatgataagaatgacaaagataacaagaagagaaatgccaagtatttagctgtttttcttgtagtttctattcttggaacaatctttttcaattccatcataacaaaatggagaaatggaaccgagacaacgatttcatacaataaatttgtcacaatggttgacaaggatcaagtaaagagtgtaaaagtaacagacactcagttaaaagtgacaccaaagaaagagggaaatcctttttacaaaacaacttacacagtacagagaatcagtggtgattatgaactggttaatcgtctgatcaagagtaagatcgcatttgagcaggaaccagaagatccgatggatacattcttatccgtagcgatcagtttgatccctactttactgatctttggattccttgttatgatgatgcgcagaagcagcggtatgatgggagttggaaagtccaatgcaaaagtatatgttgagaagaagacgggcgtgacatttgcagatgttgcaggtcagggcgaagcgaaggaaacactgacagagatggttgattttctccatcacccagaacggtatacagagattggtgcgaagcttccaaaaggtgcattgcttgtaggacctccgggaactggtaagacattgcttgccaaagctgtagctggtgaggcaggagtaccattcttttcactttccggatctgatttcgtagagatgttcgtcggagttggtgcatcaagagtccgtgatttatttaaacaggcacagcagatggcaccatgtatcattttcatcgacgagatcgatgcgatcggtaagagccgtgacaacggtatgcatggaggaggaaatgacgaacgtgaacagacactgaatgccttattagcagagatggatggttttgatacatccaaaggtatcattatccttgcagccacaaaccgtccagaagttttggataaagcccttcttcgtccaggacgttttgaccgtcgagttatcgtagaacgtccagacttaaagggaagaattgagacattaaaagtacatgccaaagacgttaagatggatgagactgttgactttgaagaaatcgcattagcaacaagtggagctgtaggatctgatcttgcaaatatgatcaacgaagcagccctaggagctgtcaaagccggaagaaaagctgtttcacagaaggatttatttgaggcggttgaagttgtcatcgctggtaaagagaagaaagacagaatccttggtgatgaagagaaacagatcgttgcataccatgaggttggacatgcattggttatggcattacagaaagaatcagagccagtacagaagatcaccatcgtgcctcgtacaatgggagcacttggatatacaatgcagcgtccagaagaagaaaaatatctgaataagaaagacgagatgttagcagatcttgtagcatttttcggtggacgtgctgcagaagaagtgaaattcaacacgatcacaactggagcttccaatgatatcgaacgtgcaacagcgatcgcgagagcaatggttacacagtacggtatgtcagaagaatttggtctgattggactggaatctatcacaaaccgatatcttgacggacgtgccgttatgaactgtgcagagacaacagcagccaaggttgacgaagttgtcatgaagatgttaaaagaagcttacgctaaagcagtcacatatattcgtgaaaatatggacattcttgacgaagcagcgcagtttttgatcaagcgtgagacgatcacaggaaaagaatttatggaaatcttcaataaatacaagaatccggaaaaagagtctgagaaaaatgtatcagagacaatggaaaaagatgtagaaactgaaaaaaatactcaggaaaatgttgaagtttctgagactaagacagacgaagtgaatacatcaacatttaacacaggatatgttcaatgggttgaagatgatgacgatgaagaataa

SEQ ID NO: 1760 - DNA, 1677 bp, Firmicutes bacterium CAG:270
atgccatgcgaaaatgccgcccaaagtgatgactactttgaatttattggagaatatagtggagttgttgactatgtaaaagaagaatttaacaccgaatgtatcacagtcatcgatcaaagatttgcaatcgcatacgtcccgaaaaatggacggacatcaatctacggacaaaactgcccatacaacacgatcccaagatgttttggcttgatggatacacagatgttagaagatgttggagttgcacaagtaaggagaagtacgttagaactttatggaaatggtgtcttggtcggaatgatcgatacaggaatcgactatgaacaccaggcattccgctatgaagacggtagcagcaagatttattctctatgggatcagacaatcaaaggcaatccagaagataccttcctaggatacggaacagaatacacaaaagaacagatcgaagaagcactaagaagtaaagtgccgcaagaaaaagtaccatcgaaggatgaatccggacatggtacttttttagcaggattaatcgcaggaaatgaggacaacgaagcaggtttttcagggattgccccaaatgcaggactcattgttgtcaagttaagaaaggcaaaagattatttaaaagaatactactgcattgacccaaaatacgaagtatatgcagaaacagatatcatgctggcagtccgctatattgatgcgatcgcagaacaactgcaaagacctgttgtcatatttttaggaatcggaacaagccttgcatcccatcttggaacaggtccattagatcaatatctgtcaggcagagctatgcttcgaggagtcgcagtcgtcacaagtgccggaaatgaagggcaggcaagacatcactacagcggtcaggtttcacaaaatgcatccaaagtagaagtaaaagtcggagaatcagaatatggatttacgatggaattatggggattagcaccaaaccgatattatgtggatatcgaatcaccatctggacagaaaacgggaaggattcaaggaggattaagcggacagagagatgtcacatttttactggaaagaacaaggctgatcgtggaatattttacagtagatacatctgcaggagcacctgtcatcgttatgagatttcaaaatccagcccccgggatttggaatatctatgtcagcgatgatgaagttggaaacagagagtttgatctatggcttccaattacaaattttctaagtgaagacacattttttttagaatcgacaccatataatacactggtagcaccatccaatacaggattattaatgtgttgcggaaattataattctaatacaggaagtcttgcgatcgacagcagcagaggtttcccaagaaatgcgatcaaaccagattttacagcacccggagtagagatcttaggaccacttccaagaaatcgttatggaagaagatcaggaaccagtgtctcaggagctatcgcagcaggaatcgcagcattgatgttggaatggggaattgtacagaaaaatgatatgcagatgaatacgacgaggattaagaattatctgatccgcggtgcaagaagagatcaagggagaatatatcctaatcgagaatggggatatggggaagttgatctttatgagacgtttttgggaatacggtaa

SEQ ID NO: 1761 - DNA, 945 bp, Firmicutes bacterium CAG:270
atgaaattagtgattattgaaccattaggtgtagaagaagataagttgatggaaatcgcacacaaagcattgccagattccgttgagatcatatcttaccagaccaaagtaactgacacagaaagcttaattgaacgaggaaaagatgcagacattatcatggttgcaaacctgccattaaatgcagacgtgattaaaggatgtaagaatcttaagatgcttgcagtagcatttacaggaatcgatcatattgcaatggatgcctgcaaagaacagggaattatggtgtgcaattgtgcaggatactcaaatgcagcagtctcagatcttgtttttggacttctgatctcattgtatcgcaatattatttcctgcaacgaggttgttagaaaagaaggaactaaagatggtctcgttggatttgaactagaaggaaagaaatttggagtggtaggaacaggagcaatcggaaccagggtagcaaatatcgcacaggcttttggctgcgaagtttatgcatattcaagaacagtcaaagaccttacaggagtgcagtatgtggatttagaagagcttttatctacttgtgatattatttcactgcatgtaccattaaacgcctcaacaaaaggtctgatcagcgagaaagagatcgcactcatgaagccaaatgcagttctcataaatacatcaagaggaccagttgttgacagtaaagcattagcagatgcattaaatgaaggaaagattgcaggagcagcagttgacgtttttgaaaatgaacctccagtagcaaaagatcatcctctcttacacgcaaagaatctgatcgcaacaccacatgtagcatttgcaacaaaagaagcattagtaaaacgtgcgatcattgattttgacaatgtaaaatactggatggaaggaaatccagtgaatgtaatgaactaa

SEQ ID NO: 1762 - DNA, 1947 bp, Firmicutes bacterium CAG:270
atgaatggtaaaaatatagtaaaaaatatagcaattggatttgcactagcgctcgctggggcgggggctgtattattttataagaataatatcgcaatgaatccaggagaaactttattaaaatatatgtcgtatgcagaagatggagaatatgataagatgtatgatcttctggataaagacagtcaaaaaggaatttcaaagaaagaatttataaaaaggaataaaaatatatatcagggtattggaatgaaaacacttgaagcagtggtaacgtccaagaagagagaaacaaccgttacttatcgtgtcaaaatgaggacaaatgcgggagttatatcttataataacaaaacaatctttgtaaaagaaagaagaagataccgtatggaatgggatgattctgtcatctttccacaacttggtgcggaagataaagtaagggtcaagacgctacatgcgaaacgaggaacgataaaagatgctagtgggaatgcacttgctatacagggaaagatctattcagtagggtttgtgccaaaaaaaatggattctgattctgtaaaacttgcttcgaagaaacttggaatttccaaagaagaaattcaaaaaaagctggaacaaaaatgggtaacaaaagattcttttgttccattggtaaaattaaaagaatattccagtgatctgttagatgtcaaaggaatcattatatcgacagagacaggaagaatctatccattaggtgaatccgcagcccatctggtaggatatctgcagaatggggaaggaaaagcaggacttgaaaagctttataataagcagctcagtggaacagatggtttagagatatatatagtagatgccaatggacagaaaaagcagttactggcagtgaaagctcagattgatggacaaagtttaaatacaacgatcgacagtaagcttcagaaatccatttatgaacaatataaaaaggataagagtgcacatgtagcaatgaatccgacaacgggagaagtgaaagcattggtaagcacgccttcttatgatgcgcaggcatttatccttggaatgacaccggagaaatggaataagatcaataatgatccaagacaccctatgcagaatcgtttcaaaggaatctttgccccagggtcatctttaaaaccgatcattgcagcgataggattaagccagaataaattcagtgcatccgatgactttggcaatagtggaaaacgctggcagaagaataaaagctggggtggatattatgtgacgactttgcacgactatagtgggcacaatgtaaggaatgcgttgatctattcagacaatatttattttgcgaaagcagcattaaagattggaaaagacactttaaaagaccagtttgataatcttttgtttggaaaaaacttggattttacattcggactaacagcatcatcttatggaagtgaaggatttacgtcagagatccagctggcagacagtggatatgggcagggagagatgatggtcaatccagtacatatggcaacgatctatacagcattttcaaataaaggaaatatgctaaatccatatctgatcaaacaaaaaggcagtaaaaagcaagtattaagagaacatgtattttcaaatgatgcagtaaaaacagtcaatgatgcaatgaaacaagtgatcagcaatccaaatggaacgggacatgctgcacagatcgatggtattgatctaaaaggtaagaccggaactgcagagatcaagcagtcgcagacagacacgaagggaacagaacttggatggtttgtaacgatcatgccaaagacagaatataaagaatccctggaactggtatccatgacagaagatgtaaaaaaacgaggcggaagtggatatgtggtcaataaaacaaagaagatcctagaagaatacctgcagtga

SEQ ID NO: 1763 - DNA, 969 bp, Firmicutes bacterium CAG:270
atggaacaaccaactatgattcaagatatttaccctcataaattagacaatcactacgatccagccaaaaaacctgatgctgacagtatcattttatatttcacaaagaatggccttcttcatcgtttattaaagaaatctgatctggaagaaatggggcaggagaatctctttttgcctgatgaaatgatccgtactggagatggcagaaaacttgcaaggcctactcttttaaatgaagaggatttatttttatcttttccccgcctaagtgattttgtaaatgatgctcatgttacagaagatactcttacttatcttttttctgttgacgatgatgattacttcttattaaataaagatcctgaagagattcctgaaggttataacttctgtacggtacgtgatctccgcaatcagcagatcggtccaaaataccgtacttttgctgcgatcacaggtctgcatctttataactggtaccgtaccaatcgtttctgtggctgctgtggtcatgaaactatccattcttctacagaacgtgccttaaaatgtccttcctgtggccatctgatctatccaagaatcgtacctgcagtcattgtcggggttaaaaatgatgataaacttcttcttaccaaataccgcaagggatttactccattcgccctgatcgccggatttacagagatcggggaaactctggaagagacagtctcacgtgaagttatggaagaagctggacttcgtgtaaaaaatattcagtattacaaatcccagccttggggtgttgttgatgatctgcttgctggattctactgtgaagttgatggtgataccgacattcatatggatgcttctgaattgaaacttgcagaatggaaaacacgagatgagatcgaattacaaccaaatgattttagtctgacaaatgagatgatgcgtgagtttaaggaaggaagaatttaa

SEQ ID NO: 1764 - DNA, 1080 bp, Firmicutes bacterium CAG:270
atgaaacgaatcgtattaaccggtggaggaactgccggacatgttacaccgaatatggcacttgtaccaaaactaatcgatgagggatataatatttattacattggatcttacgaaggtatggaaaagaaactgattgaagatatcggcattaaatatttcggaatttcttccggaaaattgcgtagatattttgacatcaaaaacttttctgatccattccgtgtgatcaaaggattttttgaagcgaaaaaaatcttaaagaaactccgtccagatgttgtattttctaagggtggatttgttactgtccctgttgtatttgctgcaaagcaacttcatattccggttatcattcatgagtctgatatgacaccaggattagctaacaaattaagtattcctagcgcaagcaaggtatgctgtaacttccctgagacagtcaaacttcttcctgaaggtaaagctgttttaacaggttccccaatccgtgaagaattatttacaggaaaacgtgaggaaggacttcgtctttgtggatttaacgaagataaaccagtacttcttgttatcggtggaagtcttggatctgttgcgatcaataatgcgatccgtaacaatattgatgcattacttgagaaatatcagatcattcatctttgcggacgtaacaaccttgatgaaagccttgaaggcagagaaggttacaaacagtttgaatatgtaaaagctgaattaaaacattattttgcatgtgctaacgttgttgtatcccgtgctggagccaatgcgatctgtgaacttcttgcacttcgcaagcctaatattttaattcctcttggattagaagccagccgtggagaccagatcctgaatgctgaatcttttgaaaagcagggttatagttatgtacttcaggagaaagatgttacgagtgagactttattaaatgctgttaacagcgtttatgaagaccgtgataaatatgtggaagcaatgaatacaagtgagcttgcaaatccaattgaaacgattgtgaatcttgccaatcagttagcttctcaaaaaagaaaacgataa

SEQ ID NO: 1765 - DNA, 1041 bp, Firmicutes bacterium CAG:270
atgaagaggaaacttaacaatgaagaattgatcacgttttgcagtcagatggcgttgatcttgaaatcaggaatatcttcgctggaaggaatttatatcatggaagatggagatgtctctggggatggaagagagattttaaaagagatacgagaagaaatcgagatgtgtgggatgttatatccagcaatgaagaagtcaggggtatttccggaatatgcattgcatatgacagagatcggagagcagacaggaagacttgatgagacgatggaagcactggcagcttattatcagagagaagaagaaatacttgaagcagtaaaaagcgcagtaacatatcctgttgcaatgcttggaatgatgcttgtgatcattattgtattatttgttaaagtaatgccagtgtttgaacaggtttatcttcagtttggacaggaaatgacaggtgtagcacgtaatattttaaatattggaaactggatgagacaatcagcgatcatactttctgtaattgcagtgatcgtattaatgatcgtgtgtagtgcagttttttcagaaaaattcaggaataaattatttgaaaaaatttcaaagatcggatttatgaaaaagctagcttggaaacgggcaagaacgagatttgcaagtggaatggcgatgtctttaaagagtgggcttgatatggatgaaagtcttacacttgcagaaaaactggtagattatgaaccgttaagaaaacagatcgcggtgtgcagagaagacatgaaaaatggagaatcatttccaaaagcactgaaggaatctcatatttttggaggaatgcaggaacgactaatggtgatcggatatgaaactggagcaactgatgaggtgatggaacagtctgcggatctgtatcagaaggagcttcaggatcagattcagaaaatgatcggcattctggaaccaacattggttgggattttatgtgtgatcgtaggagttattttgctgtctgttatgctgccattagcaggaatcatggcagggattggataa

SEQ ID NO: 1766 - DNA, 1269 bp, Firmicutes bacterium CAG:270
atgagaaaaacgcgaaaaacagcggctgtattggctctgtatgcggttttgatgcttagttcagcgtctgtagtaagtgcagatcaggtaaatgataagacatttgcaagagaacagacaaatgagcagactgacactagcaaagataattctgcccagacgacagaagcttcgacaactgaggcaacgacagaaaagaaaacagaagctaagccaacgacagaaaagaaagataagacaaatacaagtcataagaagaaagcaacaactaagaagacagagcgtaatacaataaagaaacataagaagaaaaagaaagataccaaagacaagaagaaagataaaaagaaagacaaaaaagataagaaagcgatcattccaaaagtctataatgaccatagcattgagatgaaaggaaagaaagaatctattcaaggatttatttattttaatcaggcagatgcagcatggaatgataatggttaccagattcatagcagcggatgcggaccaacagcaatggctgtctgcatcagttcattaactggtaaatgggttacaccagtagatacgacagtttgggcatataagcatggatattatacaagtgcgggtgcaagtcatgagatggtaccggcattggcaaagcagtataaactttcatgtaatgggctaggaacagatattaataaaatacgcagtgccttgaagaagaaacatccggtagtagcactgatgggacctggttattttacaaagaaaggacattttattgttcttgtagcgattgataacaatgatcaggtaacagtagctgatgttggaagcagagaacgtacacaatataaatatctattaaaagatgtagtagcccagacaaaagctgcttcagcaggaggaccttgctgggagatttactctaaagataagaaagcaaagaagacaaccgatacaaagactaagacaattcaggcgaagaaagaatttaaagatacatctaagatgtatgcagagatcaaagcagtcctacagaagaactatcatctgagtgtaccgcttaagaaaggaactttggtcaataaagatcagtttgtcacagttagctctttaacgatcaatgataaagttacagttatggatgtgtctaagaaacttacaacagatgttgatcttcagcaagtagtatctgagattaagacagatgcagtcaagggttctttttggaatacagtaacgattgaacctaataaaacaagtgtaacagaataa

SEQ ID NO: 1767 - DNA, 1353 bp, Firmicutes bacterium CAG:270
atgaatgaattacggccgatacagattatattgcttggcttttttattacaatatttgcaggttccattttgctgacattgccgattgcagctaaaagcgggcaggcaacctcatatatagatgcgttatttacagcgacaacttcggtatgtgtaacagggctggtcgttgaaaccacaatgacacattggagtctgtttgggcaggttgtgattcttttactagtccagatcggaggacttggagtagtaacgatcacaactgggatgttctatgtgctaggaagaaggatcacacttggaaacaggatgctgattcaggaatctttggggcttaatacattgacagggctagtgccattggttaagaaaatcattcttggaacagcgattgtagaaggggccggtgcagtgctttatgcaacacagtttataccggaattcggagttggttatggaatctgggcagcagtttttaattccatttccgcattttgtaatgcaggaatggatatcgtaaaagaggatagttttcgaagttatgtgacgaatccggttattaattttacaacaatggcattgatcgttcttggaggacttggatttattgtatggaaagatctttggcagagtatgaaaaagcttataaaagagaagattccagtaaaaagaattgtgcaacagttgaaatttcaaacaaagatcgtgttatcaatatcaacattccttattttatttggaacagtcttgatctttttgtttgaatatcataatccagcaacgatgggaaatctgtcattaccaggtaaagtcatggcatcactgtttcaggcagtgacgacacgtactgcggggtttgagacagttgcacagggagcactaacagatgcctcttctttagtttcgatgtttttgatgatcattggaggatcaccggctggaactgcgggaggtgttaagacagtgacctttgcgattcttatattctgtgtgatctcagcagctaagcaagaagagtcgatcagtctgtttaaacgaagagtgccaggtaatcttttgtcaaaagcactagcgatcattgtgatcaatttaatggtattaatgacttctgtgttattactcttagtatttgaccatggaaattttatggagtcttgttatgagtgtgtttcagcactcggaacggttgggcttacaaagggattaacaccgaatttgacaatcgcagggaaagtgattatcatcattaccatgtatcttggacgtgtaggaccgatctctatggcaatcggtttttcacagaagaataggaaaaagcaggtcatgtatccagaacaggatctgatcttatag

SEQ ID NO: 1768 - DNA, 966 bp, Firmicutes bacterium CAG:270
atgtattgcaagaagtgtggaaccaaaaataaagatgatgcaagattctgtgcaaactgtggagagaaactggtaataccgccacagcaacaggcaaaacagcagccagcacaacccaaacagcagatctacacagaacctcaaaatgaaccaaaacgatcatcaaaaagctggatcattgctttagcatgcgtgatcgttgtcgttgttggaatatttggattccaatatttaaaatcagaagacaaaaaagaagctacagcaacaaccgagaacaaaacatcagcaaaaacaacggaaaagaaagcaacagaaaataacgcaggagaagatgtagccgatgccaaggatagcacagagaaatcacaagtattatcctacacagacaacgaagacatggatttatccgcatgcacagacagcgatgattatcagtatgtaagcagcgaggacaactcatttgaattcgcctatccaaaatacctgtttaaccgcagttatgtaaataaaacaggaaatcaatacacattagaatacgcaaacagtgataaagtcgatgattacgagatcaaagcagttatttcatcacaaaaagcaggatcaggaaatgcagtaaaaagcgttcagaaattatacaaacaaaagaaaaaatccataaagaacgtcacatacgcatacccacaaggcggcaaaacaccaaaactatatcaaggtaaatcaagcatgatcgtcatgggatatttagacagcgacaaaacaaaatgtgaatatgtactgctcacaagcgatggaaaaaaagactacatgatgcagatcaatttctttgattcagattataaagatgaatataaagagatcaattatgtagtggattgtatgtatcgtggatgctcatttacgaattctacatatcagatgagaacatttgatcagtttagggaagacgatatgggagttaagaagtaa

SEQ ID NO: 1769 - DNA, 1401 bp, Firmicutes bacterium CAG:270
atgcagttctttatctttctatcaatctttttgctgacgacattgatatctgttttttttagtaagtttttgaatgatggatatcgagagaaaatatatgatcagaaagttgatagtgtagctagtcagtgtgcatggcttggagatcaggtagttggagttgattttcgtttagacgatggctccaactctctttctacccagacagataaattagcagcgagtatgaatggtcggatcatcgtaatcaaaagtaattataagatcataaaagatacacatacagattttcagtcaagattcttcctgaatcagaatattcttgatatcatggagggaaacaaagaaagaattgttacagagaatggaaaatatattgaagttttggttccaatcacatacaagacaggaaataaaacacagattcttggtgcagtaatagcgactgttccatcagaagatatgatgggtgcagtcatcgagatggaacacagaaggaatatgcttttggttgctttcattatatgcggattgtgtgcggcgatggcaatcagttatttactgacaagagatttaaagaagattcagaaagacgttgattttattgcatctgggcatgaggatgagtcgattgaagagacaggatttttggaaatgcgtatgattgtacagcgctttaacgagattcttggaagaatgcagacattagaagaatccagacaggaatttgtatcgaatgtgtctcatgaattaaaaacaccaatgacatcaatgaaagttcttgcagattctctgattcagcagggagatcaggttccagcagaactataccgtgaatttatgcaggatattgtcgcggagatcgatcgagagaatgttattatttctgacctgttatccttggtaaaactagataagaaagcagcacagcttcagatcactacagtcagcattaatgaattgttagagattgttatgaagagattaaagccgctggcacttcaacgtaatattgaattgatctttgaaagttttcgtccggttactgcggagattgatgaagtgaaattatcacttggactcacaaatctgatcgagaatggtattaaatacaacaaagatgacggatggatccgtgttacattgaatgctgatcataagtatttctatgtgaaagtagcggattcaggtgtaggtattccagaggactgtcaggatcaggtatttgatcgcttctatcgagtggataaagcaagatcaagagatactggaggtaccggacttggacttgcgatcacgaaaagcgttgtatctcttcataatggagagattaagctgtacagtaaagttggtgaaggaacaacatttaccttaagaattccgttaaaatataaaggctag

SEQ ID NO: 1770 - DNA, 1956 bp, Firmicutes bacterium CAG:270
gtgaatgatttagagagaatgaaagaactcatccagatcttaaatgaagcaggaaaggcttattaccagcaggataaagaagtcatgagcaaccttgaatatgacaagatgtacgatgaacttttagaactggagaaaaagacaaatactgtattatccaacagtccaacgatccatgtcggatatgaactgatgacatcattagagaaagaagcacatccatcaccaatgctttctctagacaaaacaaaagaaccagatcagctggcagcatggcttagtggacatgatggaatcttatcatggaaattagatggattaacgatcgtactgacttacgaacatggagaattagtcaaagcagtaacccgtggaaatggagaagtcggagaagttgtaacaaacaatgcaagagtatttgacaatgttccaagacacatttcttacgacggaacgttagtgatccgaggagaagcgatcattccatattcttatttctataagatgaatgaagagattgaagatgttgacagccagtacaagaatccaagaaatttatgcagtggttccgtcagacagttaaataatgagatcacagcaaagcgccatgtgcatttctatgcattcagcgtaagtgacatcgaaggaatggattttaataattcttttgaacagaaattagactgggcagcaagtcttggatttgacgtagttgaacatatcagagtaacagaagatacgattcgaggtgagattgaagaattttcaaagaagatcgaacattttgatctgccatctgatggattagtattagtttatgacgatcttgcatatggaaaaagtcttggaagaacagccaaattcccaagagattccattgcatttaaatgggcggatgaaacggcagatacaacattgacagagatcgaatggagtccatcaagaacagggcttatcaatccggtagcaatctttgaaccagtagaattagaaggaacaaccgtaagcagagcaagtcttcataatatcagtgtgatggaagaactggaattaggaattggtgatgagattgttgtatacaaagcaaacatgatcattcctcaggtcgcagagaataaaacgaaaagcggcaagattgagattccacatacatgcccagcatgcggaggagagacaaagattgaagatgaaaatggaatcagaactctgatctgtaccaacgaattttgcagtgccaagaagatcaagtcattttcacattttgtatccagagatgcaatgaatgtagatggactttctgaggcaacattgcagaagatgatcgatgttggactattaaatgaaatttatgatctctttacattaaaagaacataaagaagaaattttagaattagaaggatttggggagaaatcttttgagaatctgacaaaagcaatcgaagattccagaaagccggtattggcaaactttatttatagtttgggaattccaaatgtaggactatctaatgcgaaattgatctgcaagcattttaaagaagatttcaaagcaatcagagaagcaaaagaagaagattttacagcgatcgaccagattggaccgatgatcgcaaaggcaatggtatcatacttccatacacctcataatgaaaagattttagaagaacttttaaaatatgtgcagtttgaaaagaaagaagaagtagaaactgaacagatattagaaggaaagacatttgttgtcacaggttcacttaatcattttgataatagaaaacagttaaaagaagagattgagcagatgggaggcaaagtcacaggatctgtatccaagaaaacagattacctgatcaacaacgacaagatgtctcagtcttctaagaataaaaaagcaatggaattagatattccaatcctgagtgaagaggacttcttagagttaattggacgataa

SEQ ID NO: 1771 - DNA, 1407 bp, Firmicutes bacterium CAG:270
atggatattttaaagaaaatacgtccggaagaacaggattttcttgaggattttcaggagatggttgtttatcatataaaacagatgcaacagtgtttacttacagcaggaaaattgttttgtgaggaggaagaagaaaaaaaagaaacaaaaagatgtgggaggaatgtacttgaaagtgtgatcctcaaagagtgcgttggctgccgggagtatcagaattgtaaatttacaattgcagataaggacaaacttggaaatattatagaaaagcagggcggtttaagttatgcagatcttaaacaatgtcatccgtgcaagaatgggcaggattttattgaagaggctaatcagatttatgaaagagaactttttataagaggaatgagacatcatatggtacagatgcggaagatcattggaaatcaatatatgaaagccgggcaagttctaggtgatttttttgatgggaaaatgtcttatatacataaagatgatcagctatgtagtaagatcaaaaaagaatttgaaaagtataatttaaaaatatgggatgtttgtttttatgaaaatccgcaaaaaggaagacaaatttatctgtatctgaagaagaaaagaggaagtgaaatcagcacgaggcaggcagcagcattattaagcagaatattaaagaaaaaaatgatgccgcttccacaacagaaaaagcttgtaaaaaatggttatgaaatgtatggttttacgccagaagaaaaattttacgtgatcagtggcatacgtacagctgcttataaggatgaagagaagaatggtgattgtttttcaataggaaaaatcagagaaggaagatacgtggcaatgatctcggatggaatggggactggaaatgaggcaaataaagaaagcaagaaaatgatagaagtaatggaagatatgcttggcgcaggaatagaggaagaagtgtgtatacaacttttggattcaatcatagcatttgagacagaaaaagaaaaatatgcaacgctggatttttttcagcttgatctgtttgcaggaataggatctttttttaagattggagcatgtccatgtttgttaaaaagaaaagataaagtggagattttggtaggggaaagaactgttgtaggaatggatctgtttcaaagtaggattcctttttgccgcaaaaaaatggaaagtgaggatcttcttgtaatgtttagtgatggagtattagactgtatgccacaaaataacattgagacattagcatcgtttcttgaagaaatggatgtggtgcggccacaggcagtcgcagatcgattgtttgacaggattacgaatatggaagaatataaaaagaaagatgatatcacaatcttggtgcttggaatatgggataggtattga

SEQ ID NO: 1772 - DNA, 1359 bp, Firmicutes bacterium CAG:270
atggaaaatataacaattcaagacattttagacgcaactggcggaacacttttatgcggtgatccttccatgaagattgaccatttaagtacaaattctatggaggtaggtccaaacactttatttgtaccgatcatcggtgaacgcgttgacgcacacatctttattccaaatgcattaaaagaaggcggtgcttgtttaacacaggaacataatgaagccgaaggggatgccccttatattaaagtccctgatactttaacagcaatgcagcagattgcttcttattatcgaaataaaatgtcacttccaatcattggtgtaactggaagtgttggaaagacaacaacccgtgagatgatcgctcacgttttaaaaggaaaatataaagtattcgaaacaatcggtaatcaaaatagtcaggttggtgtgcctttaactttagatcatctgacatcagaagatgagattggtgttcttgagatgggaatgagtgaaaaaggccagatcacaactcttggcaacattattcatccaaacgttggtgttgtcacaaatgttggcgtttctcatattgaaatgatgggttccagagataatatctgtatcgaaaaattagatattcagaatggacttccagaagatggtgttcttttcttaaatggggacaatgacatgatccgcaaacatattgactatgtaaaaaaaccatatgaattttatggttttgcagatgattgtacatatcgtgcagaaaagatccgtgaaaagaatggacaaactttatttgaattccactacggtaatatgaaagaaaatatcacattaaatgttcttggaaaacataacgtatccaatgccctggctgcaattgcgatcggtcttcgctatgatgttccaatggatgcgatcaagacacaattatccacattttctggtcagagacagaatattgtccacgtaaatgactatactctgatcgacgatgcatataacgcaagtcctgattccatgaaagcaagcctgagcattttatctgattttaagacaagaggacgtaagatcgctgtcttatctgatatgctggaacttggaccagattcaccagaatatcataaagaagttggtcgttttatcgctacaacgaaagtaacagacctctttatcacaggtgaactttccaagaattatattgaagaagcatggaaagaaaatccttcccttcatacacgtgcattttcttccaacgacgagctgattgctttccttgaaacttacttaaaaaagaatgatgtcgtactgatcaaaggatctaatggtatgaatcttaaagaagtaagtaaagctttgatggcataa

SEQ ID NO: 1773 - DNA, 1344 bp, Firmicutes bacterium CAG:270
atgttatccatgaaaaacgaaattgagaaaatttgggatgatgtattagtcaagcttgagcaagagcatgacgtttccagtgctgcaattaatgcctggattaaaccattacatattaaagatgtccagtccaataagataattctttctctggatgctaaatatgatgagcggggtattcaatttattaagaaaaaaatgtacgatttttatatttcccttgctatttccgatcttaccggcaagaaatacgatatagaggttgagctagaaaaagatggagaaaaaccaaaacaaactcctgctgctacacctgaacatgacaataataacttaaatccccgttatacttttgatacattcgtaatcggtgacaataaccgcatggcacatgctgccagtattgctgttgcggaagctccagcggaagcctataatccgctgtttttatatggaggtgcaggtcttggaaagactcatttaatgcactccatcgcacattatatcattgaacataatagttctttgaatgttttatatgtaacaagtgaagattttacaaatgaagttatcaattcaattcagcacaaaaaacaggaagagttgcgcagtaaataccgtaatatcgatgttttattagtcgatgatattcagttcgttattggtaaagaaagtacacagcaggaatttttccatacctttaatgcactttataactctaaaaaacaaattattctttcctctgataaacctccaaaagagctggatgtattagaagaaagactccggagccgtttcagctggggacttccagttgatatccaacctccaaactatgaaacaaaggttgcaatcctcagaaaacgtgcagaattagacaatatttatattgatgatgaaatttttgattacattgcaacacacattaagtctaatattcgtgacctcgaaggtgcattaaacaaaattaaggtttattccaaattaaataaaaaaccaattgaccttgaattatccaaaattgctcttcaagatctgatcgataataaaacaaaacaggctattacacctgaattgatcatgcagacagttgctgaacattttaatattcagacaagtgatatcatctcaaaaaaacgcagtcatgatattgcttatccacggcagatctgtatgtatttgtgtaagaaaatgacagatcaatcactcgttaaaattggtgagatcattggtaagagggatcactctactgtgattcatggtattgagaaaattgaaaaagatcttgaaaaagaccctgaattaagcaaggttattgaagttatcaccaaaaagatggattaa

SEQ ID NO: 1774 - DNA, 1776 bp, Firmicutes bacterium CAG:270
ttgatttacggagaagaaatcatagaagaggtgcgaagccggaatgatattgtagatctcatctccacgtacgtaccgctaaagaaaaaaggaagttcttatttcggattgtgcccatttcacaatgaaaaatcgccctctttttctgtgagccgggataaacagatgtattactgttttggctgtggtgccggtggtaatgtttttacttttttaatggaatatgagaacttttcttttccggaagcgttaaaatatctggcagaacgagctggaatggagcttccagaagaagaattgaatgaagaagctaaacgaacaatggatgcgaaagccagacttcgagagatgaacaaactttctgccaattatttctattatctgcttcacagcaaacgagggcagaaaggacttgcgtatttgaaaaatcgtgggatcacagatgagacgatcaagagatttggacttggatatgcagatatttacaatgatgatctgtatcgttttctaaaaagcaaaggatacagtgatgaagaattgaaagattctgcactcgtaacgatcgatgagcgacgaggcggaagtgataagttctggaacagagttatgtttccaatcatggatgtcaataatcgtgtgattggttttggaggcagagttatgggagatggttcgcccaaatatttaaattcaaaagaaaccacattatttgataaaagtcgtaatctttatggattgaattttgcaagaagctcaaggaagaaagagattattttatgtgaaggatacatggatgttatatctatgcatcaggcgggatttacaaatgcagtagctgcgcttggaactgcatttactagtggacatggaacgttacttaagcgttatacagagaatgtcatactttcttttgacagcgatgaagcaggacaaagagctattttgcgtgcaattccgattcttaaggaagctggactgacagttcgtgtattaaatctcaaaccatacaaagatccagatgaattcatcaaagggttaggaagagaagctttggaagaaagaatcagtcatgcaacaagcagttttatgtttcagatacaggtagctgcaggaagatatgatcagaacgatccagaggagaagacaaaatttcagcatgaagcagcaaaattactttcaacaattgaagaacgtctggaacgtaagaattatattgatgctgtatcaagggaatattatattgatgcaaaagatttggaagaacttgttaattattatggaacttccagttatgcaacagcacagagacagcaaaatacgccaagacagtcagagagaaggctgcagcagagtgaagcaaaagaggaaaagaggaaacagccgcagaaacttcttcttacatggatggtaaatgaaccacagttatttgaaaaactggatgggatcatcggtccagatgatttttatgaacagatatatcatggagcggcattactgctttttaaacaatatgcagaagaaggggcagtaataccaggaaagatattaaatcaatatacagatctagaagatcagaaaaagatcgcagaattatttaatacaacactaaagatcagtccatcaccggaagatcgtgataaagcgttgaatgatattgtgcgaagagtaaaagaagacagcattgaacaacagatgaacgcaacaaatgatattttgaaatggcaggatttgatcagggagaaagcaaaccttgcaaaattgcatatttcattatag

SEQ ID NO: 1775 - DNA, 2538 bp, Firmicutes bacterium CAG:270
atgaaatacaccaaacaaaatattgagaagcagagaaaagttctttcttctgataaagtacggaagaattccagtgtttctctctttctttttaaatatgtttttattgtttccattatcctgatcgttgccggtcttggccttggtgtgggatttgttcgtggtatccttaagacaactccacagatcaccaaaaattccgtacattccaagggctatatcacaacgatctatgataataaaggtcagacaatcaaaactttatcaaaccatgattctaacagaatttatactcctctgtcatccatccccaaagatctccagcatgcatttattgccattgaggatgaacggttttacagccataatggtattgatttgtacgggatcattcgagctaccttccttggtattcgtaaccaatcattaagccaagggggaagtacaatcacacagcagttgatcaagaataatctgttaggaatccaacctgaaaaaactatgatggaacgtctggaacgtaagatcaaagaacagtctcttgcactagaacttgagaaaattgcttccaagaaatatatattggaagaatatttgaatgcgatcaatcttggagaaggaactcttggtgttcagacagcatctcagaaatattttaacaaagatgtctctgatctgacactttcagaatgtgcggttctggcaggaatcacaaaaaatcctacacgtttagatccaattactcatccggaaagcaacgcttccagaagattacttgttttacaaaatatgttagatcaacattatatcacaaaatctcaatatagagaagcacttcgtgatgatgtatacacaagaattcaaaaaaatgctgctgcatctacaacaaagaaaaacacgaattcttattttgaagatgcactgatccttcaagttgtaaaagacttaaaaagcaaactcgggtatgatgagacaaaagcttacagtgcaatctacagtggcggattaaaaatatattctacacaagatactgcaattcaaaatatcgcggacagtatcactagcaacccagcaaactatcctaaagccacaaaagtagctttaacctgctctttcacggtgcgtgcagcttccggagagacaaatacttacaccgaacataatctgcttcattacatgaagacccataaactaggaaacagcctggttttccagaatgcttccgatgcaaaagaaactctcgctaaatataaacattatataaaagataaaggtgcaatgatcatcgatgagacttcacagccaacgatccaaccacaaatttctttaacgatcatgaatcagtcaaatggttctgtagaagctttagttggaggacgcgatctgaagacttcagatctttcactaaaccgtgctactacttcaaccagacagcctggatcaacatttaagattttgtctgcatttttaccagcccttgataaaaatcatatgacacttggaacagtttatgatgacgctccatacaactataacgattccaatcgtccggtgcataattattacaaaggttacaaaggttattcaacgatccgtgaagcgatcacccaatcaatgaatattgtcgcagcaaaaactatttctgatgtaacaccaaagacatcttttgattaccttacaaaacttggtttttcaacacttgtttccaatgagtttacatctaacggtaacgtatatacggatatcacacagtcattagcccttggcggtctgacatatggtgtcacgaatatggaattaactgctgcctatgcttctattgccaatggcggtatgtataataaacctgttttatatacaaaggttgtcgatcaaaatggaaatgtcctgctttctaacaaaccaacgaagaaacggattatgaaatcaagcaccgcttttctgcttaccgatgccatgaaggatgtcattgccaaaggaactggtaaagacgcaaaactgtcttctcctatggctgttgcaggaaaaactggtacaacctctaacaattacgattactggttcagcggttatacaccttaccacacagcttctatatggatgggatacgacaacaatacaaatttcaattccgaaaacacacataagaaactatgggcaaagattatgaatcagatcatacagacaaaatccgagaaaactaagaatttctcaaaaccatcaaatattgtcaaggcaaagatttgtaaagagtctggaaaacttgccatcaaaggagtctgcgaccacgaccctcgcggtaattgtatcatcactgaatattttgaaaaaggcactgttccaaaacaaacttgtgatactcatgtagctgttgaaatctgcaagaaaacagataaacttgccaataaaaaatgtcctaaatccgaacgtatcaagaaagtttatatcgtccgaaaaaatggaagtcacggaaaaacagcagatacaaaattcctgcttccaaaaaaatatcaatctaattcctgcacaatgcattaa

SEQ ID NO: 1776 - DNA, 1125 bp, Firmicutes bacterium CAG:270
atgaattacattaaagtaacaaccacatatccaaccggtggaacgctgcttccaaacgcttttgttgataattacatgatccgtgcgaatggtgaatatatcaaagtgtatatctatcttctgcgtatggtttctgatggtgcgaacttcagcatcccttgtctggcagacgtactggaacttacggagcgtgatgttactcgtgcgttaaagtactgggagaaagaatcacttctgcgcatggaattaaaagatggtgagatcagttttattgaacttctccctgtcagtggcaatccacattctcctgaacagatttccaatgcacagactgcacagccagattcacaggcacagtctataacagcttcatccactgtctcttcccagacagaacagtttacagcaaaaaaacaggcttctattggtgctgaagcaatcccagcaatgaagactttgtcccctgctgaattacagcgtaagagtgaagacgaacgtttctcatatcttctttatgtatgtgaaatgtttttaggaaaacctcttacctgcacagatatgaacacattactttatatgatcgaggatcttaagatgtcctgcgaattagttgaatatcttgtagagcattgtgtttccaatggcaagaagagtttccgttatatgcagtctgtagcgatcaactggtatgaagccaatattcagactccagatgaagcgaaagcatacagcaaaaatttccgtaaggaatattattctattatgcgtgctttcggattaaaccagaatcctgcacctgttcaggaagaatatatgaaacgatggcttgagacagatggttttgatcttccattgatcatcgaagcatgtaaccgaacaatcaatgcgatcaataaaccaagttttccatatgcagataccatcctaaaacattggaaagataaccatattgtaaccttggaagatgctaagaacttccatgtacagcagaaggctcctaagacttttgctaacaataataaccagaatactatgcataattttactcagcgtgattatgattttgatgcgttagagcaacagcttttacagaaacagttcgcaaacgaactcatggagaactaa

SEQ ID NO: 1777 - DNA, 1299 bp, Firmicutes bacterium CAG:270
atgtacgatctcatattaaaaaaacgacagggcaatgtcttgacaaaagatgaaatagattggatgatccgtgaatatacagatgggaggatcccagattatcagatgtctgcgatgatgatggcgatttgttttcaggggcttgataaggaagaaacttatgagcttacgatggcaatggcacaaagtggtgagatgttagatctgtcaggaattaaaggcattaaggtagataaacatagtactggaggagttggagataagacttctcttgcattgactccgatcgttgcatctcttggaattcctgtggcgaagatgtctggacgtggacttggacatacgggcggcacgattgataaacttgaaagtattccaggattttcaacgcagttgacagatgaacaatttgaagaacaagtaaactctataggtgtttccattatgggacagacaaagaatctggcacctgcggataagcttttgtatgcattgagagatgtgacagcgacagtggatcagatttctttgattgcgagcagtattatgagtaagaaactggcagctggtgcagatgcaatcttgttagatgtgaaaactggcagtggggcatttatgaaagaaaaatcagaagctgtgaaattagcacaggagatggttgatatcgggaaaagtgctggaagaaagatgacagcagtgatcacgaatatggatgaaccacttggaatggcagttggaaatattctggaggttaaggaagcgattgatacgctgaaaggaaatggaccaggagatttcacggaactggtagaaacactagcctctcatatgctgatgcttggaggtgttgcagagaaatttgatgacgcagtatccatggtaagaactacgatcagagatggaaaggcacttgcaaaatttaaacagtttgtggctgcacagggcggtgatacaagatatatagatcatccagaactgtttgaacaggcacatgtaatagaagaaatacgctcagaacaagaaggatttgttgaacatattaacgcacaggagataggaatctgttcattgatccttggtggtggaagagagacgaaagacagtcagatcgatccgtcagttggattagtattttcaaagaaagttgcagatccagtgaagaaaggagatttgctggcaacgatttatggaaatgaagaggagaaagtcagacaggcagtgaaacattttaaagaaaatttccatatagcaaaggatcagctagagaaaccacagatgatcaaacaagtattatcttaa

SEQ ID NO: 1778 - DNA, 1137 bp, Firmicutes bacterium CAG:270
gtgaaaacagagcagttgttgcccaaaaacattcgtcagatcgggagtccggttggacatacaaaagtatatattgaagattatgtaataacatttttgaattcattatcaacggacaagaatacttatgtaagaggagccattttatttggagagaaggaaatggtagaaaacgatactattatttatgtaaagggagcaattgagggacagaatctggaacttgatttggatgaaactgtatttaacgatgaagtatggagagaaatttatcagcaaaaagacagattatttcctggattagaagtgatcggatgggcattgctgagaatgggattttcggtacgattaaatgataagataaaaaaaacacattttgaaaattttccaggggaaggaaaagtactttatatgatcgatgatttggaaaatgaagatgcattttatgtatatcgtggacaagatcttgtaaggcaaagtggttactacatatattatgacaagaatccgatgatgcgtgaatatctggcagaacgcagagaaggaatgcaggaatccgaaaattatgagaaaatgatggaaaatatgagggatgaaagattgatcagacaatttcgtgagaaagtttccagaaaaacaaaaagcagccagagaaaaggaagatttcgcacgttttctacggcagcagctgttgtagtcatgatgatcatgggcggaagtatgtattattatgctcaacaagatcagagtattaactttcgtgacgtagtaaatggggcagtaaatacaatgggaaaaggtgtaaaagatcaggtggaagataaaagtgagacgacaaaggaaaaaacagttacgaaaatactggatactcaggcatcaactgaaaataaaaagaatacaacaaaagtaaaaaaaacaacagaaaagtcgacagcagcaacatctgtgaaaaagacgaatgtctcaaaatataaatattataaatatacggtgaaaaaaggagagacactggtatcaatcagcagaaaagtatatgggacacaaaaattagtacaaagaatcaagacggcaaatactctgaatgatcaaaatcaaatttatccgggacagaaattaatcataccagtgttacgttaa

SEQ ID NO: 1779 - DNA, 2163 bp, Firmicutes bacterium CAG:270
atgagtgaaagaataaaagaatctgatagggaagggagaattatgatcaaggtaattaaaaaagacggaacaaaagaagaattcaatgtacagaaagttattgtagcagtgaataaatctgcatatcgtgcattagtaaaatttacagatgaagaaattgattttatctgcaaatttgtgactgaaaaagtagaacagatgcgcaagaaagaagttacgatttctgatatgcataatgtggtcgaaagtgcattggaacagacaaatccattggtagcgaaaagctacagagattaccgtaattacaaacaggactttgtacagatgttagatgaagtatataagaagagccagtctatcatgtatattggagataaagaaaatagcaacacagacagtgcactggtttctaccaaacgaagcctgatctttaatgaacttaataaagaactctatcagaaatttttcatgacaactgaggaaattcaggcatgtcgtgatggatatatttatattcatgatatgtctgcacgacgtgatacaatgaactgctgtctatttaatgtgcaggaagtattaaaaggcggttttgagatgggaaatctctggtacaacgagccaaagacattagatgttgcttttgatgtcatcggagatattgtattaagtgcagccagtcagcagtatggtggatttacagtaccaaatatcgaactgattttggaaccatatgcagagaaatcttacgcagcagggatcgagagatacgaagaacttggattgtccagagaacgtgccgaagaagaagcaatgaaagatgtcaaacgtgaatttgaacagggattccaggggttagaatacaaatttaatagtgtatcatcaagccgtggagactacccatttatcacaatgacagcaggaactggaacaggaagatttgcgaagatggcaacgatctccatgttagatgtcagaagaaaaggtcagggaaaagatggacataagaaacctgtgttattcccaaaactcgtattcttatatgacaagaatctacatggaccaggatgcgaattagaagatgtatttgaggcaggaatccgttgctccagacagacaatgtacccagactggttatcactgaccggagaaggttatattgcaagcatgtacaagaaatatggcaagatcatcagcccaatgggatgccgtgcattcttatctccatggtacaaagaaggcggaatgaaaccagcagatgaaaatgacgaaccaatttttgtcggaagatttaacatcggtgctgtcagtcttcatttaccaatgatctatgcgaaggcaaaacaggaaggaaaagattttcacgaagtattagattactatttaaatctgattcgtgaattacatatcagaacatacgaatacttaggagaaatgaaagcatcaacgaatccacttgcatactgtgaagggggatttttaggtggacatttgggaatccatgataagatcaaaccgatcttaaagagtgcaacagcttcctttgggatcacggcattaaatgaattacagcagctatacaatcataaatctttagcagaagatggcgagtttgcgttagaaactttgcgttatattaatgagaaagtagaagaatttaaggaagaagatggaaatttatatgcaatctacggaacaccagccgagaacttgtgcggtttacaggtcaaacagttccgcaagaaatatggtgtcattgaaaatgtatctgacagagaatatgtgagcaattcgttccactgtcatgttacagaagacatcacaccaatcgagaagcaggatcttgaaggacgtttctgggaattatgcaatggtggaaagattcagtatgtaaaatatccgatcaattataacaaagaagcagtaaagacattagtaagaagagcaatggacaaagggttctatgaaggagttaatttatccttagcttactgtgatgactgcggacacgaagaattagagatggacgtatgcccagtgtgcggaagcgaaaacctaacaaagatcgatcgaatgaacggatatctctcttactccagagtcaaaggagacacaagacttaatgatgccaaaatggcagaaattgcagaaaggaaatccatgtaa

SEQ ID NO: 1780 - DNA, 1557 bp, Firmicutes bacterium CAG:270
atgaaaagtttacttgaagatccacatggtttttctgtatctcttgtcttcgatggaattcttgtcggaatctttgctggctgtatttctgtcatttatcgtctgcttttaaataacgctgaaaaactattatttgcaatcattgcatttacaaaaacaagacctttctggattgcagtctggtttatcgctctcattatcatgggattgatcgttggatggatcatgtcttgggaaggaatggcttccggaagtggtattcctcaggttcagggagaaatgaaaggttatttaaatcagaattggtatcgtgttctttgttctaagatcatcggtggtaccttatgtattcttggaggtttgtctcttggacgtgaaggcccatccgtacaacttggtgccatgtctgccaaaggtctttctaaaatcactaagaaatctccaacaaaagaacgttatatgatgacgtgcggtgctggtgctggtcttgcggctgcctttaatgctccacttgctggtgttatgttttctcttgaagaattacagaaaaactttaatagttctatgttagtctgtattatttcaggatgtgttacttccgattttatttcaaaaaatgtattcggattatctcctgtcttcgactttcacctaacagcagcactgcctttaaaacattactggatgttagtacttcttggagttttgcttggatgttgtggtgcattttataactttgttatgttaaaaggacaggatctttttagcgctatgaaaaaaattccagctaaataccgtattgtatttcctttcgtggtatctggaatcgtctgttatactttgccttctattttagcgggtgggcatgccatggtctctttgatcacaggacatacattacttgtttctacaatgttattattactgatatgcaaatttttattttctgcattttgttttggatctggtgctcctggcggaattttctttcctatgttgatccttggatcttatattggagcaatttatggaactattatgatacaggcaagtggaattccttcctattatctggtaaactttatcacaatttccatggcaggattctttacggcgatcgtacgcgcaccgatcactggtatcttgttgattgctgaaatgactggtacatttgaacatttcctgtcactggcagttgtatgtatcatcagttatcttgtcgctcatctgttaaagagtgaaccgatttatgaaagtcttcttggacgtatcttagcaaaaaatggttttaaagaaagtgatgatgctgatcataaagttcttcgcggattcgctgtaggtactggttctcttgcagctagtaagctagtaaaagatattccttggcccgatcattgcctgatcgttactttaaaccgtggtgacgaagagatcattgctcgtggaagcacagagattcttgctggagataagatcattgctttaatcgatgacaattatcttggaatggtcacagaaagtatccagttgatctgcggggaaatcattcctgaataa

SEQ ID NO: 1781 - DNA, 2286 bp, Firmicutes bacterium CAG:270
atgaaagtagtcaatcagccagttatgaagaaagacgcaatggcacttgtgacaggaaaacctgtatttacagatgataaggcaccaaaagactgcttgatcgtaaaattactccgaagtccatatgccaatgcgatgatcaaatcgatcaatacccaatttgctatgaaagtgccaggaatcgaggcaatttatacatgggaagacgtgccacaggaacgtttcacgatggcaggacagacttatccagagttaagtccatatgatagacagatcctagatcagcacgtccgatatgttggagatccagttgcgatcgttgcgggtgagaatgagaagtgtgtagatcaggcaattaagatgttgcgtgtagaatatgatgtactgcctgcaaacttagatccacggaaagcaatggatgagggtacaccattagtgcatccagaagataactggaaagctttatgcaatattggagcagataataagaaaaatctgtgcgctacagaagaaacccatgagggagatgttgatgcagtattggaagattgtgatgttgttgtagaacacacatatcatacaaaagccaaccagcaggcgatgatggagacttttagaacgtattgctttattgatgaatacggaagattaaatgtcgtaagttccacacagatcgtattccatgtacgaagaatcttggcaaatgcattatgtattccaaaatcaaagattcgagtatccaaacctaggatcggtggtggatttggtgcaaaacagagtgcgatttcagaagtatatccagcatttgtcacatggatgacaaagaaaccatctaagatcattttttcaagagtagaatcccagattgcatcttctccacgtcatgagatggaagtgacagttcgtgtcggggcaaataagaatggaaagattcgtgcgattgatgtgtatacactgtctaatacaggagcttatggagaacatggaccgacaaccgttggattgtctggacataaatctattcctttatacagagatctggaggcacatcgttttgcgtatgatgttgtgtatacaaaccgtatgtcagcaggtgcatatcgtggatatggtgcaacgcaaggtatttttgcactggaatctgcagtgagtgaactggcagcgaagattggcatggatccaacaaagatccgtgagatgaatatggttcgtgaaggcgatgttatgcctgcatattatggagagacagcaaatagttgtgctttagaccgatgtctggctcgtgccaaggaaatgctcaaatgggatgagaaatatccatgcaaggatatgggaaatggaaaagtccgaagtgttggagtttctatggcaatgcagggatctggtatttcgggagttgacgttggatctgcaacaatcaaattaaatgacgatggactgtatacactttctattgcagcagcagatatgggaactggatgtgacacgatcttagcacagatggcagcagaatgtctggaatgttcaattgatgatatcatggtcagtggagcagacactgatacatcaccatatgattctgggtcttatgcatcaagttctacctacgttactggaaaagcagtagaacgtgcgtgtgaaaaattaaaaggacgtattttaaataaagcagctcaaatgatggaaattgattctgtggataatctggaatttgatggtaaaaaagtaagcgatccagagagtggaaaagaaatttcattagttgatatttcaacagcatctatggtcaacaataatgaaacattccaggtgacagaaacaaatagttccccagtatcaccacctccattcatggtcggaatggttgaaatcgagcttgataaagaaacaggacatatcgagatcttagattacgttgcagttgtagactgtggaacacctgtgaatccaaatcttgcaagagtacaggtagaaggcggacttggacagggaatcggaatggcattatatgaaggcgttgattatactttgaatggatatgtgaagcagaattctttcatgcagtataaagtgccatcacgagtggatgttggaaaacttcgcgtagaattcgaaagcagctatgaaccaactggaccatttggagcaaaatcgatcggagagattgttatcaatacaccatctccagcaatagcagatgcagtatttaatgcgacaggattgtggattcgtgaattgccgatcacaagtgaaaaaattgcaatgggtctgatggaacaaaaatag

SEQ ID NO: 1782 - DNA, 1512 bp, Firmicutes bacterium CAG:270
atgcttatgaaagaaaaatcaatcctatggagaatttttcattatatgaatccaaaaagaattgatccaaaaatggtaaagctatggattttctggatcttatttaatattattttattttttataccacacagtgtttcaaaagaatctatatggatccttgtaccaatggcaggacttttcatttatgcactcgtaacaaaagatgtgatgcaaagtcttttgatgggaacattttcaatgtacattttatggtataaatttggaagtatcatagcattttttcgcgattgtaaagttgttctggcagatgaagaaaatattgaaatgtatatgtctttcttcctttgtggtggattgatcatcgcaatgaagagaagtggagcaaccaaagcttttactgaatttgtaacgagtaaatttggggaaaatgaaaaaatgattcttgcaacgtcaggtatttatgcaggaatcatgtcaattgatgattatgtatctgcatttacagcgggggcggcattctctccattgattgataagatcaaaaagccaagacttgcacttgcatatgtaataagaactctaagtatttgtgtatctgcaatgcttccagttggagcctggggatattttatcatttttcagattgctgatgccaagaatgtagccaacaaagctgctgcaaccagtctttttatgaaatctgttccatttatgttttatgctattattgcttgcattgtagcactcttatttgcatttggactgctgccaaagattggtcatatgaaaaaagcatatgaaatgtcagatcaggggaaacagctaggagaactaactgacggatctgaggaagaggaaaatgattttgatgaaacagatccaagaaaacaacatatcagtgttctaaatttgatcattccaatgatcacgatcgcggttgcattgatcgctaccggcttaaactgcttcctggcttttggaattacattgatcgttactgcagtcctttatattttacaaggaattatgactattagtgaatatgtgcaatgtgtagttgatgggtttatcgatatggttgatatggtcatcattttaatgatcggctatgccatgcaggaagttatgtatactatgggaatagaaggattcgttcaaaatgtatgcaatatgattccgatcattcgcctgattccatttgttttatttgtattcttcagcttcactgaatttttatatagtttaaattatactctgtatcagatagaacttcctgttatgatcgttgttttaacaaggctaggtgcgaacgtaccactctgtatcggagcgatcatatctgccggattatttggtgcaaatgcgtgtgtagtttctgatcttggaattgtgtcagcacgtgcaaacagagtcactatttatgatcaatatgaaagttctcttccatatgtattgatttcaggagtaatatctgcaattttttatctgatcgctggatttattttttaa

(The sequence listing continues in the following parts.)

1. A method for in vitro determining if an individual having a renal cell cancer (RCC) is likely to respond to a treatment with an immune checkpoint inhibitor (ICI)-based therapy, comprising the following steps:
(i) from a fecal sample of said individual, obtaining an abundances pattern based on the relative abundances of a set of bacterial species comprising at least 8 bacterial species selected from the group consisting of:

| CAG number | Bacterial species |
|---|---|
| CAG00008 | Clostridium_bolteae_ATCC_BAA_613 |
| CAG00013 | Clostridiales_bacterium_1_7_47FAA |
| CAG00037 | Bacteroides_faecis_MAJ27 |
| CAG00048_1 | Clostridium_sp_CAG_226 |
| CAG00063 | Barnesiella_viscericola_DSM_18177 |
| CAG00122 | Coprococcus_catus_GD_7 |
| CAG00140 | Subdoligranulum_sp_4_3_54A2FAA |
| CAG00142 | Bacteroides_stercoris_ATCC_43183 |
| CAG00211 | Firmicutes_bacterium_CAG_227 |
| CAG00218 | Bacteroides_sp_CAG_20 |
| CAG00243 | Lachnospiraceae_bacterium_1_1_57FAA |
| CAG00300 | Prevotella_sp_CAG_891 |
| CAG00317 | Clostridium_sp_CAG_230 |
| CAG00327 | Faecalibacterium_sp_CAG_74 |
| CAG00341 | Eubacterium_sp_CAG_115 |
| CAG00346 | Eubacterium_rectale_M104_1 |
| CAG00357 | Bacteroides_ovatus_V975 |
| CAG00413 | Bacteroides_sp_CAG_144 |
| CAG00473 | Prevotella_sp_CAG_617 |
| CAG00474 | Sutterella_wadsworthensis_2_1_59BFAA |
| CAG00487 | Prevotella_sp_CAG_279 |
| CAG00508 | Alistipes_obesi |
| CAG00530 | Prevotella_sp_CAG_617 |
| CAG00557 | Ruminococcus_callidus_ATCC_27760 |
| CAG00580 | Clostridium_sp_CAG_62 |
| CAG00601 | uncultured_Faecalibacterium_sp_{—} |
| CAG00607 | Eubacterium_sp_CAG_251 |
| CAG00610 | Hungatella_hathewayi_12489931 |
| CAG00624 | Firmicutes_bacterium_CAG_552 |
| CAG00646 | Alistipes_sp_CAG_268 |
| CAG00650 | Dorea_formicigenerans_ATCC_27755 |
| CAG00668 | Azospirillum_sp_CAG_239 |
| CAG00669 | Firmicutes_bacterium_CAG_103 |
| CAG00676 | Firmicutes_bacterium_CAG_176 |
| CAG00698 | Ruminococcus_sp_CAG_177 |
| CAG00713 | Firmicutes_bacterium_CAG_270 |
| CAG00720 | Anaerotruncus_colihominis_DSM_17241 |
| CAG00727 | Eggerthella_lenta_DSM_2243 |
| CAG00766 | Firmicutes_bacterium_CAG_176 |
| CAG00771 | Clostridium_sp_CAG_413 |
| CAG00782 | Eubacterium_rectale_CAG_36 |
| CAG00861 | Oscillibacter_sp_CAG_241 |
| CAG00873 | Butyricimonas_virosa_DSM_23226 |
| CAG00880 | Subdoligranulum_sp_CAG_314 |
| CAG00886 | Sutterella_sp_CAG_351 |
| CAG00889 | Megasphaera_elsdenii_14_14 |
| CAG00897 | Firmicutes_bacterium_CAG_83 |
| CAG00919 | Clostridium_methylpentosum_DSM_5476 |
| CAG00928 | Acidiphilium_sp_CAG_727 |
| CAG00937 | Clostridium_sp_CAG_7 |
| CAG00963 | Clostridium_sp_CAG_524 |
| CAG01039 | Faecalibacterium_cf_prausnitzii_KLE1255 |
| CAG01141 | Holdemanella_biformis_DSM_3989 |
| CAG01144 | Lactobacillus_vaginalis_DSM_5837_ATCC_49540 |
| CAG01158 | Pseudoflavonifractor_capillosus_ATCC_29799 |
| CAG01197 | Dialister_succinatiphilus_YIT_11850 |
| CAG01208 | Coprococcus_catus_GD_7 |
| CAG01263 | Clostridium_clostridioforme_2_1_49FAA |
| CAG01321 | Faecalibacterium_prausnitzii_SL3_3 |

(ii) using one or several pre-defined equations each corresponding to a model obtained for at least 8 bacterial species from said set of bacterial species, calculating the probability that said individual responds to the treatment (P_{R}) or the probability that said individual resists to the treatment (P_{NR}) with an ICI-based therapy.

2-3. (canceled)

4. The method of claim 1, which further comprises a step (iii) of assessing, in an animal model, whether the individual is likely to be a good responder to the treatment with an ICI-based therapy, wherein step (iii) comprises (iiia) performing a fecal microbial transplantation (FMT) of feces from the individual into a germ free (GF) model animal; (iiib) at least 7 to 14 days after step (iiia), inoculating said animal with a transplantable tumor model; (iiic) treating the inoculated animal with the ICI-based therapy; and (iiid) measuring the tumor size in the treated animals, wherein the results of step (iiid) are illustrative of the response that can be expected for said individual to said treatment.

5. The method of claim 1, wherein the individual's antibiotic regimen exposure during the last two months is unknown and wherein, in step (i), the set of bacterial species comprises at least 8 bacterial species selected from the group consisting of:

| CAG number | Bacterial species |
|---|---|
| CAG00008 | Clostridium_bolteae_ATCC_BAA_613 |
| CAG00037 | Bacteroides_faecis_MAJ27 |
| CAG00063 | Barnesiella_viscericola_DSM_18177 |
| CAG00122 | Coprococcus_catus_GD_7 |
| CAG00140 | Subdoligranulum_sp_4_3_54A2FAA |
| CAG00243 | Lachnospiraceae_bacterium_1_1_57FAA |
| CAG00317 | Clostridium_sp_CAG_230 |
| CAG00327 | Faecalibacterium_sp_CAG_74 |
| CAG00357 | Bacteroides_ovatus_V975 |
| CAG00413 | Bacteroides_sp_CAG_144 |
| CAG00473 | Prevotella_sp_CAG_617 |
| CAG00610 | Hungatella_hathewayi_12489931 |
| CAG00650 | Dorea_formicigenerans_ATCC_27755 |
| CAG00727 | Eggerthella_lenta_DSM_2243 |
| CAG00928 | Acidiphilium_sp_CAG_727 |
| CAG01039 | Faecalibacterium_cf_prausnitzii_KLE1255 |
| CAG01141 | Holdemanella_biformis_DSM_3989 |
| CAG01144 | Lactobacillus_vaginalis_DSM_5837_ATCC_49540 |
| CAG01263 | Clostridium_clostridioforme_2_1_49FAA |

6. The method of claim 5, wherein in step (ii), one, two or three equations are used, which correspond to models obtained for the following sets of bacterial species, identified by their CAG numbers:

| set for model 1.2 | set for model 2.2 | set for model 3.2 |
|---|---|---|
| CAG00008 | CAG00727 | CAG00243 |
| CAG01039 | CAG01141 | CAG00473 |
| CAG00473 | CAG00650 | CAG00327 |
| CAG00140 | CAG00928 | CAG01039 |
| CAG00610 | CAG00473 | CAG00140 |
| CAG01141 | CAG00122 | CAG01263 |
| CAG00413 | CAG01144 | CAG00037 |
| CAG00317 | CAG00063 | CAG00357 |

and wherein preferably at least one equation used corresponds to a model obtained with a set of bacteria which are all present in the individual's sample.

7. The method of claim 6, wherein the equations for calculating the probability that said individual responds to the treatment (P_{R}) are as follows:
$${P}_{R} = 1 / [ 1 + {exp}^{\hat{}} - ( {\sum }_{j = 1}^{8} {β}_{j} {X}_{j} ) ] \qquad [ B ]$$
wherein Xⱼ (j=1 to 8) are the relative abundances of the bacterial species measured in the individual's sample and βⱼ (j=1 to 8) are the following regression coefficients:

| Model 1.2 | | Model 2.2 | | Model 3.2 | |
|---|---|---|---|---|---|
| | R | | R | | R |
| bacterial | coeffi- | bacterial | coeffi- | bacterial | coeffi- |
| species | cients | species | cients | species | cients |
| CAG00008 | −1.0323 | CAG00727 | −1.0791 | CAG00243 | −1.1735 |
| CAG01039 | −1.084 | CAG01141 | −1.1164 | CAG00473 | −1.027 |
| CAG00473 | −0.9723 | CAG00650 | −1.2839 | CAG00327 | −0.9968 |
| CAG00140 | −0.9907 | CAG00928 | −1.1156 | CAG01039 | −1.0043 |
| CAG00610 | −0.6234 | CAG00473 | −1.014 | CAG00140 | −0.7456 |
| CAG01141 | −0.8468 | CAG00122 | −0.9394 | CAG01263 | −0.8736 |
| CAG00413 | 0.8994 | CAG01144 | −0.8085 | CAG00037 | 0.7032 |
| CAG00317 | 0.6041 | CAG00063 | −0.7679 | CAG00357 | −0.6073 |

8. The method of claim 1, wherein the individual did not take any antibiotic during the last two months and wherein, in step (i), the set of bacterial species comprises at least 8 bacterial species selected from the group consisting of:

| CAG number | Bacterial species |
|---|---|
| CAG00008 | Clostridium_bolteae_ATCC_BAA_613 |
| CAG00048_1 | Clostridium_sp_CAG_226 |
| CAG00140 | Subdoligranulum_sp_4_3_54A2FAA |
| CAG00243 | Lachnospiraceae_bacterium_1_1_57FAA |
| CAG00300 | Prevotella_sp_CAG_891 |
| CAG00327 | Faecalibacterium_sp_CAG_74 |
| CAG00413 | Bacteroides_sp_CAG_144 |
| CAG00473 | Prevotella_sp_CAG_617 |
| CAG00487 | Prevotella_sp_CAG_279 |
| CAG00650 | Dorea_formicigenerans_ATCC_27755 |
| CAG00698 | Ruminococcus_sp_CAG_177 |
| CAG00720 | Anaerotruncus_colihominis_DSM_17241 |
| CAG00727 | Eggerthella_lenta_DSM_2243 |
| CAG00766 | Firmicutes_bacterium_CAG_176 |
| CAG00897 | Firmicutes_bacterium_CAG_83 |
| CAG00963 | Clostridium_sp_CAG_524 |
| CAG01039 | Faecalibacterium_cf_prausnitzii_KLE1255 |
| CAG01141 | Holdemanella_biformis_DSM_3989 |
| CAG01208 | Coprococcus_catus_GD_7 |

9. The method of claim 8, wherein in step (ii), one, two or three equations are used, which correspond to models obtained for the following sets of bacterial species, identified by their CAG numbers:

| set for model 4.2 | set for model 5.2 | set for model 6.2 |
|---|---|---|
| CAG00008 | CAG00048_1 | CAG00243 |
| CAG01039 | CAG00300 | CAG00008 |
| CAG00473 | CAG00473 | CAG00698 |
| CAG00487 | CAG00650 | CAG00473 |
| CAG00140 | CAG00720 | CAG00327 |
| CAG01141 | CAG00727 | CAG01039 |
| CAG01208 | CAG00963 | CAG00897 |
| CAG00413 | CAG01141 | CAG00766 |

and wherein preferably at least one equation used corresponds to a model obtained with a set of bacteria which are all present in the individual's sample.

10. The method of claim 9, wherein the equations for calculating the probability that said individual resists (P_{NR}) or responds (P_{R}) to the treatment are as follows:
$$\begin{matrix}{P}_{NR} = 1 / [ 1 + {exp}^{\hat{}} - ( {\sum }_{j = 1}^{8} {β}_{j} {X}_{j} ) ] for models 4.2 and 5.2 & [ A ] \\ {P}_{R} = 1 / [ 1 + {exp}^{\hat{}} - ( {\sum }_{j = 1}^{8} {β}_{j} {X}_{j} ) ] for model 6.2 & [ B ]\end{matrix}$$
wherein Xⱼ (j=1 to 8) are the relative abundances of the bacterial species measured in the individual's sample and βⱼ (j=1 to 8) are the following regression coefficients:

| Model 4.2 | | Model 5.2 | | Model 6.2 | |
|---|---|---|---|---|---|
| | NR | | NR | | R |
| bacterial | coeffi- | bacterial | coeffi- | bacterial | coeffi- |
| species | cients | species | cients | species | cients |
| CAG00008 | 0.955 | CAG00048_1 | 0.7112 | CAG00243 | −1.2907 |
| CAG01039 | 0.8761 | CAG00300 | 0.8931 | CAG00008 | −0.8848 |
| CAG00473 | 0.9951 | CAG00473 | 1.0042 | CAG00698 | −0.9776 |
| CAG00487 | 0.7609 | CAG00650 | 1.1282 | CAG00473 | −0.9997 |
| CAG00140 | 1.1107 | CAG00720 | 1.2569 | CAG00327 | −1.0697 |
| CAG01141 | 0.9402 | CAG00727 | 1.2397 | CAG01039 | −0.7806 |
| CAG01208 | 0.7187 | CAG00963 | 0.7595 | CAG00897 | −0.8376 |
| CAG00413 | −0.5812 | CAG01141 | 1.0235 | CAG00766 | −0.7459 |

11. The method of claim 1, for determining if the individual is likely to have a long-term benefit from a treatment with an ICI-based therapy, wherein the individual's antibiotic regimen exposure during the last two months is unknown and wherein, in step (i), the set of bacterial species comprises at least 8 bacterial species selected from the group consisting of:

| CAG number | Bacterial species |
|---|---|
| CAG00013 | Clostridiales_bacterium_1_7_47FAA |
| CAG00211 | Firmicutes_bacterium_CAG_227 |
| CAG00474 | Sutterella_wadsworthensis_2_1_59BFAA |
| CAG00557 | Ruminococcus_callidus_ATCC_27760 |
| CAG00601 | uncultured_Faecalibacterium_sp_{—} |
| CAG00607 | Eubacterium_sp_CAG_251 |
| CAG00624 | Firmicutes_bacterium_CAG_552 |
| CAG00650 | Dorea_formicigenerans_ATCC_27755 |
| CAG00668 | Azospirillum_sp_CAG_239 |
| CAG00669 | Firmicutes_bacterium_CAG_103 |
| CAG00676 | Firmicutes_bacterium_CAG_176 |
| CAG00771 | Clostridium_sp_CAG_413 |
| CAG00782 | Eubacterium_rectale_CAG_36 |
| CAG00861 | Oscillibacter_sp_CAG_241 |
| CAG00873 | Butyricimonas_virosa_DSM_23226 |
| CAG00880 | Subdoligranulum_sp_CAG_314 |
| CAG00886 | Sutterella_sp_CAG_351 |
| CAG00889 | Megasphaera_elsdenii_14_14 |
| CAG00937 | Clostridium_sp_CAG_7 |
| CAG01141 | Holdemanella_biformis_DSM_3989 |
| CAG01197 | Dialister_succinatiphilus_YIT_11850 |
| CAG01321 | Faecalibacterium_prausnitzii_SL3_3 |

12. The method of claim 11, wherein in step (ii), one, two or three equations are used, which correspond to models obtained for the following sets of bacterial species, identified by their CAG numbers:

| set for model 7.2 | set for model 8.2 | set for model 9.2 |
|---|---|---|
| CAG00782 | CAG00211 | CAG00557 |
| CAG00013 | CAG00474 | CAG00601 |
| CAG00873 | CAG00624 | CAG00607 |
| CAG01141 | CAG00650 | CAG00669 |
| CAG00668 | CAG00676 | CAG00861 |
| CAG00669 | CAG00771 | CAG00880 |
| CAG00886 | CAG01197 | CAG00937 |
| CAG00889 | CAG01321 | CAG01321 |

and wherein preferably at least one equation used corresponds to a model obtained with a set of bacteria which are all present in the individual's sample.

13. The method of claim 12, wherein the equations for calculating the probability that said individual resists (P_{NR}) to the treatment are as follows:
$${P}_{NR} = 1 / [ 1 + {exp}^{\hat{}} - ( {\sum }_{j = 1}^{8} {β}_{j} {X}_{j} ) ] \qquad [ A ]$$
wherein Xⱼ (j=1 to 8) are the relative abundances of the bacterial species measured in the individual's sample and βⱼ (j=1 to 8) are the following regression coefficients.

| Model 7.2 | | Model 8.2 | | Model 9.2 | |
|---|---|---|---|---|---|
| | NR | | NR | | NR |
| bacterial | coeffi- | bacterial | coeffi- | bacterial | coeffi- |
| species | cients | species | cients | species | cients |
| CAG00782 | −0.2034 | CAG00211 | 0.6422 | CAG00557 | 0.9341 |
| CAG00013 | 0.4092 | CAG00474 | −1.0581 | CAG00601 | 0.8927 |
| CAG00873 | 0.2708 | CAG00624 | −0.8984 | CAG00607 | 0.7108 |
| CAG01141 | 0.7665 | CAG00650 | 1.3189 | CAG00669 | −1.2341 |
| CAG00668 | −0.5899 | CAG00676 | −0.7324 | CAG00861 | 1.0379 |
| CAG00669 | −0.5181 | CAG00771 | −0.6623 | CAG00880 | −1.0016 |
| CAG00886 | −0.8415 | CAG01197 | −1.1372 | CAG00937 | −0.872 |
| CAG00889 | −0.7339 | CAG01321 | −0.8525 | CAG01321 | −0.8362 |

14. The method of claim 1, for determining if the individual is likely to have a long-term benefit from a treatment with an ICI-based therapy, wherein the individual did not take any antibiotic during the last two months and wherein, in step (i), the set of bacterial species comprises at least 8 bacterial species selected from the group consisting of:

| CAG number | Bacterial species |
|---|---|
| CAG00013 | Clostridiales_bacterium_1_7_47FAA |
| CAG00142 | Bacteroides_stercoris_ATCC_43183 |
| CAG00218 | Bacteroides_sp_CAG_20 |
| CAG00341 | Eubacterium_sp_CAG_115 |
| CAG00346 | Eubacterium_rectale_M104_1 |
| CAG00474 | Sutterella_wadsworthensis_2_1_59BFAA |
| CAG00508 | Alistipes_obesi |
| CAG00530 | Prevotella_sp_CAG_617 |
| CAG00580 | Clostridium_sp_CAG_62 |
| CAG00601 | uncultured_Faecalibacterium_sp_{—} |
| CAG00607 | Eubacterium_sp_CAG_251 |
| CAG00646 | Alistipes_sp_CAG_268 |
| CAG00668 | Azospirillum_sp_CAG_239 |
| CAG00669 | Firmicutes_bacterium_CAG_103 |
| CAG00713 | Firmicutes_bacterium_CAG_270 |
| CAG00873 | Butyricimonas_virosa_DSM_23226 |
| CAG00880 | Subdoligranulum_sp_CAG_314 |
| CAG00886 | Sutterella_sp_CAG_351 |
| CAG00889 | Megasphaera_elsdenii_14_14 |
| CAG00919 | Clostridium_methylpentosum_DSM_5476 |
| CAG01141 | Holdemanella_biformis_DSM_3989 |
| CAG01158 | Pseudoflavonifractor_capillosus_ATCC_29799 |
| CAG01263 | Clostridium_clostridioforme_2_1_49FAA |
| CAG01321 | Faecalibacterium_prausnitzii_SL3_3 |

15. The method of claim 14, wherein in step (ii), one, two or three equations are used, which correspond to models obtained for the following sets of bacterial species, identified by their CAG numbers:

| set for model 10.2 | set for model 11.2 | set for model 12.2 |
|---|---|---|
| CAG00580 | CAG00346 | CAG00142 |
| CAG00013 | CAG00530 | CAG00218 |
| CAG00873 | CAG00601 | CAG00341 |
| CAG01141 | CAG00607 | CAG00474 |
| CAG00668 | CAG00646 | CAG00508 |
| CAG00669 | CAG00713 | CAG00880 |
| CAG00886 | CAG00919 | CAG01263 |
| CAG00889 | CAG01158 | CAG01321 |

and wherein preferably at least one equation used corresponds to a model obtained with a set of bacteria which are all present in the individual's sample.

16. The method of claim 15, wherein the equations for calculating the probability that said individual resists to the treatment (P_{NR}) or responds (P_{R}) are as follows:
$$\begin{matrix}{P}_{NR} = 1 / [ 1 + {exp}^{\hat{}} - ( {\sum }_{j = 1}^{8} {β}_{j} {X}_{j} ) ] for model 12.2 & [ A ] \\ {P}_{R} = 1 / [ 1 + {exp}^{\hat{}} - ( {\sum }_{j = 1}^{8} {β}_{j} {X}_{j} ) ] for models 10.2 and 11.2 & [ B ]\end{matrix}$$
wherein Xⱼ (j=1 to 8) are the relative abundances of the bacterial species measured in the individual's sample and βⱼ (j=1 to 8) are the following regression coefficients:

| Mode 10.2 | | Mode 11.2 | | Model 12.2 | |
|---|---|---|---|---|---|
| | R | | R | | NR |
| bacterial | coeffi- | bacterial | coeffi- | bacterial | coeffi- |
| species | cients | species | cients | species | cients |
| CAG00580 | −0.1456 | CAG00346 | −0.8463 | CAG00142 | 1.138 |
| CAG00013 | −0.5496 | CAG00530 | 1.13 | CAG00218 | 1.1396 |
| CAG00873 | −0.4646 | CAG00601 | −1.183 | CAG00341 | −1.0166 |
| CAG01141 | −0.5496 | CAG00607 | −0.9544 | CAG00474 | −0.8403 |
| CAG00668 | 0.5684 | CAG00646 | 0.8929 | CAG00508 | −0.7067 |
| CAG00669 | 0.5129 | CAG00713 | 1.0919 | CAG00880 | −1.185 |
| CAG00886 | 0.6623 | CAG00919 | 0.4881 | CAG01263 | 0.8466 |
| CAG00889 | 0.7102 | CAG01158 | 1.1606 | CAG01321 | −0.8895 |

17. The method of claim 1, wherein the fecal sample is obtained before the first administration of ICI.

18. The method of claim 1, wherein the ICI-based therapy is a treatment with an anti-PD1 antibody, an anti-PD-L1 antibody and/or an anti-PD-L2 antibody.

19. (canceled)

20. A theranostic method for determining if a cancer patient needs a bacterial compensation before administration of an ICI-based therapy and/or during such a therapy, comprising assessing, by a method according to claim 1, whether the patient is likely to be a good responder to such a therapy, wherein if the patient is not identified as likely to be a good responder, the patient needs a bacterial compensation.

21. A nucleic acid microarray designed to perform the method of claim 1, characterized in that it comprises nucleic acid probes specific for each of the microorganism species to be detected in said method.

22. A set of primers for performing the method according to claim 1, characterized in that it comprises primer pairs for amplifying sequences specific for each of the microorganism species to be detected in said method.

23. The method of claim 20, further comprising administering a bacterial compensation to the patient.

24. The method of claim 23, further comprising administering an ICI-based therapy to the patient.
